United States Patent Application Publication US 2019/0348154 A1 - sequence listing, part 95

SEQ ID NO: 354918 - DNA, 3516 bp, Pseudomonas aeruginosa
atgtccaagaaaccgaatccatcaacctctgtagctcctgcaactgcgccggcggaaggcgaacgtcgagcactccggggatacattggccagtacgagcgggcgggcgctgccatttatgctgcgctcgagcgcgacgagctgctctggatcggcgtcgcagaccgcaacgcgggcattgccgacgacttggtgctcggtttcgatgggttggtggtcggccaccagttcaagacgtccaagttcccaggcactttcactgttgagacgctgtttactggtgccaacggcctcttgaggcccctggttcatgcttggcagtgcctgcgcaaggacaatccgggaagccgtgtcgaaattcgcctagtcgtcaacgactttccatcgattacggacaagccaggcgacggcacgccgccgcacagcgcggcattccttgaagagttccaacagcatccaaatcgatcgctgtcggattggtacgcggcggaatggagccgactgatcgaccacctgcgccgtgaagccggcctaggcgatgacgatttcgaacagttcttgcacagcctccgcgtggtgtgcggagctgcggcggacttcatccagtcgcacaagttgaacgccgagcaggcacggcaggcgtccgagattgcaagcgtactgcccaagctggtcgccgatgcacgcgacaaagacaggtggacgcgtgacgaactgctttgtgagcttggctggcgtgatcccgccaaaacgctgctcatccaccggttcccggtcggcgcctatgtccagcgcaaccgcgacactgaggccaagctgctagccgcgctgcatgccgccgaccagggctacgtctcactcataggaccgcctggctccgggaagtccactctcctgcaggttgcgctggccactgaggctaatatccggctcgttcgctacttggcgtacgtgccaggtgctgctcaaggcgtgggtcgcggggaggccgacaacttcctgactgacgtcggcacgcagttacgcaacagcggtttggttggacttcgtcttcgcgacgactcgctgcatgagcgccgagagcagttcggcgtcctggtacagcaggctggtgaacgcttcgaccgcgacgggatccgaacaatcatcgtcgtcgacgggctcgaccatgtgcctcgcgaagagcggccgaccaattcgcttctgggcgagctgcctcttcccgctgccatccccaacggggttgtgttcatcctcggcacccagcggctggatctcgcgaatctgaagcccgccgtaagagagcaagcggagaaaagcgagcgacaggttctcatgggacctctcggccgcgaggaggtcgcccggatggcagatgcgcttggcctgcctgccgagattccaagattggatctaagcaacctatcgcatggccacccgctggcaacgcgctacttaattcatgcgctgttgcacgcggacgaagccggccgtaagcaccttctcagcggcgggatgccgttcgacggcgatattgagaccgtgtacagcgctgcttggcgcgagatcgcaagcgatgtcgatgccatggacgtgctgggctacatcgctcgtgctgaggcacctgtggacctgcggctgctggccacaatggtcaaggagtccgcgattgaacgcgctctgatcgttgcacggcacctgctccgtagttcatcccaggggtggagcgtcttccacaacagctttcggctgttcgtcatcgctcaacctcgaacccgcctcggaagcgtcgatgccgaatactcgcagcgcgtgtaccgcgacctcgcccagttggcgaagaacgcgccgcccgaatcggcgcagtactggcttgagttgcgctaccgcgcccgtgccggagacggtgcagatgtacttgcgctggcgatgcccgctcgcttcaggcagcaactggctgacgggcgctctatcgccgagatccacgccgatatccgcctggctctgctggcagtacgtggaacgcacgacgcgaccgccttctcacggctgctgctgtgtcgtgacgaagtggggcggcgcgaaacagcccttgagtacgccaaccagcttccgctggcgatgctggcggtcggggacatcaattcagccctctctttcgtgcagtacttccccagccagggctacgaggtcgttgacgccctgttggcgcgaggggacttcgagcgggcgaaggaactgtttgaaagcctcgagccactgtcgcagctccatacgtccaagttccagaaccacgggcacgaccacaacataacggaattcgagaggtgggcaaggcgcgccatccacttccgagacaccgagcagatccagatagcgattgaccacctcgccgcagaggggttacgccagcccgaaaaggtggatccgcaaactgtcgccgcgctgcaactgcatctgaggagggaagccgcagaggcgatgctccttcagaaggttggcgccgatccacaagacctctgcagcaagctcggggtagccaacgaagacaagccttcggtgatggttcacgcaggtcttgtggccactcggcgtggcgacgttgcgcaagcgcttgccctgtttgatgctgccgccgcccttcctggcttcgtagaggtacccaacggctaccgacgccggatggcactgattgcattcgaagctgaccgtcgtgacctagccgaggccctgttcgacaagctggtcgcaccgatgatctctatgtgcgacgacgagacggacctggctgggctgggtaatctggtcggtgcggtgatgcatcacgcgaggctttgcacgctgctcaataagccgctgccaagcgcgacaccgtcgaagcacaccttccttcatccgttccagcagcacgcctcgacgataggcgtgctgctaggtcgcgccgccgtcgacaacgcgtccgtgccggccggcaccatccaggacgaagcccgcattgcccttgggtacgtcctacgtctgacatcagaaggcggcagcgagtcatatcgcatccagcaggccttcaaagcggtccctatgctcgtgtcagcgctgctgaggctcggcgccaagcgcggcgagactgagtaccgtgcggtacttcgggaaattgacgcagccatcgcctcatcgacgcaggggagcactgcgtacctgcgacgcagattggccgtcgatgcgtatagggttgacggtgaccgggtggcggccgtcgatcgactcaacgcactcgtggcggagcttcaggagagcacgccgagcgagcagatcgacgggttggccgatctggccatcgcgttggctgcggtcggggacttagagcgggccaaacagttgctggcgacggttcccgagcaatgccttggctacgcgttggccccaagaaagacccgcagtacgcagtctggcgagacatcctggtccttgcgaacgccgctgacccggagaaccgtgtcaagcgagtatcgaccttaa

SEQ ID NO: 354919 - DNA, 960 bp, Pseudomonas aeruginosa
gtggaagcgcaccaagttctatgtgaagaaggccatcggcgcggtgttcgacgggattcgcgtgaccctggaaaccttcggcgtgatcgaggaaaccaccgcggtcgagcgcctggccaaggacctcgagaagaaattcgaggtcacccatgcggccggctcgacggtgatggagatcagcttcacctggagcgagccggaagtcgcccaggaagtggtcaaggcctggatcgagatctacatggaagagcgcacccaggcgctcggccgcaagagcctgtacgccttctacgaggcgcagactgccgacagcgcggcgcagatcaagagctacaaggcgcagatcctcaagcacctcaacgagatcggcgcatccagcatcgaggaccgcctgcaggacctgtccgagcggatcaacgtgctgcgcggcgagcgtttcaactcgatccgcctgatcgcctcctccgacagcgccctggaatccacccgccagcaactcaaggggctgcccagggagatcgtcacggtgcggcagatcgcgctgaacccggcgcagcaggacctgcgccggctgctcaaccagaagcgcctggaacgcgccgacatgatgcgcacctacaccgacgacgcgccgccggtgaaggccctggacgcctcgatccgtgccctggagaaggaagtccaggacgaaggcgccaccgtgcagagttccgaggaccgcgcgccgaacaccctgaccactcacctggaacgggtcctgctggacgagaccagcaacaacgcggccctgcgcacccagcttgcggagcaggaaaagcagctcgccgaactcgaggcgcaacggcgcgaagcgctggacatcgagccgaccctggcgcgcctgcagcgcgagctgaacgccaccgagcgcaactacgcgctgtacgtcgacagcctggagaaatcgcggatcgaccgtga

SEQ ID NO: 354920 - DNA, 597 bp, Pseudomonas aeruginosa
atgctgcggctctcgatgccggccctgctcctggctcttgccggctgcgccaccaagccccccgccaatcccgacaacctctgcgagatcttccgcgaaaaaccgaaatggcacgaggcggcgctgaagatgcagcagcgctggggcgcgccggtccaggtgccgatggcgatgatgtaccaggaatcttccttcaagcatgacgccctgccgccgcgctactacttcctcggtttcatcccctggggccgggtcagctccgcctacggctacgcccaggccaaggacgagacctgggccgactacaagcgcgaggccggcggctggggcgccagccgcgacgacttcgccgacgccctggacttcatgggctggtacatccagaagagccagcgggtcaacggcgtctccaagtgggacgcctacggccagtacctgaactaccacgagggctggggcggctaccgcaaccgcagctacgacgccaagccatggctgaagaacgtctcgcagaaggtccagtcccgcgcctcgctgttcggcgcccagtaccgcagttgccagcaggagctgtcgcgcggcggctggttctggtag

SEQ ID NO: 354921 - DNA, 720 bp, Pseudomonas aeruginosa
atgcccctgcctgccctacccctggatgcccttctcaccggccgcgcccggcccttcacccgccccggctcgcgcagcggcatcgccaagtctccgcgcgacggtgcgctcagggtcacccccgtcggcctggaaggcgacgaacagggcgacctgcgcgtccatggcggcgtcgagaaagcgatccaccattacccacgcgaacactacgccgcctggatcgccgaactgggcgaacaccccctgctgatgcaggcgggcgccttcggcgagaacttcagcaccagcggctggagcgaagccgacgtctgcctcggcgaccgcgtgcgggccgggaccgcgctgctggaggtgtcccaggggcgcatgccctgctggaagctcaacgaccgcttcgaggtcgccgggatgtccctgagggtgcaggagtccgggcgcaccggctggtactaccgggtgctggaggaaggcgtggtggcggctggcgatatcctgcaactggtcgaacggcgccatccggactggtcgttgttgcgcctgtccgaggtgctgttcgacaggcgggccgacgccgagttgctgcgccagtgcctggcgctgccgctgacgccatcctggcggcgcaccctggagcggcgcctggaaaaaggccaggtcgaggactgggggccgcgcctggagggagcccccagccaggccgagacgcccaggccgacctga

SEQ ID NO: 354922 - DNA, 741 bp, Pseudomonas aeruginosa
atgagtgaattcaacgaccggttcgccgtcgtcaccggcgcgagttccggcatcggcctgaaactgaccgaaacgttgctcgggcacggcgcgactgtcctggcgatggcaaggcgcgaacgaccgccggaaagcctgcacgcccactccggcaagcgtctgcactggctggcgggcgacgtcacccgcgaacgggacctggacgccctggcttcgcgtgccgcgtccatcggccccgtcgattacctggtacccaacgccggcatcgcccagctcgccgacggcctggacagcctggcgttcgagcagcagtggcgggtcaacggcgccggggcgctgaacaccttttccgtgctcagccggcaaacgagcaaaccggccagcgtagtcttcatcggtaccttcctcagccaagtgaccttccccgggctcgccgcctacatcgcttccaaggcggccctgatcgcccaggccaggacgctggcggtggaatgggcagaaaaaggcgtgcggatcaacctcgtctcccccggccctaccgccaccccgatatgggcgtcactgggcctgagcgatgcccaggcggagtctgtcacccggagcatcaaccagcgcctggtcgacggcagcttcctcagccccggggaaatcgtcgacgtggtgatgttcctgctgtcgtcgaaatccgccgggctctacggccaggagttgatcgtcgacaagggctacgggctgcgctga

SEQ ID NO: 354923 - DNA, 363 bp, Pseudomonas aeruginosa
atgaaacacatgctccccctcatcgcactggccctggcaaccacgactcccctcgcccactccgccgaagtgatttccgcagatagggaccgaacggtcggctacggcgctggcggcgtggttggcgtcatggtcggcgcggccctcggcggtcccctgggcgctatcgccggggccgcgctgggagccctgggaggcgcctccgtccagcaggcaaccggtctgagcgaaaacgcctacaccgttcgctacgaggacggcacgaccgaacgcttccgctctcccaacgcccggttcgacgccggcgaccaggtgcaggtacaaggcatccgcctcatccctgccccgtcgctctcgcgttga

SEQ ID NO: 354924 - DNA, 969 bp, Pseudomonas aeruginosa
atgccggcacccggtgcccgggtgctctggaacgcgcttttcaacaagccgagaagcaccgtcccgcggcagcctttacccgtgctcagcccgagccgtgccgagctcgatgcgaccgtcgatggcagtctgttccgcctgggtcattcgaccttgctgctgaaactggccggtagctggtggctgaccgacccggtattttccgagcgcgcctcgccgttgccgttcgccgggcctaagcgtttccatgcgccgccggtggcattggcggatctcccgccgatccgtggggtaattctttcccacgatcactacgaccacctggaccgcgccgcgatcaaggccctggtcccgctcgtcgaactgttcctggcgccgctcggcgtaggcgaccgcctgctggcctggggcgtaccgccaggcaaggtgcgccaactggactggtggcaaggtatcgaggctggcggtttgcgcctgactgccacgccggcacagcacttctcaggccgtgggctacatgatgggaaccgtacgctgtggtgttcctgggtgatcgaaagcgccgaactgaagctgttcttcagcggagacagcggttacttcgatggtttcgccgagatcggccgacgctacggaccgttcgatctgaccatgctggaaaccggcgcctacaacgaacattggccctacgtgcacatgcacccgcagcagaccctccaggctcaccgggatcttggcgggcgctggctgctgccgatccacaacggcaccttcgacctggccatgcatgcctggtacgagccgttcgaacggatactcgaactggccaccgaacacggcgtgcgggtttccacggcgatgatgggcgaacggatcgatctgcaagcaccgcatgccggccgacgctggtggcgcgaagtggtcgacagcgaaacgcaggtgcagggttacggctgttgcagaagctag

SEQ ID NO: 354925 - DNA, 591 bp, Pseudomonas aeruginosa
atgctgggctggcaggacgaggctgcgttgcgcgagttgttccaggcctccgatatatttttcctgccatcggccggcgaaggtatcgcactggttctctacgaggcgatggcgtgcggaatggccatagtcgcagccgatgtcggcggtcacgcagaactggtctctgcccactgcggcttccttgttccgcggcgcgatgccgaacgagaggccagggattacgccgctaggctcgagagcctcatgcgcgaaccggaaatgctgaggcggatggggcagaactccgcacgccgcatccgcgaagcattcaccttgtctcttttcgagcggcgtttgcgggggttgctggaacgcgtgccggtttcgactccatgcggcgtttgcacggatagtccggtgcctgccctgggggcggccaggctgtccatgcaatgggcgtcctaccgactggcaaacggattgcgctgccggctggatatccagaagcacggccgtttttcaagattcctggagcgatgcgcgaagggggtgttcttcttgcgcacattcggggcgaaggcgctttggcaaaagatcaggaagcactga

SEQ ID NO: 354926 - DNA, 666 bp, Pseudomonas aeruginosa; identical to SEQ ID NO: 321828

SEQ ID NO: 354927 - DNA, 1434 bp, Pseudomonas aeruginosa
atgccgcgtaccgccgtcccctccgtccgccggcgcctgctggtcaacctgctggtcggcttcgtgctgtgctggctgagcgtggcggcgctgacctaccacctctcgctgaagcaggtgaaccgcctgttcgacgacgacatggtggacttcggcgaagccgccctgcgcctgctcgaccttgccaccgaagaccaggccggcgaggacggctccatcaccgagatcatcgaacgcagccgcgaagcgatccagggtctgcccctgctgcgccgcgaaagcgccctcggctacgccctgtggcgcgacggccagccgctgctgtcgagcctcaacctgccgccggagatcacggcccagggccccggcttcagcaccgtggaagcccagggcacccactggcgggtgctccagctgaacatcgacggcttccagatctggatcagcgaaaacctgatctaccgccagcacaccatgaacctgctgctgttctactcgctgttcccactgctgctggcgctgccgttgctcggcggcctggtctggttcggcgttgcccgcggcctggcgccgctacgcgaagtgcaggccgaggtccagcagcgctccgcgcgacacctgcagccgatcgcggtggaagcggtgccgctggagatccgcggcctcatcgacgaactcaacctcctgctggagcgtctgcgcaccgccctcgaggccgaacgccgactgaccagcgacgccgcccatgaaatccgcacgccactggccagcctgcgcacccatgcccaggtcgcgctgcgttcggaagaccccaaggcccacgcccgcggcctgctgcaagtcagtcgcagcgtcgagcggatcagcaccttgatggagcagatcctgctcctcgcccgcctcgacggcgacgccctgctggagcaattccacccggtcaacctcgccaccctggccgaagacgtactctccgaactggcgcgccaggccatcgacaaggacatcgagctgtcgttgcaccaggagaccgtgcacgtgatgggcatcgacctgtggctgaaggcgatggtcggcaacctggtgggcaacgccctgcgctacacaccggccgggggccaggtcgagatccgcgtcgagaatcgcgcccagcacgccgtgctgcgggtgcgcgacaacggccccggggtcgccctggaagagcagcaggcgatcttcacccgcttctaccgcagccccgccaccagcagcggcgagggcagcggcctgggcctgccgatcgtcaagcgcatcgtcgaactgcacttcggcagtatcggcctgggcaagggactggagggcaaagggctggaagtgcaggtgttcctgccgaagacccagccggacgcgacgcggccgccggccagaggtccggacagcgggcggtcacatatctga

SEQ ID NO: 354928 - DNA, 399 bp, Pseudomonas aeruginosa; identical to SEQ ID NO: 321826

SEQ ID NO: 354929 - DNA, 567 bp, Pseudomonas aeruginosa
atgaaaacggcggaagacatcctcgcgctgatcgccgccgattcctcgcgcctgcatctgctccgcgtgctgcgcgaggtcggcccggagggcgcctggatcggcgccggcttcgtgcgcaacgcggtatgggaccatctgcatggctacggcgaagccacgccgctggcggacatcgacgtacttcatttcgccccgcgggccctcgacccgcaggccgacgccgacttcgaggccgcgttgcgccgtcgctgcgaggtaccctggtcggtgaagaaccaggcgcgcatgcacctgcgcaacggcgaccggccctaccgggattgcgccgatgcgctgtgccactgggcggaaacgtgcacggcggtggcgctgcggctcgtcggcgaacgcctggagctactggcaccgctgggcgtcgacgacctgctggcgctgaaggtgcggcccaccgcgcatttcgccggcaagccggaggtctaccggcggcgcctgcgggagaagaactggacggcgcgctggccgctgctggatatcagtggcagcagccagacgccaggtccttga

SEQ ID NO: 354930 - DNA, 894 bp, Pseudomonas aeruginosa
atgcctgttgcacatatcctgctcgccctgctggtgaccctgatctggggtctgaacttcgtcgtgatcaaggtcggcctcggcgacttcccgccgctgctgttctgcgccctgcgcttcgccctggcggcgctgccgctgctggtcctgcgcgggccgatgccggcgccgttcggacgcatcctgctgatcggcgtgctcctcggggtggtcaagttcggcctgctgttcgtcggcatggcccaaggcatgccggccgggctgtcgtcgctggtgctgcagagccaggtattcttcaccatcctcatcgccgccctgtggctgggcgagcggccgtcgccgcgcgggttgttcggcctcctgctggcggcggcggggctggtcctgatcggcctggaacggccgctgggagacagcctgctggcattcctgctggtggtcgccgcagcgctggcctggtccttcgccaatatcgccaccaagcgttccggggccaccgacatgctgcgcctgatctgctgggtcagcctggtcccgcctttgccgctgctggcgctttcctatctattcgaaggtccgcaagccatcgagcgcgcagtgctgaacatgagctggggcggcttcggcgcgctgctctacatcgccttcggcgcgaccacggtgggcttcgccatctggagtttcctcctgcgccactacccggccagcctggtgaccccgttcgccctggcggtgccggtgtcgggcatgctcgccggctggctgctgctcggcgaacgcctcgacctggacagcctgctggcctgcgcgctggtgttcgtcgggctggccatcaccctgttgccggccagcctgctgcgacgcttcgcctggccggtgcggcggttgggatga

SEQ ID NO: 354931 - DNA, 894 bp, Pseudomonas aeruginosa; identical to SEQ ID NO: 321823

SEQ ID NO: 354932 - DNA, 1182 bp, Pseudomonas aeruginosa
atggagagcatgctggacaggcccgagcaggaactcgtgctggtggtggacgacaccccggacaacctgctgctgatgcgcgagctgctcgaggagcagtaccgcgtgcgcaccgccggcagcggcccggccgggctgcgggcggccgtcgaagagccgcgcccggacctgatcctgctcgatgtgaacatgccggggatggacggctacgaggtctgccgacggctcaaggccgatccgctgacccgcgacatcccgttgatgttcctcactgcccgcgccgatcgcgacgacgagcaacagggcctggccctgggcgcggtggattacctgggcaagccggtgagcccgccgatcgtcctggcgcgggtgcgtacccatctgcaattgaaggccaatgccgatttcctgcgcgacaagagcgaatacctggaactcgaagtgcgccgtcgcacgcgccagctgcaacagttgcaggacgccgtcatcgaagccctggcgacccttggcgatcttcgcgacaacccgcgcagccgccatcttccgcgtatcgagcgctatgtcaggctgctcgccgagcacctggcggcgcagcgggcgttcgccgacgagctgactccggaggctgtcgacctgctgagcaagtcggcgctgttgcatgacatcggcaaggtcgcggtgcccgaccgggtcctgctcaaccccgggcaactggacgccgccgacaccgccctgctacagggccatacccgcgccgggcgcgacgccctggccagcgccgagcggcggctcggccagccttccggattcctccgcttcgcccggcagatcgcctacagtcatcacgaacgctgggatggccggggctttccggaaggccttgcgggcgagcggattcccctggcggcgcggatcgtcgccctggccgaccgctacgatgaactgaccagccggcacgcctaccggccgccgctggcgcatgccgaggcggtgctgctgatccaggccggcgccggcagtgaattcgacccacggctggtggaggccttcgtcgccgtggccgacgctttcgccgaggttgcccggtgctacgccgacagcgccgaggcgctggacgtggagatgcagcggctggaacaggcggtggcggaaagcatcgaactcaccgcgccaccggcctag

SEQ ID NO: 354933 - DNA, 246 bp, Pseudomonas aeruginosa; identical to SEQ ID NO: 321821

SEQ ID NO: 354934 - DNA, 891 bp, Pseudomonas aeruginosa
atgcctgcccgtcgccttccgctgttgcttttcggtgcgttcttcgccctgtacttcatctggggctccacttacctggcgatccgcttcggcgtcgagtcctggcctccgatgctgatggccggggtgcgcttcgtcatcgccggcggcctgatgttcgcctggttgcgctggcgcggcgcgccgttgccgacctggcgcgagtggcgcggcgcggggggcgtcggaatcctcctgctcagttgcggcaacggcggggtgacggtggccgagcactggggcgtgtcttccggggtggcggccctcgcggtggctacggtgccgctgttcaccctgctgttcagccagttgttcggccagcgcaacaccaccctggaatggggcggcatcgtgctcgggctgttcggcatcgtcctgctcaacctcggttcgaacctccaggccagccctgccggcgccggcctgatcctgttcgccgccgcgtcctgggccttcggctcggtgtggagccggcgcctgtcgctgccggccggaccgatggccagcgccgcggaaatgctggtcggcggcgcggtgctgctggtcggcagcctggccagcggcgagcgcctggagcattggccgagcaccagcggctggctggcgctggtgtacctgatcctgttcggctcgatcatcgccttcagcgcctaccagtacctgctgcgcaacgtacggccggcggcggccaccagctatgcctacgtcaatccggcggtggcggtgttgctcggcaccctgttcgccggcgagcggatcggcggtatcgaggggctggcgatgctggtgatcatcagcgccgtggtgctcatcggcctgccccagtggcgcgccagccgcgccgccgcctga

SEQ ID NO: 354935 - DNA, 468 bp, Pseudomonas aeruginosa; identical to SEQ ID NO: 321819

SEQ ID NO: 354936 - DNA, 828 bp, Pseudomonas aeruginosa; identical to SEQ ID NO: 354788

SEQ ID NO: 354937 - DNA, 1671 bp, Pseudomonas aeruginosa; identical to SEQ ID NO: 354789

SEQ ID NO: 354938 - DNA, 285 bp, Pseudomonas aeruginosa; identical to SEQ ID NO: 322873

SEQ ID NO: 354939 - DNA, 738 bp, Pseudomonas aeruginosa; identical to SEQ ID NO: 354791

SEQ ID NO: 354940 - DNA, 912 bp, Pseudomonas aeruginosa; identical to SEQ ID NO: 354792

SEQ ID NO: 354941 - DNA, 885 bp, Pseudomonas aeruginosa
gtgaacggcgcgcaactgctggtgctgttcagcggcgtgctggctttcgccgcgctggccctggcgttcatgggctggcgcgccgggcgcaacgaactggtggttgaacggctgctgggacgccaggaggcggtcgcggtgcggccgcgcagcagtcactggctggctcgccagatgcgtcgcgccggtatccagcgcccgcgcccgtggttgttcggggcggcagtgctcgcgctgctgctggtctggagcggattgggcctgttcggcaccatcggcgcgctaggcggcctgctactggcggcgctgtcctgccgcgtcgccctgggcatgctctaccagcgccgcctgaagcgaatgatccggcagatgccgcgtttcctcgaccaggtggtgcgcagcctgcacgccgggcgcacgctgggcgacgcgctgatgcaggcagtggagaatgccgaggagccgctgcgcgacatcttcaccctggcgcgcaaccacgtgcttctcggcatccacctgccggaggcgttgcaggaagtcgccgaactctacgaggttgaggagctgcgcatcctcgccctgggcgtctcggtcaaccaccgttatggcggcaataccagcgacctgctggacagcatcgtcaagctcatccacgagcgcgagaagctcagccggcagttgcacgcgatgaccggcgagacacggatcagcgcctatgtcctggccggcgtgccgagcgccctgggcggctacatcctggcgagcaacccgggctatctgctgaacatgtgggacgacggcaccgggcgtttcctgctgctggcctcgctcgggctgcaactgctcggctgctatgcgctgtggcgcatgctcaagagcgtctag

SEQ ID NO: 354942 - DNA, 1266 bp, Pseudomonas aeruginosa
atgagcacgggattcggcgcgcgtcctgacggcggtgccttccactcccgccaggagcaggacatccaggcgctgaagctgcgcctgcaccgctacatcatcgacgagatcgacgaagacggcatgaacctgctggagggcgcgcgctccgccgtggtccagtacgtctcggaaaaggtctgcgaatacggctcgcgccatcaactggcgatctcccgctacgaactggaccgcctggccgaagaggtggtcgacgaactcaccggcttcggcccgctggagatcctcctgcgcgatcccggcgtctcggaaatcctcgtcaacgggccgggccgggtgttcgtcgagcgggaagggcggctctaccagagcgacctgcgcttcatcgacgaccaccatgtgctgcgggtgatccagcgtatcctcgcgcccctcggccgacgcctggacgagtccagcccgatggtcgacgcgcgcctgccggacggcagccgggtcaacgcgatcattcccccggtggcgctggacgggccgtgcatctcgatccgcaagttcagccaggagctgctgcgcagtgccgacctgctggcctaccagagcgtcgacgaagccttgctcgagttcctccgccaggcggtctcgcgccgctgcaacatcctcatcagcggcggcaccggcaccggcaagaccaccttgctcaacgtcatcagcggcttcatcgacgaacgcgagcggatcgtcaccatcgaggacaccgccgagctgcaactcggccacgaccacgtggtgcgcctggagacccgtccgccgaacgccgagggctacggcgaggtgaccgcccgcgacctgatccgcaacgccctgcggatgcgcccggaccggatcatcctcggcgagatccgcggcgtcgaggtactcgacgtgctgcaggcgatgaacaccggccacgacggctcgatgagcacggtgcacgccaactcggcgatggattcgctgctgcgcatggagatgctggtcggcctgaccggcaacaggctgccggagcagaccttgcgcctgatgatctgcgccgcgctggacgtggtggtgcagatcacccgcctggccagcggtcggcgttgcatcagcgaagtgctggaggtgctggaggtgcgcgacggcgtgtacgtcaccaataccctgttcagtctcgaccggcgcggtagcgggcagttcgtccgccaggccgcgccggtcgggcagaaattccgccaggcgctgctgtga

SEQ ID NO: 354943 - DNA, 1185 bp, Pseudomonas aeruginosa
atgaaccagaacttcgtggcgctgacccagcatcccggcgaactcgactggttgcagaacagcctggcgtccgccggccaggtggttccggcaggcagcgccagcctggaggagctgctggcgctgctcgacgtcaccgccgccggggtgctgttcatcagcctcggcaaaagcaacctggtgtcccagggcgcgctggtcgagggattggtatcggcgcggccgatgctctcggtggtggccatcggcgacggcctggacaaccagttggtgctagcggcgatgcgcgccggcgcgcgcgacttcatcacctacggcgcccgcgccagcgagctgaccgggctgatccggcgcctcggcggacgcctgcccagcgtgccggtgagcgcggcgcgccagggcgagctgctgaccctggtcagcgcccgaccggacgccgacggcgccttcgtcgccttgcacctggccaaggcgttgcaggagcagacgccgaaccaggtcctgctgctggacgtcggccagcccaccggcgaggcgctggcgatcctcggcctggactcggccttcaccttcagcgatgccttgcgcaacctgcggcgcctcgaccagaccctgatcgacagcgccttcacccgcctcgacagcggcctgcggatactcagcctgaccgacgagcccggcgtgctggagcgagtcaccaccgccgaactctatctgttgctgggcaacctgcgcggggcgttcagccatgtggtggtcaacctcaccgggctgcccgagggcgagctgagcaaccagttgctggtgcaggccaaccgcgtgctgtggatggtcgaccagagcgtgccgtcctgcaagaagggcctggagcgcctgcgccgcctgcgcgagcgcaacctgccgttgccctccatcgagttgctgatcgagcgctacctgcccaatgtggcgccggaccagcaggccctgagccggatgttcgacctcgatctgttcggtgtcctgccgttgtccccggaatcgcgcctgcgcgcgaagaacctcggcaagagcctgttcgaggtggcgccgcgcgacccattggcggccaagctgcggcaactggcggacagcctgtgcgtgacacgcggcgagcgccgttcgctgctgtcctggctcggccgggccaaggcggcgctgctatga

SEQ ID NO: 354944 - DNA, 1251 bp, Pseudomonas aeruginosa
atgcatcggagcaccgggataggcgtgtcgcgctggctgggagggctgctgggggtggcgttggcgctgccggcactggctttgccgcagggctgcatcgagttgctggcgcaggcgccgcgggtcgacgtcgtccagggacaacagcgtgacctgcgcctggcggtgccgatcgaacggctggccatcggcgatccgaagatcgccgacgtacagttgctggatcgtcgcggcttcctggtcaccggcaaggaacagggctccaccagcctgctgatctggaccggctgcagtcccgagccgttgcgcagcctggtggaggtcgagggacgcggtagcgtcgatacccgcggtgctccagcgttcaccgccggcgccgcggaggagctaccgaaccaggtgcagaccgatatccgcttcgtcgaggtcagccgcagcaagctgaagcaggccagcacctcgttcgtccgccgcggcggcaacctctgggtgctcggtgcgccgggcagcctcggcgatatcaaggtcaatgccgacggcagcggcctgggcggcaccttcggcaccggcagctcgggattcaacctgatcttcggcggcggcaagtggttgagcttcatgaatgccctggagggcagcggcttcgcctataccctggcgcgcccgagcctggtggcgatgagcgggcagagcgcgtcgttcctcgccggcggcgagtttccgatcccggtgccgaacggcaccaacgacaacgtcaccatcgaatacaaggagttcggcatccgtctgaccctcaccccaacggtgatgaacaaccgccgcatcgctctcaaggtggcgccggaggtcagcgaactggactacagcgccggcatccagagcggcggggtggcggtgccggcactgcgcgtccggcgcaccgacaccagcgtgatgctggccgatggcgagagtttcgtgatcagcggactgaccagcagcaactcggtgagcaacgtcgacaagtttccctggctgggcgacatcccgatcctcggtgcgttcttccgctcgaccaagctggacaaggacgaccgcgagctgctgatgatcgtcaccccgcacctggtccagccgctggccgccgacgcacagttgccggacctgcccggcgagggcctgcggcactacgatccggggttctcgcgcctgtacttcctcgagcgcggcgagtacgacggccagcagaacgacaccggtctgtcggattag

SEQ ID NO: 354945 - DNA, 912 bp, Pseudomonas aeruginosa
atgaatagcaaggtgctgatggccctggccggcctgctgctgctcggtgcggtgttgctcggatacctcggcgtatccatcggccgcgcgccatcgaacgcgcatgctccatccgtggcgccggcttcggcggcggtggacgcttcgctggaaaagctcgaacgcaagccggtgctggtggccagtcgcgatctcccggcgctggcggtgatcggcaaggacgacctgagcgtcgagctgttgcggaccgcaccggtcggtagctacgacaggcccgaggcgttgctcggcaagcgggtctgggtcgcggtgccggccggcagcattctttccgccgcgaccctcgaacccggcggtccgctggcccggaccatccgtccggacgagcgggcgatggcgatcgctgtggacgaagtggtcggcggcggcggcttcgtcctgcccggcgactatgtcgacgtgatgctcttcgtgcgtgacgagcgggacggcgaatcgaccccgctggcgcaactggtgttgcccggagtccgggtactgacctacggcgagcggatcgccgtgggcagcgatgggcaggaccgctcgaaccaggaaaaggacccgcgtccgccgcgtaccgcggtgctggcggtaccggaggacggcgtggcgcggctgatgctggcgagccaggccggttcgctgcgcctggccatccgcagcaaggacgaagaactctaccgcagggagcaggaaggcgcgctgctgcaagcgtcgctgggcgcgccgagcgcggcgctgagtctcgaccaactgctggagcgccgcaaaccgacggcgccgagcgtgcgcagcgcggctccgcgcgtgccggtggccaacggggtcacggtctaccgtggcagcgccatgacccatgaagcgccttga

SEQ ID NO: 354946 - DNA, 948 bp, Pseudomonas aeruginosa
atggtcgcgggcgttgaccgagccttccagggtcagcacgtcgaagacgtcggcgtcgatctgctcgctgaagcggcgcagttcgtcgaggctcatctcggcgaggtccttgccgctgtccacgccgtacttcactgcgtggccgacgatctcgtggcagtcgcggaacggcaggcccttgcgcaccaggtagtcggccaggtcggtggcggtggagaaaccgcggcgtgccgcctcgcgcatgatctcgcgccggggccggatcgccgggaccatgtcggcgaaggcgcgcaggctgtcgcgcagggtgtcggcggcgtcgaacagcggttccttgtcttcctggttgtccttgttgtaggccagcggctggcccttcatcagggtcagcaagccggtgagggcgccgaacacccggccggacttgccgcgtaccagctccggcacgtcggggttcttcttctgcggcatgatcgaggagccggtgcagaagcggtcgggcaggtcgatgaactggaactgcgcgctggtccacagcaccagctcttccgagaagcgcgacaggtgcatcatcgccaggctggcggcggcgcagaattcgatggcgaagtcgcggtcggagacgccgtccagggagttgccgccaaccgcgtcgaagcccagcaactggcaggtgatctcgcgctggatcgggtaggtggtgccggccagggccgccgagccgagcggcatgcggttgacccgcttgcggcagtcgaccaggcgctcgtagtcgcggccgagcatctcgaaccaggccagcaggtggtggccgaaggtcaccggctgggcggtctgcaggtgggtgaaaccgggcatgatggtgtcggcttccgcttcggccaggcccagcaggccctcctgcaggcgggtgatctcggcgaggatggtgtcgatctcgtcgcgtag

SEQ ID NO: 354947 - DNA, 942 bp, Pseudomonas aeruginosa
atgtcgtcccgcgaaatccgcatcgccactcgccagagcgccctcgccttgtggcaggccgaatacgtcaaggcgcgcctggaacaggcgcatcccggcttgaccgtcaccctgctgccgatgaccagtcgcggcgacaagctgctcgacgcaccgctggcgaagatcggcggcaagggcctgttcgtcaaggaactggaaaccgccctgctcgaaggcgccgccgacatcgcggtgcattcgatgaaggacgtgccgatggactttcccgaggggctcggcctctacaccatctgcgagcgcgaagacccgcgtgacgctttcgtctcgaacacctacgccagcctcgagcaactgccagccgggagcgtggtcggcacctccagcctgcgccgccaggcgcagctgctggcgcgccggccggacctgcagatccgtttcctgcggggcaacgtcaatacccgcctggccaagctggatgccggcgaatacgacgcgatcatcctcgccgccgccggcctgatccgcctcggcttcgagtcgcgcatccgctcctcgatcagtgtcgacgacagcctgcccgccggcggacaaggcgccgtcggcatcgaatgccgtacggccgacagcgacctgcatgccttgctggaacccttgcaccataccgacacggctctgcgggtcactgccgagcgcgcgctgaacaagcggctcaacggcggttgccaggtgccgatcgcctgctacgccatccgcgagggcgaccaactgtggctgcgcggcctggtcggccagcctgatggcacccagttgctgcgcgccgaggggcgggcgccactggcggaagccgaggcgctgggcgtgcgggtggccgaggacctgctggagcagggcgccgaagcgattctcgaagccgtctacggcgaggccggacatccgtga

SEQ ID NO: 354948 - DNA, 246 bp, Pseudomonas aeruginosa
atgtttgcaaggatcgttgttggggttttgattggtgttgtagctggcatttttataaattctaagttgccgatcgagcctaaaacgatgcagataatccaaatatttattgctgtcatcgccatcgcatttattgctgcttcgtttaagtttggcgccatatatggcgtcatggctattgcagaaatcgctggaggctacttcgcctgtcttaagttgttttacggcaagggcgttgagcgctag

SEQ ID NO: 354949 - DNA, 1413 bp, Pseudomonas aeruginosa
atgctggagctgtttaaggatagggaagccgagtacctgcagtgggtagagtcgaatcctgctgcttacgttgcgaacgtagataaagcgcattccttcccgcactacccggtggtccaccacgcctcatgcagcacgttggccggcaaggagaactacaccgttggcgactactacaaggtctgcgctgacaccttagaggaagttgaacagtggtctctgcgggaagtggggaggcctgctcactgctgtgtcgtctgtagccctattcgctggactggcttctggtgggtcaaccataagcaaactgccagggtcgaactggacggcggctacatctggtcgccgaagaagaagaaaggaggtgcccgcaaccaggcgtacatcaatctcactctggttcgtcctggtgatttcgttgtttcctatgccggaggcgtcatcaaggccatcggcgttgcaatggcacgatatgcagagtcgcagaagccagagggctatggccccgcaggcgagaattggaatcaggccggttggcgggtaccagttgagtggactctgctcgacactccaattcgaccgaaggaacatatcagcgagatagctccactgctgcctgagcggtactcgcccctccaacagagcggcgatggtaaccagggcttctatctgtccaacatctccgatgagcttggagcggtggtgctgcgtttggctggtgctcgggccgcaactgcccgacagatcgctgagcgcgtcacctgcaaaacatctggtcggctacccgtggcgcaactgcgtaaggtcacagcatttcatgtatgggaggccgttcgggatctgcttgagggtgtcgaggtcccagatttcggctcccccatcaagttcgagttggtgactgaggacggcgaaaggttgccaccaaaagcagttttcggacttgccgcgacgcgggccctgggatttgccatcaaaccgaagcatttcactgcaggtgtgggtagcccttgcttccagattcttatggacgctggctttccaatcgtcccacttggggaaaaggtggctgctccagaagcgcatatccttcttgaggatcagctctggacagagggtaatcccaagctggcaacccatctccgccgggagcgcgccaccggtctggctaacgccaagaaagccaagttccgtgaggagcatggcgagctcttctgcgagcgttgcaagcttaagcccaccgaggtctatggtgagttgggagatgcctgtatcgaagtacaccacaatgcaacccaagtcgctgatatggcggccgggcatcaaaccagtctcgaagatcttcagtgcctgtgcgccaactgccatcgagtagtgcaccgactcctcaaacggggactggttccgcacccatag

SEQ ID NO: 354950 - DNA, 717 bp, Pseudomonas aeruginosa
atgcgcgacgagccgtcccgccccctgacggtgatctaccagtccctgcgcgagcagatcgagcgcggcctgctcgcgcgcggcagcaagctgcccagcgaacggcaattgagcgagctgttctcgaccacccgcatcaccctgcgcgaggcgctcggccagttggaggaccagggcctgatctaccgcgaggaacgccgcggctggttcgtctcgccgcagcggctgctgtacaacccgctggtgcgcagccacttccacgcgatggtcgccgaccagggccgggtgccggagaccgaggtgctcggcgcggcgatgatcccggccagcgtcgacatctgccagcgcctggagctgccggcgctgtcgcgggtgttccagatccgccgggcgcggcgggtcgacgggcggctggtgctgtacgtcgagcactacctgaatcccgcctactttcccggcatcgagcgcttcgacctgactcgctcgctgaccgatctctacgccaaccactacggcatccgctacggccgggtgcgcttcgaaatggtcccgaccatcctcccggcggaggccgcgggaccgctgcgggtctcggtgggcagcccggcgctacagatcgtgcggatcaaccgcgaccaggcgggccgcctgatcgactgcgacctggagtactggcgccacgacgcgctgcaggtcaacgtcgaggtgcccgagtag

SEQ ID NO: 354951 - DNA, 903 bp, Pseudomonas aeruginosa
atgctgagaaacgtcaccgacctagacctgcgtctgttgcgcatcttcgcctgcgtggtgaagtgcggcggtttcaccgcggcccaggccgagctgaacatgagccagtcgaacatcagcatgcacatcgccagcctggagaagcgcctcggctaccggctctgcgagcgcggcaagggcggcttccgactgaccgccaagggtcgccgggtgctggaggcttcgcgaacgatgttcgacgccatcggcctgtttcgcgaccaggcgcaggcgttgtccggacgtttggtcggggagctgtacctgggcctggcggacaatctcgcgaccttgccccaggcccgtttcggcgatgcgctggcgcgcttccagcggcgcgaccaggatgtccaactgaaccttttcgtcaattcgcccaccgagctggaactggcggtgatcgaaggcgagctggacctggcgatttcctatttcagccgtttgcggccgagcctcgaataccgcccgctgtatcgcgaagagatcggcgtgttctgtggcgatcgccatccgctgttcgccgaggcgcagccgaccctggagcggatcgccgcctgtgactgggtgatgcatggcttcctgccggaaaacctggtcctgccgctacgcccgtcgcgcagccgcgccaccgcctaccacatggaagcggtcgcccatgccgtgctggccggcacccacctgggctacctgccgacccattacgccgaagcctggatcgagcgtgggcggatgcgcgcgctgttgccggagcggctgagctacccggtggagcacagcatgatcgtctatgccgggcgccccctcagcgaagccgcccgcgccttcatcgacgacctgctgcaggtccacggcctggggtcctga

SEQ ID NO: 354952 - DNA, 1182 bp, Pseudomonas aeruginosa
atgagcgacctgcattactggaactaccccaccgatatcctctgcggcgtcggcgccctggaacaactgccgaggcgttgcgcgctggcgggcgcacgccggcccctgctggtcaccgatcccggcatgcgcgccctggagcccctgcgcctggtgcgcgaatgcctggaacgcgccggcatcgaccatgacctgttccacgaactgtcgagcaaccccagcctcgctgaagtccacggcggcgccaggcgcttcgaggctggcgggcatgacgcgctgatcgccctcggcggcggcagcgccctcgacgcggccaagggtatcgccctgctcagccgcgatccgcacggcctagaacgcttcgaatggacacagacgctgcgcagctatccgaccctcgccgactacccgctgctcggcctgccgccgctgctggcgctgcccacgaccgccggcaccggctcggaactgggacgcgaggcggtgctgaccgatacgcaactgggcatcaagcgggtcgtcggccatcgcgagctgctggccgcctgcgtattcctcgacccgcgcctgacccgcgggttgccgccggcgctgagcgccgccaccggcatggacgccctcacccatcacctggaggcgctgttctcgccgctctaccatccgatgtcggcgggcatcgccctggaaggcgtgcgcctggtcaggcagcacctggaaaacgccgtgcgcgacggcaacgacctcgccgcccgggaaggcatgctggtagcctcggccagcgccgcagtggcattccagaaggggcttggcggggtccacgccctggcccacccgctgggcgctcgccatcacctgcaccacggcctgctgaacgccgtgctgctgccctacgttctgctggccaaccgcccggcggtagaagccgacgccgcgcgcctggcgcgctacctggaactcgacgaagcgagcttcgacggcctgctggcgtggatcctcgaactgcgcgcgcgcatcggcatcccggcgaacctcgccgccctcggcctggatggcgaggacgcgcaatgggtgggcgagcaggcgctggccgacctgtcgtcctcggcgaccaacgccctgccgctcgatgcccgggattatgcgcgcatctaccgccaggcggtggccgggactctcgcctga

SEQ ID NO: 354953 - DNA, 1491 bp, Pseudomonas aeruginosa
atgactgatctccgcgatgcctcccgcgacgaacgcctgctggcggcccacggctatcgccaggaactggagcgcgggctgagcctgtggtcgtccttttccgtcggcttcgccaccatctcgccggtggtgggcatctactcggtgatgtccctcggcgccatgagcatgggcccctcctgggtctgggtggtgccgctgtgcctgctgctgcagttcggcgtggcgctggtctacgccgagctgtcctcgcagtttccgctggccggcggctgctaccagtgggtgcgacgcctggtgggcgaccgcctggcctggttcaccggcttcctctacctggcttcggcgctggcctcgctgaccaccgtggcctacctcggcggcttctggctcggcctgctggcgaccggcgcgccgccgtcggccaacggccaggtgctctgcggcgcgctgctgctggcgctgggcctggcggtgaacctgctggggatcaacccgctgaagtacttcgtcaatgccgggatcgtcgccgaggccatcgcctccatcggtatcggcgtgctgttgctgctgttcttccgcaaccatccgctcgacctgctgttcagcggcccgggcggcacaggcggtgcggacggcgcctacctggacggcgtgctgaccgcgctggcggtgggcggctgggctttcctcggcttcgacgcctgctcgcagatttccgaggaaaccaccgatgcccgcgtctccactccccgggcgatcctgcgctcgatgctggtggtgggactcaccgtgatgctcaccgccttcgccgtgaccctgtcctaccaggacatcggcgcggtggtcagcggccaggtggtcgacccggtcaccccggcggtggtggacgccttcggcgcctgggccgagcggcccttcgtcgcagtggtgctgatcgccttcgtcgcctgcgtggtgtcggtgcagacctacatcggccgggcgatcttcggcatggcgcgcgacgccatcctgcccggctccgccctgctgcgccgggtcgaccggcgcaaggtgccgatggcggcgatggtctgcagcacgctgctggccagcctcggcctggccctggggctgaacgccacggcggtcggcacgctgatcgcgttcggcagcggcggtttcttcgtggtctttctgatcgtcgccgcctgcgccctctgggcccgcctcgtcggccgctgggacccggacaagggcgccttgcgcctgggacgcgcggggctggcggtgaacgtcctggcagtcgcctggctgtcgttcgaggcgctcaacgtcgcctggccgcgggccagcctcgccccgcccgacgcgccctggttccaggtctgggcggtggtcgtggtgttctccgcgctggccgcgttcggcctgctctacatggtcatcgccaagccgcatcggcgcatcgccaccagcctcagcttcgccgctccgccggcggactga

SEQ ID NO: 354954 - DNA, 1917 bp, Pseudomonas aeruginosa
atgcacctgataccccattggatccccctggtcgccagcctcggcctgctcgccggcggctcgtccgcgtccgccgccgaggaagccttcgacctctggaacgaatgcgccaaggcctgcgtgctcgacctcaaggacggcgtgcgttccagccgcatgagcgtcgacccggccatcgccgacaccaacggccagggcgtgctgcactactccatggtcctggagggcggcaacgacgcgctcaagctggccatcgacaacgccctcagcatcaccagcgacggcctgaccatccgcctcgaaggcggcgtcgagccgaacaagccggtgcgctacagctacacgcgccaggcgcgcggcagttggtcgctgaactggctggtgccgatcggtcacgagaagccttcgaacatcaaggtgttcatccacgaactgaacgccggcaaccagctcagccacatgtcgccgatctacaccatcgagatgggcgacgagttgctggcgaagctggcgcgcgatgccaccttcttcgtcagggcgcacgagagcaacgagatgcagccgacgctcgccatcagccatgccggggtcagcgtggtcatggcccaggcccagccgcgccgggaaaagcgctggagcgaatgggccagcggcaaggtgttgtgcctgctcgacccgctggacggggtctacaactacctcgcccagcagcgctgcaacctcgacgatacctgggaaggcaagatctaccgggtgctcgccggcaacccggcgaagcatgacctggacatcaagcccacggtcatcagtcatcgcctgcacttccccgaaggcggcagcctggccgcgctgaccgcgcaccaggcctgccacctgccgctggagactttcacccgtcatcgccagccgcgcggctgggaacaactggagcagtgcggctatccggtgcagcggctggtcgccctctacctggcggcgcgactgtcgtggaaccaggtcgaccaagtgatccgcaacgccctggccagccccggcagcggcggcgacctgggcgaagcgatccgcgagcagccggagcaggcccgtctggccctgaccctggccgccgccgagagcgagcgcttcgtccggcagggcacaggcaacgacgaggccggcgcggccagcgccgacgtggtgagcctgacctgcccggtcgccgccggtgaatgcgcgggcccggcggacagcggcgacgccctgctggagcgcaactatcccactggcgcggagttcctcggcgacggcggcgacatcagcttcagcacccgcggcacgcagaactggacggtggagcggctgctccaggcgcaccgccaactggaggagcgcggctatgtgttcgtcggctaccacggcaccttcctcgaagcggcgcaaagcatcgtcttcggcggggtgcgcgcgcgcagccaggacctcgacgcgatctggcgcggtttctatatcgccggcgatccggcgctggcctacggctacgcccaggaccaggaacccgacgcgcgcggccggatccgcaacggtgccctgctgcgggtctatgtgccgcgctcgagcctgccgggcttctaccgcaccggcctgaccctggccgcgccggaggcggcgggcgaggtcgaacggctgatcggccatccgctgccgctgcgcctggacgccatcaccggccccgaggaggaaggcgggcgcctggagaccattctcggctggccgctggccgagcgcaccgtggtgattccctcggcgatccccaccgacccgcgcaacgtcggcggcgacctcgacccgtccagcatccccgacaaggaacaggcgatcagcgccctgccggactacgccagccagcccggcaaaccgccgcgcgaggacctgaagtaa

SEQ ID NO: 354955 - DNA, 309 bp, Pseudomonas aeruginosa
atgatcacgcagggcaccagccagaccaccgcctcgatgcggttggagtggtgccagtccggcttgtactcggcctgggtgttcgaggcgcggtacttccaggcgaacgccagggtcatcacgatcaccgggatgaccacgatcagcatcagcagggtcgcggtaatgatcagggtgcgctcgtccatgcccacctgccctttcgggttgaacagggtcatgtcgcagccgccgagcagcagcgcgggcgccagggaaagccatttcaatgcggcaaacgggtttgctttggtcatcttccggccttaa

SEQ ID NO: 354956 - DNA, 615 bp, Pseudomonas aeruginosa; identical to SEQ ID NO: 321625

SEQ ID NO: 354957 - DNA, 387 bp, Pseudomonas aeruginosa
atgacttgtgcctaccgccgggaaatccaccatgcccacgtggcgatccgcgactggctggccggcgactcacgggctgacgcgctggatgcgttgatggcgcgtttcgccgaggacttctcgatggtcacgccgcatggcgtggtcctggacaagactgctctgggcgagctgttccgcagcaagggcggcacccgtcctgggctgcgcatcgagatcgacggcgagagtctgctggcttcaggcgtggatggcgcgaccctggcctatcgggaaatccagtccgacgcggcgggtcgcagcgagcgcctgtccaccgtagtcctgcaccgtgacgacgaagggcggctgtactggcgccacctgcaggaaaccttctgcggctga

SEQ ID NO: 354958 - DNA, 1359 bp, Pseudomonas aeruginosa
atgaatcaaccgtcccgcctggccactttgtacctgctggggttcgccctggacctggtgaacatcttcatcgccagcgtcgcctacccggacatcgggcgttcccttggcgcttcggtggcgaccctggcgtggatcggcaacacctacctgctcggcttgaccctggtgattccgttgagcgtctggctcgcttcgcgcctgggagaatggcgactgatgctgctggcactggccggtttcgccagcgcttcgctgggttgcggcctggctggatcggcggcgacgttgatcgtctggcgcctgtgccaggggttggccggcgggttgctgatccccctcggccaggccatggcctatcggaatgtcccggcgtcggcacgggccggcctgaccgcacgggtgatgctggtggcgctgatcgttcccgccgtggcgcctgccctcggcggctggctggtggacagcctgtcctggcgtgggatcttcttcgccagcgtggcgccggcgctgctggtgctggccctggcgatgcgctggctgcccaggcacaagcatgcggcgcagcgcctggacctgcgcggcctgctgctcggctcggcggcgctggccacgctgctggtggcgctcgccttgctgggatcgcccggcggcggcgggcgtggcctgctcctggcgctgctggcctgcgtgctgggctgctgctactggcgtgacgggcgcgctcgtaccgacgcgctgctcgaccttggcttgctggaggcgccattgctgcgtacggcgatgctggtctatctctgcgtgccgggagccttcatgggcgccaacctggtcgccatgctctatctgcaaggccccctcggcctcagcgcgagccgtgccggtgcgctgatgctgccctgggcgctggcggccggcctggccatcggcctgacccggcgacgcttcaatcgctgggggccgaaatccttgctgctggcgggcatggcgatacaggccggcggcctgctgtggctggctcgaagcggggaggggagcggcttctggcaactggcgggggcctacgcgaccatgggattcggcggcagcctgtgtagcagcgcggcacagggcatggccttgctcgacgtcccggcggcgcgcatgggccatgccagcgctttgtggaacatcaatcggcaactggcgttctgcctgggcatggccgtgctcggtgggttgctcaacctgttgcaggcgctggccgaccccgcggccttcgtccactgcttcctgttcgccgccgctttcacgctattgcctctgccgtgggtgaggcgtatcgattccgccggggttcgcgccctggtccagacctga

SEQ ID NO: 354959 - DNA, 912 bp, Pseudomonas aeruginosa; identical to SEQ ID NO: 340049

SEQ ID NO: 354960 - DNA, 828 bp, Pseudomonas aeruginosa
atgaattacaaccagccagccaccctccaggccgccatcctcgactgggcgggaaccgtggtcgatttcggctccttcgcgccgacccagatcttcgtcgaggccttcgccgaattcggcgtccaggtcagcctggaggaagcgcgcggtccgatgggaatgggcaagtgggaccacatccgcaccctctgcgacatcccggcgatcgccgagcgctaccgcgccgtcttcggccgcctgcccagcgacgacgatgtcaccgccatctacgagcgcttcatgccgctgcagatcgaaaagatcgccgaacattcggcgctgatccccggcgccctgcaggcgatcgccgaactccgcgggatgggcctgaagatcggttcctgttccggttatccggcggtggtgatggagaaggtggtagccctggccgagaccaacggttacgtcgccgaccacgtggtggccaccgacgaagtgcccaacggccggccatggccggcccaggcgctggccaacgtgatcgccctggggatcgacgatgtggcggcctgcgtgaaggtcgacgacacccggccgggtatcctcgaagggcgccgcgccgggatgtggacggtggcgctgacctgctcgggcaatgccctgggcctcacctacgagcagtacaaggcgctgccggcggccgaactggagcgcgagcggacgcgtatcgaacagatgttcgaaggttcgcgtccgcactacctgatcgagaccatcgccgagctgccggcggtggtccgcgacatcaatgcgcgcctggcgcgcggcgagatgccgcagggtaactga

SEQ ID NO: 354961 - DNA, 1116 bp, Pseudomonas aeruginosa
atgagcactgccgaacgcgcacctatcctgctgacccccggtccgctgaccacctcctaccgtacccgtcgggcgatgatggtcgactggggctcctgggacagcgatttcaacgaactcaccgccagcgtctgccagcgcctgctgaagatcgtaggcggcgaaggcagccacacctgcgtaccgttgcagggcagcggcaccttcgccgtggaagcggcgatcggcaccctggtgccgcgcgacggcaaggtcctggtgttgatcaacggtgcctacggcaagcgcctggcgaagatctgcgaggttctgcaacggcccttcagcaccttcgagaccgaagagaacgtgccgaccaccgccgctgacgtcgagcgtctgctggccgccgatccggcgatcagccatgtggcgctgatccactgcgagaccagcaccggcatcctcaatccgctcgaggccatcgccaaggtcgtcgagcgtcacggcaagcgcctgatcgtcgatgccatgagctccttcggggcgatcgggatcgatgcccggaaagttccgttcgatgccttgatcgccgcctccggcaagtgcctggagggcgtccccgggatgggcttcgtcttcgcccgcagcgccgccctggaagccagcgccggcaactgccactccctggccatggacctgcaggaccagcacgcctacatgcgcaagaccgggcagtggcgcttcaccccgccgacccatgtggtcgccgccctgcacgaagcgctcagccagtacgaagaggagggcggcctgccggcgcgccagcggcgctacgcgagcaattgcgaaacgctgctcggcgagatgacccggctcggtttccgcagcttcctgccggcggaaatccaggcgccgatcatcgttaccttccacgcgccgcgcgatccgcgctaccgcttcgccgacttctaccaacgcgtgcgggagaagggcttcatcctctatccgggcaagttgacccaggtggaaaccttccgcgtcggctgcatcggccacgtcgacgccgcggagatgcggcaggcggtcgccgccatcggcgaggcgctgcgcgaactggaagtcctcgagatctga

SEQ ID NO: 354962 - DNA, 1596 bp, Pseudomonas aeruginosa
atgctccatccgttgctccgacacctgcccctggccctggcgctatgcgccgccggcgcggcccaggcgaagaacctggtggtctgcaccgaggccagcccggaaggcttcgacatcgtccagtacaccggcgcggtgaccgccgacgcctccgcggaaaccgtgttcaaccgcctgctcgccttccgccccggcaccaccgaggtgatcccggggctggccgagcgctgggacgtcagcgccgacggactgagctataccttccacctgcgccccggcgtgaaattccataccaccgactacttcaagccgacccggagcctgaatgccgatgatgtgctgtggaccttccagcgcgccctcgatccgaagcatccctggcatgcctcggcgctgcgcggctacgcctacttcgacgcgatgggcatgggcgagctgatcaagtcggtggaaaaggtcgacgagctcaccgtgcgcttcgtcctcaaccgtcccgaagcgccgttcctgcgcgatatggcgatgcccttcgcgtccatctattccgccgagtacggcgaccagttgctcgccgccggcaagcagggccagctgaacaaccagccgatcggcaccgggccgttcgtcttcaagcgctacgccaaggacgcccaggtccgctacacggcgaacccggactactacgccggcaagccgccgatcgacaatctggtgttcgccattaccctcgatcccaacgtgcgcatgcagaaggtccgtgccggcgagtgccaggtctcgctgtacccgaaaccggaggacgtgccgcgcctgaagcaggacccgaacctggcggtggacgagatcgatgccctgctgaccacctacattgccatcaacacccagcacaagccgctcgacgacccgcgcgtgcgccaggcgatcaacctcgctctggacaagaaggccatgctcgacgcggtgttcggccccggcgcggccagtccggcggtcggtccctatcccccgaccctgctcggctacaaccattcgatccaggactggccgcacgatcccgaacgcgccagggcgctgctcaaggaagccggcgcggaaaatctcaggatcaccctgttcattcgcaacggcacctcgcctaccatccccaaccccgccctggcggcacagatgctgcaggcagacctggccaaggccggcatccagctgaccatccgttccctggaatggggcgagctgctcaagcgttcgaaggccggcgagcacgacctgtcgctgcttggctgggccggcgacaacggcgacccggacaacttcctcagcccgaacctgagctgcgccgccgccgagtcgggtgaaaaccaggcgcgctggtgcgacaaggacttcgaggcgctgatgcgcaaggcccgcgaggtgagcgatccggccgagcgggcgaaactgtacgagcaggcccaggtggtattccacgaacaggccccatggataccgctggcctacccgaagctgttcaatgtccggcggaacacggtgcagggctacgtgatcaatccgttgagcaacaacaacttcgccaccacctcggtgaagccgtag

SEQ ID NO: 354963 - DNA, 912 bp, Pseudomonas aeruginosa
atgaacgccatgcacaacgctcccgccagcgacccgagcctggtctacccgtccccgctgaaggaattctggcaggccttcgcgcacaacaagggcgccctcggcggcctgctgttcatgctgctgatcgtgttctgcgcgctgttcgccccctgggtcgccccctacgatccgagcgagcagttccgggacttcctgctgaccccgccatcctggctggaaggcggccaggcgcgcttcctgctcggcaccgacgagctgggccgcgacctgctctcgcggctgatccacggcgcccgcctgtcgctgctgatcggcctgtcctcggtggtgatctcgctgatccccggcatcctcctcggcctgctcgccggcttctcgccgaaccgtgccgggccgctgatcatgcgcctgatggacatcatgctggcgctgccgtcgctgctgctggcggtggccatcgtggcgatcctcggcccgggcctgatcaacaccgtgatcgccatcgccatcgtctcgctgccggcctacgtacgcctgacccgcgccgcgatgatgaccgagctaaaccgcgactacgtcaccgcctcgcgcctggccggcgccggcaccctgcgactgatgttcgtctgcgtgctgccgaactgcatggcgccgctgatcgtccaggccaccctgagcttctcttcggcgatcctcgacgccgccgccctcggcttcctcggcctcggcgtgcaaccgccgacccccgagtggggcaccatgctcgcctccgcccgcgactacatcgagcgcgcctggtgggtggtcagcctgcccggcctgaccatcctgctcagcgtactggcgatcaacctgatgggcgatggcctgcgcgacgccctcgatccgaaactgaagaacgcggcatga

SEQ ID NO: 354964 - DNA, 975 bp, Pseudomonas aeruginosa
atgagcctcctcgatatcaagaacctcagcgtacgcttcggcgacaccaccgccgtgcccgtggtcgacggcctcgacctgagcgtcgacaagggcgaggtgctggccatcgtcggcgagtccggctccggcaagtcggtgaccatgatggccctgatgggcctgatcgacgcgcccggctgggtgtccgccgatcacctgcgcttcgacggccacgacatgctcaccctcaagggccgccagcgccggcgtatcgtcggcaaggacatggcgatggtcttccaggacccgatgaccgcgctcaaccccagctacaccgtcggctaccagatcgaggaggttcttcgcctgcatctcggcctgcgcggcaaggccctgcgccagcgcgccctggaactgctcgaacgggtcgagatcccggccgccgccagccgcctcgacgcctacccgcaccaactctccggcggcatgagccagcgtgtggcgatcgccatggctatcgccgccgagcccaagctgctgatcgccgacgagccgaccaccgccctcgacgtgaccatccaggcgcagatcatggagctgctgctgaacctgcagcgcgaccaggacatggcgctgatcctgatcacccacgatctcgccgtggtcgccgagaccgcccagcgcgtctgcgtgatgtacgccggcgaagcggtggagatcggcggcgtgccggcgctgttcgaccgcccgacccatccctacaccgaggcgctgatcaaggcgatccccgagcactgtgccggcgaagcccgtctggccaccctgcccggcatcgttccggggcgctacgaccgcccgcgcggttgcctgctgtcgccacgctgtccctatgctcaggagcattgccgccaggagcggccggccttggagacgcacgagcgcggcgcgttgcgctgcttctatccgttgaacctgctgaacgaggtggcctga

SEQ ID NO: 354965 - DNA, 972 bp, Pseudomonas aeruginosa
atggaaaccgttctgaccgcccgtgatctgacccgtcactacgaagtctcccgcggcctgttcaagggccacgcccaggtgcgcgcgctgaacggcgtatcgttcgaactggaagccggcaagaccctcgccgtggtcggcgagtccggctgcggcaagtcgaccctggcacgcgccctgaccctgatcgaggaacccacctccggctcgctgaaaatcgccgggcaggaggtcaagggcgccagcaaggaccagcgccggcagttgcgccgcgacgtgcagatggtcttccagaacccctacgcctcgctcaatccgcgacagaagatcggcgaccagttggccgagccgctgctgatcaacaccgcgctgtcgcgcgaggaacgccgcgaaaaggtccagcagatgatgcgccaggtcggcctgcggccggagcattaccagcgctacccgcacatgttctccggcggccagcgccagcgcatcgccctggcccgggcgatgatgctgcaacccaaggtgctggtggcggacgagccgacctcggccctcgacgtatcgatccaggcccaggtactgaacctgttcatggacctgcagcagcagttccgcaccgcctacgtgttcatctcgcacaacctggcggtggtccgccacgtcgccgacgacgtcctggtgatgtacctcggccgaccggcggagatggggccggcggacaagctctacgagaacccgctgcatccctatacccgtgcgctgctctcggcgaccccggcgatccacccggacccgacgaagccgaagatccgcatccagggcgaactgccgaacccgctgaacccgccggagggttgcgccttccacaagcgctgcccctacgccaccgagcgctgccgcagcgaggtgcccgagctgcgcctgctcgaccagcgccaggtggcctgccaccacgccgagcaattcctcggctga

SEQ ID NO: 354966 - DNA, 375 bp, Pseudomonas aeruginosa
atgctgcgcggtggcggactggccttgccgaccagcgacgcgggctccgcgccggtggtccctcacgccgaccgccgggccttgctgcgcggactcctgaccaacctgctgaaccccaaggccctgctgttctgttcggtgctgctgccgcagttcgtcagtcccgaggccggttcgctggccgtccagttcgccgcgctcggtacggtcctggttctggttggcctggccttcgactgcgcctatgcgctggccggtggccgcctgggccgctggctggcgtcccggccgcgggcacagcgcctgcagcagtggggcttcggtgggttgttgatagggttcggggtaaggctggcgctgctgcgccagctctga

SEQ ID NO: 354967 - DNA, 933 bp, Pseudomonas aeruginosa
atgctgatcgccaacggcctgcgcaaggtcgacatgcaggacctgctggtcttcctacaggtccaccaacgacagaacctcgtcgaggtcgccgaacacctgaacctcagtccgtcgacggtcagctactgcctgaagaagctgcgccaggccttcgacgacgagctgttcatcgccacccgcggcggcatgcagccgacccacaagagtcgcgccatgctgccccacgtggaggaaatgctcgcccgcatcaacgcctgtcacgccgcccagggcagcttcgacccacgtggagagccgcgtacctttaccctctgcgcgccggaatacgtcgagctgctgatccttccggcactcctgcgacggctcgccgccaacggcccgaggatcggcctggacatccgccgcctgggtcccgaactgcccaccgaagcattgctcgacggccaggtcgacctggtcttcgacttcggtcccgagtaccaccgaccggcaccggagctacaggcgctcgccctgttcagcgacgagctgctctgcgtacaggatcgtgcccagccgcgccacgagcgcctggaactggacgagttctgccggcgccgcttcgtcttcccgaccccgctcgacgccagcaacgccaacctggtggacacgtggctgcgacgccagggccgcagccgcgaggtcgccgcgcgcgccaacagctacgtcgccgccctgcaactgctgtcgggcagcgacttcgtgctgatgctgccacggcgtatccatgcactgctcgacgatggccgccatcacgcctgcctcgcaccgcccgggctgccgccgttcgccctgcacctgtcatggagccgcgccgccgaccaggacccggcgaacctctggctgcgcgaacaggtgctgatcgtctgcgccgagctgggtttgctctag

SEQ ID NO: 354968 - DNA, 285 bp, Pseudomonas aeruginosa
atgagcgccagccaggtcatccgtattcgcgcgcgcaacggtcagtcggaacggcttggcctgcgcctgcaacaactggtcgaaccggggctggaggcgccgggttgcctggagtaccaggtgcgcagggacgccctcgagccggatctctggctggtgtgcagccagtggcgggaagcgcagcagatgttcgactacctggccggcggcatccagcaggtattcgccgaagtgctctggcgctccctggcggcgagcctcgaagtgcaggatgacgcaggctag

SEQ ID NO: 354969 - DNA, 408 bp, Pseudomonas aeruginosa
atgaaggccaatcgatcgatcgcctgcctgctgctcgccgcgctgccgacgctggccagcgcccatgttgcggagaaggtggaaaccctgcacgaccaggccctggccgagtttcccggccatcgtgggttgatgctgacggtgtcgttcaagcccggccaggtctccgcgccccatgtgcatcccggctcggtgttcgtctacgtgctcgaaggcaccgtgcagacgcaactggaaggcggcccggtggagacctacacggtgggccagagctggtacgagccggcgaacgtgccgcacctgctggcacgcaatcccgatccgatgaagccggccaagttgctggtctgggagttgctcaaggagggcgacccgatcctcaagccactggagcgcggcgcccactga

SEQ ID NO: 354970 - DNA, 438 bp, Pseudomonas aeruginosa
atgaccacccgcctcgaatgggccaaagcctcccccgacgcctatgccgccatgctcggcctggaaaaggccctggccaaggccggcctggagcgcccgttgatcgaactggtctacctgcgcacttcgcagatcaacggttgcgcctactgcgtgaacatgcatgccaacgacgcgcgcaaggccggcgagaccgagcagcgtctgcaagcgctctgcgtctggcaggaaaccccctacttcaccccgcgcgagcgcgctgccctggcctggaccgagcaactcgcccgcctcagccagggggcgttgccgcacggcctgctcgacgaactgcgcgagcacttcgacaacaaggagatcgccgaactgaccctggcggtctcggccatcaacgcctggaaccgcttcggcgtcggcatgggcatgcaaccggaatga

SEQ ID NO: 354971 - DNA, 1200 bp, Pseudomonas aeruginosa
atgagtgccgcgaaaaaggcccccgtcatcctgattgccgacccggacccctggagtcgcgacttgcttggccaactggtcctcggcgtgcgttgcgatgcccggctggtcctctgcggcgatggcggagaagcgctggcgcattgccggcgccggcgcttcgcgttgatcctggccgagctgaacctgccgcaggtggatggcttcgagctgctgcgcgaagcgcgcctgcgccgctcggtcgccgagcagccgttcatcctgatcagcgaccgcgccgaccaggccagcgtgcgcgccgccgtggcactggcgccgaccgcctacctggtgaagccgttccaggccgagaacctgatgcaacgcctgcgagggttgttgctgaagggcgacgaggtggtcgcctgtccgctgccggagcgggacgcgggcgagaacctggaggctttcctcgaacgtgcgcgcgactccgcggagggggcgccgttgctggccgacgtgcgtgccgccagcgatcgttgcctgagcgccgaggagcatccgctgcgcgtgctggaggatgagttcggtcgcgacccgcagatcaccgctggcctgatcgccgccgccaacagcgccgcccggcacgtcggtccggcctgccagaccctgggccaggccctgcggcggctgggactcgggcacagcctgaacctggtgctcggtttcagcctgcagcgggccatccagctcggcgagccgctactggccgagcgcgccatgcacttctgggatctttcgcaacgttgcgcggacatcgcttgggaactggccgacgccctcggcgcggacgtcgagcgctgctataccgcagggctgctgcatcgcctgggcgacctggcgctgctgcggacattgcaggattggtgcgatggcggcggcgcgctggacgaggcgcgcctcgacgagctgctggggcgtttcggcgccagcttcggctcggccctgcgggcgcgttggcggctgccgctggagctgcgccggctgatcgctgcggcgtaccagttcggtggcgtgctttcccgcgaagagctgatcctcagcctggcgacccaggccgccagcctgcccgaggacgacgcggagcaactggccgagagcaaggctgcccgcatgctcgggctggacggcgaacgactggcgaaactgctgcagccctga

SEQ ID NO: 354972 - DNA, 1281 bp, Pseudomonas aeruginosa
atgagcaagaccaacgaatccctgctgaagcgtcgccaggccgcggtaccccgcggcgtgggccagatccacccggtcgtcgccgagcgcgccgagaactccaccgtctgggacgtggaaggccgcgagtacatcgacttcgccggcggcatcgccgtgctgaacaccggccacctgcatccgaaggtgatcgccgcggtccaggagcaactgggcaagctgtcccacacctgcttccaggtgctggcctacgaaccctacatcgagctggccgaggaaatcgccaagcgcgtgccgggcgacttcccgaagaagaccctgctggtcacctccggctccgaagccgtggagaacgctgtcaagatcgcccgcgccgccaccggccgcgctggcgtgatcgccttcaccggcgcgtaccacggccgcaccatgatgaccctgggcctgaccggcaaggtggtcccgtactccgccggcatgggcctgatgccgggcggcatcttccgcgccctggcgccctgcgagctgcacggcgtgagcgaggacgactccatcgccagcatcgagcgcatcttcaagaacgatgcccagccccaggacatcgccgcgatcatcatcgagccggtgcagggcgagggtggcttctacgtcaactccaagtccttcatgcagcgcctgcgcgccctgtgcgaccagcacggcatcctgctgatcgccgacgaagtgcagaccggcgccggccgtaccggcaccttcttcgctaccgagcaactgggcatcgttcctgacctgaccaccttcgccaagtcggtcggcggcggcttcccgatctccggcgtggccggcaaggccgagatcatggacgccatcgcgcccggcggcctgggcggcacctatgccggcagcccgatcgcctgcgccgcggcactggccgtgctgaaggtgttcgaggaagagaagctgctggaacgttcgcaagccgtcggcgagcgcctcaaggccggcctgcgcgagatccaggccaagcacaaggtgatcggcgacgttcgtggcctgggttcgatggtggccatcgagctgttcgagggcggcgatacccacaagccggccgccgagctggtcagcaagatcgtcgtccgtgcgcgcgagaagggcctgatcctgctctcctgcggcacctactacaacgtcatccgcttcctcatgcccgtcaccatccccgacgcgcaactggagaagggcctggccatcctggccgagtgcttcgacgaactcgcttaa

SEQ ID NO: 354973 - DNA, 1452 bp, Pseudomonas aeruginosa
atgcaactcaaagatgccaagctgttccgtcaacaagcctacgtcgatggcgcctgggtggatgccgacaacgggcagaccatcaaggtgaacaacccggccaccggcgagatcatcggcagcgtgccgaagatgggcgccgccgagacccgccgcgccatcgaggctgccgacaaggccctgccggcctggcgcgcgctgaccgccaaggagcgcgccaacaagctgcgccgctggttcgacctgatgatcgagaaccaggacgacctggcccgcctgatgaccatcgagcagggcaagccgctggccgaggccaagggcgagatcgcctacgccgcctccttcctcgaatggttcggcgaagaagccaagcgcatctacggcgacaccattcccggccaccagccggacaagcgcatcatcgtgatcaagcagccgatcggtgtgaccgcggccatcacgccgtggaacttcccctcggcgatgatcacccgcaaggccggcccggccctggccgccggctgcaccatggtgctcaagcctgcttcgcagaccccgtattccgcgctggccctggccgaactggcagagcgcgccggcattccgaagggcgtgttcagcgtggtcaccggtagcgccggcgaagtcggcggcgagctgaccagcaacccgatcgtgcgcaagctgaccttcaccggttccaccgaaatcggccgccaactgatggccgagtgcgcccaggacatcaagaaggtgtccctggagctgggcggcaacgcgccgttcatcgtgttcgacgacgccgacctggacgccgccgtcgagggcgcgctgatttccaagtaccgcaacaacggccagacctgcgtctgcgccaaccgcctgtacgtgcaggacggcgtgtacgacgccttcgtcgacaagctgaaggccgccgtggccaagctgaacatcggcaacggcctggaagccggcgtgaccaccggtccgctgatcgacgccaaggccgtggccaaggtcgaggaacacatcgccgacgcggtctccaagggcgccaaggtggtttccggcggcaagccgcacgccctcggcggcaccttcttcgagccgaccatcctggtcgacgtgccgaagaacgccctggtgtccaaggacgagaccttcggcccgctggcgccggtgttccgcttcaaggacgaggccgaggtcatcgccatgtccaacgacaccgagttcggcctggcgtcctacttctacgcccgcgacctggcccgcgtgttccgcgtcgccgagcaactggagtacggcatggtcggcatcaacaccggcctgatctccaacgaagtggcgccgttcggcggcatcaaggcctcgggcctgggccgcgaaggttccaagtacgggatcgaggactacctcgagatcaagtacctctgcctgggcggtatctga

SEQ ID NO: 354974 - DNA, 285 bp, Pseudomonas aeruginosa; identical to SEQ ID NO: 354746

SEQ ID NO: 354975 - DNA, 999 bp, Pseudomonas aeruginosa; identical to SEQ ID NO: 318236

SEQ ID NO: 354976 - DNA, 324 bp, Pseudomonas aeruginosa; identical to SEQ ID NO: 318235

SEQ ID NO: 354977 - DNA, 1608 bp, Pseudomonas aeruginosa
atgaccgaccaaaccacccgcctgcccatccgccgcgcgctgatcagcgtttccgacaagaccggcgtcgtcgacttcgcccgtgagctggtcgccctcggcgtggaaatcctttccaccggcggcacctacaagctgctccgggacaacggcatctctgccgtggaagtggccgactacaccggcttcccggaaatgatggacggtcgggtgaagaccctgcacccgaaggtgcatggcggtatcctcggtcgccgcgacctggacggcgcggtcatggagcagcacggcatcaagccgatcgacctggtggcggtcaacctgtatcccttcgaggccacggtggccaggcccgactgcgacctgcctaccgccatcgagaacatcgatatcggcgggccgaccatggtccgttcggcggcgaagaaccacaaggatgtcgccatcgtggtcaatgccggcgactacgccgccgtgatcgaatccctcaaggccggcggcctgacctacgcccagcgtttcgacctggccctcaaggcgttcgagcacacctccgcctacgacggcatgatcgccaactacctgggtaccatcgaccagaaccgcgataccctcggcaccgccgaccgcggcgccttcccgcgcaccttcaacagtcagttcgtcaaggcccaggaaatgcgctacggcgagaacccgcaccagagcgcggcgttctacgtcgaggcgaagaaaggcgaggccagcgtctccaccgccatccagttgcagggcaaggaactgtcgttcaacaacgtcgccgacaccgacgccgccctggaatgcgtgaagagcttcctcaagccggcctgcgtgatcgtcaagcatgccaacccctgcggcgtcgccgtggtgccggaagacgaaggcggcatccgcaaggcctacgacctggcctacgccaccgatagcgaatcggcgttcggcggcatcatcgccttcaaccgcgagctggacggcgaaaccgccaaggccatcgtcgagcgccagttcgtcgaggtgatcatcgcgccgaagatttccgccgccgcccgcgaggtggtcgccgccaaggccaacgtacgcctgctcgaatgcggcgaatggccagccgagcgcgccccgggctgggacttcaagcgggtcaacggcggcctgctggtacagagccgcgacatcggcatgatcaaggccgaggacctgaagatcgtcactcgccgcgcgcccaccgagcaggagatccacgacctgatcttcgcctggaaggtggccaagttcgtcaagtccaacgccatcgtctacgccaggaaccgccagaccgtcggcgtcggcgccggccagatgagccgggtcaactccgcacggatcgccgcgatcaaggccgagcacgccggcctggaagtgaaaggcgcggtgatggcttccgacgccttcttcccgttccgcgacggcatcgacaacgcggccaaggccggcatcaccgcggtgatccagccgggcggctcgatgcgcgacaacgaagtgatcgcggcggccgacgaggcggatatcgcgatggtgttcactggcatgcgccatttccgccattga

SEQ ID NO: 354978 - DNA, 1290 bp, Pseudomonas aeruginosa; identical to SEQ ID NO: 318233

SEQ ID NO: 354979 - DNA, 2829 bp, Pseudomonas aeruginosa
gtggtacggcttcggatcgccataggactactcgtcagcttcctgctgcttctgctcggtccgatgtcgccggcggtcgcggacgacgccggcgtttccagcgttcccctgcaaaccaccgccaccacccccagagtcaaccagaactggcgcctgctgcgcgacgagagcgcgcaactgcggatcgccgacgtcctccagcgcaaggagcagttccgcccgctggccaagcgctccttcatcttccccgccagcccccaggcggtctggctgcaggtccagcttcccgcgcagaaggtgccgagctggctgtggatcttcgccccgcgggtgcagtacctggactactacctggtgcaggacggccaactggtgcgggaccagcacaccggcgagtcgcgaccgttccaggagcgcccgctgccctcgcgctcctacctgttctcgctgccggtcgacggcaagccgatgaccctgtacgtgcggatgacctccaaccatccgctgatggcctggttcgaccagatcgacgaagccggcctggtcggcctggagaagcccgcctacgccttcggcatgctgctcggcggcatgctcctgctgctgatgtacaacctgatccgcttcgcctactcgcgcagcgccagcagcctgtggctggcggcggtgcacgcggcgctggcggtctgcgccgcggcgaacctggggctggtggcgttctggctgccgggactcaagttcaaccagtcgctgaccgccgacctcggcgccctcggcgccgcggtgagcctgctgtggttcgcctgcagcttcttccgcggcactgcggaaagccgcctgaaccgcctcctgcaaggcgaggcgctgttgatcctggcggtcggcgcgatcatcgccttcacccagcaactctggttcagctggctgatctacctgctggtgatcctcagttcgctcagcgtcccgctgatcgcggcctggcactggtatcgcggctaccagccggcgcgcctgatcgttgccgggatgatcgtgttcaacgccggcttcatggtgttcctgccggtactgttcggcaccaagcaactcgatccgggctggctggtgctcggcgtgttcagcttcgccaccctcgccgggctggtcctgagcgtctcgctcaccgaacgccagcggctgatccagcagctcaacctgcaacagcgcaccagcgaggcggcgcacaccgcggaattgcagaccaaggccgagttcctggccaagatcagccacgagatccgcacgcccatgaacggcgtgctgggcatgaccgaactgctcctcggcaccccgttgtcggcgaagcagcgcgactacgtgcagaccatccacagcgccggcaacgagctgctcacgctgatcaacgagatactcgacatctccaagctggagtccgggcagatcgagctggacgaagtgcagttcgacctcaacgcgttgatcgaggactgcctggatatcttccgggtcaaggccgagcagcagcgcatcgagctgatcagcttcacccagccgcaggtgccgcgggtcatcggcggcgatccgacgcgcctgcgccaggtggtcctgagcctgctggacaacgcgttcaagcagaccgaggaaggcgagatcctgctggtggtggccctcgacgaccagggcgagacgccacgcctgcgcatcgccgtgcaggacagcggccacccgttcgacgccaaggagcgcgaggcgctgctcaccgccgagctgcacagcggcgacttcctttccgccagcaagctcggcagccacctcggcctgatcatcgcccgccaactggtgcggctgatgggcggggagttcggcatccagtccggcagcagccagggcaccaccctgtcgctgaccctgccgctcgacccgcagcagctggagaaccccaccgccgacctcgacggcccgctgcagggcgcccggctgctggtggtggacgacaacgaaacctgccgcaaggtgctggtgcagcagtgcagcggctggggcctgaacgtcagcgcggtgtcgtccggcaaggaggcgctggcccagttgcgcaccaaggcgcacctgcgcgagtacttcgacgtggtcctgctcgaccaggacatgcccggcatgaccggcatgcaactggcggcgaagatcaaggaagaccccaacctcaaccacgacatcctgctgatcatgctcaccgggatcagcaacgcgccgagcaagatcatcgcccgcaacgccgggatcaagcgcatcctggccaagccggtggccggctacacgctgaaggcgaccctcgccgacgaactcgcccagcgcggcgtcagcggcgtcaccaactacctgcaaccggccaaggaagcgcaggcgccgagcctgccgagcgacttccggatcctcgtcgccgaggacaacagcatctccaccaaggtcatccgcggcatgttgaacaagctcaacctccagccggacaccgccagcaacggccaggaggcgctcagcgcgatgaaggcgacccagtacgacctggtgctgatggactgcgagatgccggttctggacggcttctccgccaccgagcagctccgcgcctgggaagcccacgaacagcgcccgcataccccggtggtggcgctcaccgcgcacatcctcagcgaacacaaggaacgcgcgcggctggtcggcatggacgggcacatggccaagccggtggagctgtcgcaattgcgtgagctgatcgcctactgggtcggcgaacgcgatcgccgccgccagggcgacgccctgccctcctga

SEQ ID NO: 354980 - DNA, 594 bp, Pseudomonas aeruginosa; identical to SEQ ID NO: 354758

SEQ ID NO: 354981 - DNA, 1854 bp, Pseudomonas aeruginosa
ttgctggcggccgccggcctggccttcctctacctggtcgcaccgctctgcctggccgtcgacggcaccgccatcgcctgggccgtggccggcctggcgagcttgttcgccggcttgcgcctgggctcgcgtaccttcctgttctgcgccttcgccgtgcaactgctgggcggtgcgctgttcctcctgcatttgcagggcggcgatggccagggtggggtattcgactcgggctggcgtggcttgatgaccgcctcgctgattggcctggcgctgatcggcggcatgctgctggcggcgcgcgacccgctggtgaaggacgacagtcggctgctcatgggcttgagcctggtgctgctggccggtctggcgttcgtcaacctggcagtgctgttcgtcctgccttggcgcagcgccagcgcggtatgggccggtagcgggctgctgatcatctggctgagcctggtgctgcgccagcgcctgagcttctacttcggcctcgccttgcaggtagtgggcggcctggcgttcctcctcgccgggccgtcgctgttcggctcgctgagcggcgaaggcctgcggcccctggcccattccgggttctggacgccggcagtgctggccctggcggcgctggtcggcgcctggcggctgcgccgcgccggcgagcgcgagcgggcgctgggtatcggtaccctcggcctggccgagctgtcgcacttgctgctgctctggggagccggctggtgggcgctgaccgcgctgtgcgaaaccgtccgcttcgtgccttatggcctgcgcgagcatgcgttgctgctggtggccgcggcgacagtggcgtcgtggatgctgctggcgctgcgcgagcgctggcgcgaactggccctgctgtgcctggcgctggtcccggtggcgctgttggccctggccagtgcctggcgtttcgattaccagccgttcggcgaattcggctggctggcctggccgctgctgttcgccacgcacctgctgtcgctgcgacgccttgccccgttgctgccggcgaaggccctgagcgttgcccatgtgctcggttgctggctgttgctaggggtgctggcgctggagctgcgctacctgttcgccctgctcgccgaacagtacaacgcctggcgttggctgggctgggcgttggtcccgagcgcctacctgctgctggtggctggcgggcggagcctgccctggccgctgcgcgacttcccgcgggagtatcggctgctcgccgctgcgccggtggcgctgttgctgctcggctggttctggagcgccaacctgctcagcgacggcgctgccgagccgctgccttacctgccgctggccaacccgctggaactggggctgctgatcgtgctgttcgccctctaccgctggagcgacgccagcctggcctcgctcgtcgatggcaatgccagcgcgcgcctggggcgccaggcgttggccggcgcctcgctgttcgccctgctgaccctggcggtgtgccgcgccgcgcaccacctggccggcgtaccgttccaggccgaggcgctgaccgcgtcgatgctggtgcaggcggggctgtcgctggtctggacgctctgtgcgctgggcctgaccatcgccggtacccgtctcggccggcgcgacctgtggatggtcggcgcggcgctggtcggcgtcgtggtggtcaagctgttcttcgtcgagctgggcaacagtggcagcctggagcgaatcatctccttcatcggggtcggcgtcctgttgctggtcgtcggctacttctcacccttgcctccgcgtcgcgccgaggtcgcatcggaggccgagcagccatga

SEQ ID NO: 354982 - DNA, 1395 bp, Pseudomonas aeruginosa
atgacgcgctccttttcgttcagaaccgccggcctgctcctgctgggcgcctgcctgtccctgccgctgtcggcgaaggagtctgccgaaggtttcagccgccaggtggcgctgtcgctgcagggcgaaggtccctggtatcgcctgagcatcccgatgagcgtgcagttgtcggctgcccatgccgacctgcgcgacctgcgggtcttcgatgccgaaggcgaggccttgccctacaccctggtggccggcagcgagcgccaggccagcacgccgcatgaggccgaggtgcggctgttcccgttgcgaggcacgtccgccgccgacgcgacgcaaccgaacctgcgggtgcagcgcaacaccagcggcaccatagtcgaggtgctgccggaaaacgccgggccggctgccgagactttgcgcggctggctgatcgacgcgagcgcggtgacgtttcccctggagcgcctgcggctggactggagcagcccggaggagggcttccagcgcttctccgtggaagccagcgacgacctcgagcattggcaggcctggggggacggacagatcgcccgcttgaccttcaacggcgaacgcatcgacgtcagcgaggtcaagcttcccggccgccaggcccgctacctgcgtctggcctggccggccggggcaaccgcggcagacctccaaggcgcccgcctgcaaggcagcacgcggagcaccgagccggcgccgatgatctggtccgagccgctggccgggcgccaggcgggggacggcgagtaccgctggcagttgccgctggcgttgccgttgcagcgggtgcgggtgtccctggagcaggcgctgacccacaccatcgtcccggtggaactgtccggccgtgatcgtacggagaacgcttcgccgcgccgggaggccgcctggagcagcctggcacgcggggttctctaccggctgccgatcgacggccgcaacgtacggcagaacgagctggaactgccgggctgggcggtgcgcgagctgcgtctgcaggtggaccaacgaggtaccggcctgggcccggaggtcccgtccctgagtgtcggcctgccgggcagcgaactggtgttcctggtgcgcggcagcccgccgtaccggctggcgttcggcaagcccggcgcgcagtcggcggcgctgccgctcggcgtactgattcccggctataccgagagcaagcgcgccaccctgggtagcgccagcctgggcgaaccgctggaggtggccatggcggtcgcggcgccggcaccgggtagcgactggaagaagatcggcctgtgggcggtacttctgctgggggtcgctctgctggtaataatggcaatgagcctgctgcgttcctcgccgaacaagccatga

SEQ ID NO: 354983 - DNA, 1941 bp, Pseudomonas aeruginosa
atgatcagaatggcgctcaagccactggtagcggcctgcctgctggcttcgctgtccaccgccccgcaggctgctccttcgccctattcgacgctggtggtgttcggcgacagcctcagcgatgccgggcagttccccgatcctgccggccccgccggaagcacctcgcgtttcaccaaccgggtcggcccgacctaccagaacggcagcggcgagatcttcggaccgaccgcgcccatgctgctcggcaatcagctcggcatcgccccgggcgacctggctgcctcgacctcgccggtcaacgcccagcagggcatcgccgacggcaacaactgggcggtgggcggctaccggaccgaccagatctacgactcgatcaccgcggccaacggctcgctgatcgagcgcgacaataccctcctgcgcagccgcgatggctacctggtggaccgtgcccgccagggcctgggtgccgatccgaacgcgttgtactacatcaccggcggcggcaacgacttcctccaggggcgcatcctcaacgacctccaggcacaacaggccgccggtcgcctggtggatagcgtgcaggccctgcagcaggccggcgcgcgctacatcgtggtctggctgttgcccgacctgggcctgaccccggctaccttcggtggtcccttgcagcctttcgccagccaactcagcggcacgttcaacgccgagctgaccgcccagttgagccaggccggcgccaacgtcattccgttgaacatcccgctgctgctcaaggaaggcatggccaacccggcttccttcggcctggccgccgaccagaacctgatcggcacctgtttcagcggcaacggctgcaccatgaacccgacctatgggatcaacggcagcacgcccgacccgagcaaactgctgttcaacgacagcgtgcacccgaccatcaccggccagcgcctgatcgccgactacacctattcgctgctgtcggcgccctgggagttgaccctgctgccggaaatggcccacggcaccctgcgtgcctaccaggacgaactgcgcagccagtggcaggcggactgggagaactggcagaacgtcggccagtggcgcggcttcgtcggcggcggcggccagcgcctggacttcgactcccaggacagcgccgccagcggcgacggcaatggctacaacctgacccttggcggcagctaccgcatcgacgaggcctggcgcgccggggtcgccgccggtttctaccggcagaagctggaagccggcgccaaggattccgactaccgaatgaacagctacatggccagtgccttcgtgcagtaccaggaaaaccgctggtgggccgacgcggcgttgaccggcggctacctcgactacgacgacctgaagcgcaagttcgccctgggcggcggcgagcgcagcgagaaaggcgacaccaacggccacctgtgggcgttcagcgcgcgcctgggctacgacatcgcccagcaggccgacagtccctggcacctgtcgccgttcgtcagcgccgactatgcacgggtcgaggtcgacggctattccgagaagggcgccagcgccaccgcgctcgactacgacgaccagaagcgcagctcgaagcgcctgggcgccggcctgcaaggcaagtacgcgttcggcagcgatacccagctgttcgccgagtacgcccacgaacgcgagtacgaggacgacacccaggacctgaccatgtccctcaacagcctgccgggcaatcgcttcaccctcgaaggctacaccccgcaggaccacctcaaccgcgtctccctcggcttcagccagaagctggcaccggagctgtcgctgcgcggcggctacaactggcgcaagggcgaggacgatacccagcagagcgtcagcctggcgctgagcctggacttctga

SEQ ID NO: 354984 - DNA, 531 bp, Pseudomonas aeruginosa
atgagtttcaacaccgaagtacagcccggcatctgcatggagccggacgccatcacccaggaatacgtgttcaaccacaccatgttgcgggtcaaggatccgaagcgctcgctcgacttctactcgcgggtgctcggcatgcgcctgctgcgtcgcctggatttcgaggaaggccgcttctccctgtatttcctcgccatgacccgtggcgaagaagtgcctgatgcggtcgacgagcgccagcgatataccttcgggcgccagtcggtcctcgagctgacccacaactggggcagcgagagcgacgacagccagtaccacaacggcaaccaggacccgcgcgggttcggccacatctgcttctcggtgcccgacctggtggcggcctgcgagcgtttcgagacgctcggggtgaacttcgtcaagccgctggaccgaggcatgaagaacgtggccttcatcagcgatcccgacggctactgggtggaaatcgtccaggccagcctgaacggcgagatgggacgcggctga

SEQ ID NO: 354985 - DNA, 1011 bp, Pseudomonas aeruginosa; identical to SEQ ID NO: 322138

SEQ ID NO: 354986 - DNA, 603 bp, Pseudomonas aeruginosa; identical to SEQ ID NO: 339877

SEQ ID NO: 354987 - DNA, 258 bp, Pseudomonas aeruginosa; identical to SEQ ID NO: 322140

SEQ ID NO: 354988 - DNA, 570 bp, Pseudomonas aeruginosa; identical to SEQ ID NO: 354731

SEQ ID NO: 354989 - DNA, 468 bp, Pseudomonas aeruginosa
ttggcctatgactggttgttcgtgaagaccgggatggtcgactggatgaccaacatgactatcatcgcgcaggccgggccacggagcccgctggacgttcgctatctcaccgcccagggtgtctccacgctgcagaactacggcctggccgcgctgtacacggtgctgacattcgtcgtgcgcctggtgatcctggtcatgacgatcccgttattcgtgatggccgcgttcaccggcctggtggacggcctggtgcgccgggacctgcgcaagttcggcgccggccgggagtccagctacctctaccacaaggcgcgcggcagcatcgttccgctagcggtcgtcccttggacgctctacctggcaatccccatcagcatcaatcccctgctgatcctgctgccctgcgccgcgctgctcggcgtagcggtctgcatcactgcatccagttttaagaaatacttatag

SEQ ID NO: 354990 - DNA, 180 bp, Pseudomonas aeruginosa
atgttctcgctcaggtcgtgctcgccggcggagatgaagatcttcgtcccgctgatcgcatggctgccgtcggcgttcggcaccgcgcgggtcttgatgatgcccaggtcggtgccgcagtgcggctcggtcaggcacatggtgccggtccaggtgccggcggtcatccgcgccaggtag

SEQ ID NO: 354991 - DNA, 468 bp, Pseudomonas aeruginosa
atggcgaaatcctccgaacgattcgaatccctgcgccgggatatcgacgcactggcccgccggctcgacgtgccgtcggtgctgatcatgcgttccctgccccggcacatgcgcgtcgaggcctccgccggacgcctggaggacacctacccgatcggcgccgaaggccgcaagagcgtccatgaagacggcgccaaacccctctactgcgaacgcgtggtcgaccgcgacgccccgttgcacgtgcgcgactcgcgccaggagtcggaatgggccggcaacgaggatgaagtcgagttcggcctgagcaactaccttggctatccggttcatgcgcccgacggcaccccgtacggcaccgtctgcgtactcgacagccgaccgcgcgactattcggccgaggaacgggccctgctggaagaattgcggcgcaaggtcgaggcgctgctggcggaaaccgtctcatga

SEQ ID NO: 354992 - DNA, 1239 bp, Pseudomonas aeruginosa
gtgcacgcccgccgcctgccccgcctcttgccgctcgccctcgccttcctgctttcgcccgccgccttcgctgccgacacgccagccgccgagctgctgcgccaggccgaagccgaacgcccggcctacctcgacacgctccggcaactggtcgcggtggacagcggtaccggccaggccgaaggcctcggccagttgtccgcgctgctcgccgaacgcctgcaggcgctcggcgcgcaagtccgcagcgcaccggcgacgccctcggccggcgccaacctggtggccaccctcgatggcaccggcagcaagcgcttcctgctgatgattcactacgacaccgtgttcgccgccggcagcgcggcgaagcgtccgttccgcgaggacgcggagcgcgcctacggacccggcgtggccgacgccaagggcggcgtggcgatggtgctgcatgccctggcgctgctcaggcagcaaggcttcagggactacggacggatcaccgtgctgttcaatcccgacgaagagaccggctccgccggctcgaagcaactgatcgccgagctggcccggcagcaggactacgtcttctcctacgagccgccggaccgggacgcagtgacggtagccaccaatggcatcgacggcctgctgctcgaggtgaagggtcgctcgtcccatgccggctcggcacccgagcaaggccgcaacgccattctcgaactgtcgcaccagttgctgcgtctcaaggacctcggcgatccggcgaaaggcaccacgctgaactggaccctcgccaggggcggcgagaagcgcaacatcattcccgccgaggcttcggcggaagccgacatgcgctactcggacccggccgagagcgagcgggtactggccgacgcccggaagctgaccggcgaacgcctggtcgccgataccgaagtcagtctgcgtctcgacaagggtcgtccgcctctggtgaagaaccccgcctcgcagcgcctggcggaaaccgcacagacgctctacggccgaatcggcaagcgcatcgagccgatcgccatgcgcttcggcacggacgccggctacgcctacgtgcccggcagcgacaaaccggcggtgctggaaaccctcggcgtggtcggcgccggcctgcacagcgaggcggaatacctcgaactatccagcatcgccccccgcctgtacctgacggtggcgctgatccgcgagctgtccgccgactag

SEQ ID NO: 354993 - DNA, 1596 bp, Pseudomonas aeruginosa
atgaacgaaagcgtcgccagggtgttcgatcggattctacgggggctcgggttgaagaccctgaacgcccagttcctgctgtcctatgcactgatgttcggcctggccgcctgcgcctcggtggcgttgtacctgagcatgtcgatctcgccggaaaccatcaacgtggccggcgcgcagcgcatgctcagccagaagatggcccgcgaggcgctgcaattgcgactcggcgccggcgacccaaaggccctggccgcgaccatcgcccagtacgaacgctcggccgccgatctggatgcgggcaatgccgagcgcaacgtgagccggatgggcgcgccggagatcgccgcccagcggcagaaggtggcgcagatctggggccgctaccgggccatgctcgaccaggtggcacagcctgccagccaggtcgatctgcgcggcttctcgcagtattccaccgagctgttgggcgagctgaacaacctggtctcgctgatgagcgcgcgcgccgacagtgtccagcacacccagatgtggatcgccttcggttgcctgttggcgatcctggtgctggtggtgctcggccggcagttcggcctggcgccgctgatgcggcagttgcgtgggttggaagtggcgctgaccgaggtcggcgcggcgaacttcacccatgccctggcggcgggccatgcggacaacgagatcggccgcatcgtcgctggctacgagcggatgcgccaggacgtcagcggtttgctggcgaacgtcaagcgcagcgcggcagagaccgacaaggacgtggccgaggccctggagcaggcgctcggtgccggcgaccaggtggcgcgccagcaccaggacctggaccaggtggccaccgcgatgaacgagatgagcgccaccgtggccgaggtcgcccgccacgccaaccatgcggcgcactccacgcgcgacgccgcggccctggcccacgagggacggcgtctggtggagcacgccagcagccagaccggtgcgttggcggaggaactggaacagaccgccctggcgctgaacaccctgcaccagcatgccggcagtgtcggccaggtgcttacggtgatcagcagcatcgccgagcagaccaacctgctggcgctcaatgccgccatcgaggcggcgcgggccggggaggccgggcgcggcttcgccgtggtggcggacgaagtgcgttcgctggccaaccgtacccagcagtcgacccaggagatccaggggttgatcgagcagttgcaggacggcgccaacgatgcggtcgccgccatgcgcggtagcgccagccatgcccagagcaacctcgtcgaggccgacagcgcggcccaggcgctggggcgcatcgtcgccacggtggaagaactggacggcctcaaccagcagatcgcgaccgccgctgaggaacagagccaggtggcccaggacatcgaccgcaacatcaccaacgtctccggactctccgagcaggcccacgaagggaccgccgcagtgctttcggccaaccagagggtcaaggagcacatggctggcttgcgcgtggtgctcggtcgcttccgtacctga

SEQ ID NO: 354994 - DNA, 378 bp, Pseudomonas aeruginosa
atgaaaaaaagccccctgctgatactgagcgtactcctcgccgcgtgcggccccgacaagctgatttccgacctgccgtcgccgaacgggcaataccacgtcgaggttcggaaatgcccggagaaaggttcgatcacctggggcgaagaaatacaggtctccctcctcgaaaccgggaaatcggaaaagtgccatgcagtcgtgcggtcgctggcgcaattcgacctgcgcgcatccgcggaccaattgcaactggagtggctgtccgatacggaactcagggcctggcaccctagcttcgagcccggaaaccaagcggagggctcgcgcctgaagcacgatgcgccggtgaagatggtctttgcgccgaagcgctga

SEQ ID NO: 354995 - DNA, 1932 bp, Pseudomonas aeruginosa
atgagctacgacacgaccggttccatggtgggggccacagtaggagaccctagcgatgagcgatggaatgcgttgattgacgaaaccgacctcgtaaagggcgcatcacttataggcagatcggcaatggttttagccagcctggccgatcttccagatgttccgcaaagctacacccatgagtacatcgttcaaggccacagacccggtattaccactggtggtggcaggttctactgggatggggcggttgcgcggaatcgccacaacggcgggactatcatcagccccactgttcctgcgtacactgcccagacggggttggctggctatctggatggctcgggggaaactgagccgtccgcctttggctgctttgtccgcaaaatcgaaggccatggcattcgcctcgaatggttcggctggctgccaggggaactcgccaccgcgccagcgcaaaagcttctgcaacaaacccgttcgaacgaaggctctgcggcccacatcggttacacggccatgtttcccctggcgaccgttcgctccggtccattagttatcggttcggaccagatcatcgccggaaccagccggactgtcattctccaggagcccggtacggtgacgatggatgtccagccgttcatcagcatggccggacagagcaatgtgttcatcttcggcaatggaatgcagatcaatggacagaagaacgaggcacgcagcggcgaaggtcgatatggacttttcatctatggctcgaaaaaagtcctggtccaggacctgacaatcaacgcgttctccggtgatggattggccgttaccggcgatgcggggcgaccaagcgaagacgtacgcatcgaccgagtcctttgcaacttcaatggacgcaatggcttttcggtcatcaatgccaggcgcgcgacgctgctgaattgccgagcgactaacacgaataccaatggacttggtgcatcagccaatggaccctgggcggccttcgacatagagcccaatgaaggaagcggttacttcatcgaagatatcaacctgatcggttgttcgagcgagggcaatgctgggaacggagtccagttcaccatcccgaatacggactcccctgtctccgtcagggtgtccggattccagtcccgacgagacggttcggctactcaatacggggcgaagaatggcggagtgggtttcatatatggagggggcctctctccgaaaaacactatgtcgggtctgatccaactggttggcatcgttgtcgacgagccttttggcagcgctatgcgtttccgcaactggagcgccagaaacgcgccggtactcatcagggatgtcacgataagaaatgtgaacttcggcgtggccacgggaaacataaatcgatgcggagtctggcaggactcttctgactccatggaagtgattgaaccaaagggcaatttcgaagtggatgggctgaccgtcttcgacgataaccaacagctcattcgacccgtgtggaccatgggaatagcggcggctcctacaatcgccaaggtgaggaatgtctacgtcaaccgacatggctatcctgctgttttgccgttacgtacgaaagtacaaggaggcgtagggtggagcgagctgccgatggtgtccttgtcctcgtcctcagcaatcgcaggaacggattatgtcggacaaatggtcgagttgacggggagcggaggattcgtactgccggaggccgctcttgcctcgggctgtgtcttcaggatcaggaatggttcgagcggcagcatcaacgtcacggcactggctggaggaatcacgggcagtacctacggtagctacaccaacacaggaagcagcctgaccttgatcaatgggcagtatgccgagctatggagcaatggaagcacctgggtcctgaaatga

SEQ ID NO: 354996 - DNA, 819 bp, Pseudomonas aeruginosa
atgtcgtccaccatccaccccctcccgtccttcggtctcggcaccttccgccttaccggccaggtcgtcgtcgactcggtgcgcagcgccctcgaactgggctatcgcgccatcgataccgcgcagatctacggcaacgaggcggatatcggccgcgcgatcgccgagagcggcgtaccgcgttccgagctgttcctcactaccaaggtctgggtcgacaactacgcccgcgaaaagctgctcgccagcctgcgcgagagtctggagaaactgcgcaccgaccggttggacctgctcctgatccattggccggcacccggcaacggcgtcgagctggcggagtacatggcggcgctggcggaagccaagtccctgggcctgacccggcggatcggcgtctccaacttcaacatcgaactgacccgccaggccatcgccgcggtcggtgcgggcgagatatccaccaaccagatcgaactcagcccttacttgcagaaccgcgcgctaaccgcctacctcgaggagcagggcatcgcggtcacctcgtacatgaccctggcctacggcaaggtgctgaaggacccgacgctggccgggatagccgccaggcaccgggccacggtcgcccaggtggcgctggcctgggcgatgcaactgggctacgcggtgattccgtcctcgacccgccgcgagaacctcgccagcaacctgctggcgcgcgacctgcgcctggacgccgaggacatggcgcgcatcgccggcctcgagcgtaacggccgcgaggtcagtccgcagggcctggcgccggcctgggactga

SEQ ID NO: 354997 - DNA, 2409 bp, Pseudomonas aeruginosa
atgaaacacgtcgtttccagtgcgttattgctcggtctctcctcgctttccctggccgcccaggccgctcccatcgcccttgaccttcccgcccagcccctggccgcatccctcgagcaattgcagggcgccagcggcctgcgcatccgtttcgaccgcgcggccgtggccgaccggcgcgcaccggccctacgcggcaagctggagccaagcgaggcactgcagcgtctgctcgcaggttccggactgagcggggaggttcggggcggcgacgcctgggtcgaggccgcggcgacaggtgccggcatcgcccccggcgacagcgtcgacctcggcgcgctcagcgtggtcgccacccaggacccggccaccgccgccatcaccgaagacagcggctcctacaccacgcgggcgatgcgcacctcgaccaagctggcgatgtcgatccgcgagacccctcagtcggtcagcgtggtcacccgccagcgcatggacgaccagggcatgcgcgacctcaacgacgcagtgaagggcgtcaccggcctcaccgtgcaacagtacgggccggcccgggtgaagtacgcggcgcgcggcttcgacgtcgacaacatcatgtacgacggcctgccgacgagcatttccacctatacccaggacgtcatttccgccgccgacctggccatgttcgaccgcgtcgaagtggtgcgcggcgccaccggactgatgcagggcgcaggcaacccggcggcggcgatcaacatggtgcgcaagcgtccgacccaggacttccgcgcctccctgcaaggcagcgtcggcacctgggaccgctatcgcagcgaggccgacgtttccggcccgctgaacagcgaaggaaccctgcgcggccgcgcggtggtcgcctaccagaaaggcaacagcttccaggaccacgtcagcagcgaacgcggcgtgttctacgggatcgccgaagccgacctgagcccggacaccaccttcgccatcggcgcctcgaaccagaacgacaaccgcaacgacaactgggtaggcctgcccagcccgctgggcggccgccacctggacctcaagcgctcgtcctattacggcgccgactggtcctactgggataccgacaccacccacctgttcagcgacctgacccaccgcttcgccaacggttggcagatgaagctggccgccgacaagctgtgggcgcgaatcaacatgctcgggctgtacaacgactgctactactcgaccaccggctgcgccagcatgacccagaaccccggcgactacagctacaccgacgaccacgacagctatgacgcctatgccaacggtcccttccagttgctcggccgcgagcacgagctggtggtcggcgccagctatcgccaggaacgcttcgacggccacggcggctggggcagcctgttcaacaaggacggcacccccaccgggccgatggacccgacccagtgggacccgagctcgactctcaagccgaggctgaacaccagcctgtggggcatgaagctcgaccaggaacagaaaggcgcctacctcaccacccggttgaacctcgccgacccgctgaaagtgatcctcggcgggcgcctggactggtacaaggccgacgccgataccgacagctacaaggtcacccgcaacgtcacccgctatgccggggtgatctacgacctgaaccagacctactcggtctacgccagctataccgacatcttcaagccgcagagcaacttcgacgccggcggcggcctgctcgacccgatcaccggcaagaactacgagatcggcctgaagggcgaacacttcggcggcgcgctcaattcgcagatcgcgctgttccagatcgaccaggaaaaccgcgccaccgaggacgtcggcggcccctcgccatgccccttcagccccacctcgcgctattgctcgcgcgcttcgggcaaggtccgcagccagggcgtcgacctggagctgagcggtgcgctgagcgacgactggcagatgatggccggctatacctacgtcgacgccaagtacaagcacgacagcaacaaggccaacgagggcaagccattcgacgcggccaagccacgccacctgttcaagctcgccaccagctatacgctacccggcgaactgcacaaatggcgcgtcggcggcgacctggccacccagagcaagaccgaggacagcagcaccggtttccagcagggcggctacaccgtggtcaacgccatgctcggctacaaggtcaacgaacggatcgacacgcggctgaacttcaacaacctgttcgacaagtactattacagcggcatcgacttcggcaacctcaactacggcgagccgcgcaacctgatgttcacggtgaagtactcgctctga

SEQ ID NO: 354998 - DNA, 429 bp, Pseudomonas aeruginosa; identical to SEQ ID NO: 322758

SEQ ID NO: 354999 - DNA, 888 bp, Pseudomonas aeruginosa
atgactttcgacgtgatcatcgtgggtggcagctacgccggcatctccgcgggcatgcaactggcgcgggcgcggcgcagggtgctggtgatggatacgggactgcgacgcaaccgcttcgcccgggcctcccacggctttctcggccaggacggccgcgatccggcggccatcgccgatgacgcccgcgcgcagttgctggcctatcccagcgtcgagtggctgtccgaagccgccgtcgcggcgaagaaggaggcggacggtttcgtggtgaaggccgccaacggagaacgcttcaccgcgcgccggctgatcctcgccagcggggtcgccgacgagctgccggaaatccccggtcttgccgagcgctggggacggcacgtgttccattgcccgtattgccacggctacgaactggacggcgggccgattggcgtactggcggcctcaccgctggccatccaccacgccctgatgttgcccgactggggagcgaccacctttttcctcaacggcgtcttcgaaccggatgccgagcaaatgtccaggctggaccggcgcggcgtgacgatcgagcgcgaagccgtggtcgcgctgggcggcgcgcgcgccgacgtgaccctggccagtggccgcacgattacgctcgcggggttgttcacccagccgcgtacgcgcatggccagcccgctggcggcgttgctcggctgcgagttcgaggacggcccgagcgggccgttcatcaggaccgacggcatgcgcgaaaccagcgttcccggcgtcttcgcctgcggcgacgcggcgctggcggccggcaacgtcgccatcgcggtgggcgacggcgcgcgcaccggtggcgcggcgcatcattcgctgctgttccgctga

SEQ ID NO: 355000 - DNA, 564 bp, Pseudomonas aeruginosa
atgagcgcgaagctgcaaggcaagaacgtcctggtcatcaccgccaacaccggcatcgagcgcgacgagctgctcgaaccgctgaagaccctgaagcaacagggcgccacggtcacccacgcgaccatcgagggcggcgaagcgcagacctgggtgcacgacagcgagaaggacctgatcgtcaattccgacgccaggctgcaaggcctgcgcgccgaggactacgacttgttgctggtccccggcggcacggtgaatgccgacaccctgcgccaggacagcgaggcccggcgcctggtcagggaattcagcgacgcaggcaagacggtcgccgccatctgccacggcccctggctgctgatcgacgcgggtgtcgcccgcggcaagaccctgacctcctattccagcgtgcgtatcgacctgaccaacgccggcgcggactgggtcgacacgcgggtgaaagtctgcccggcgaacggctggaccctgatcacctcgcgcaacccgggtgacttgcaggcgttcaacgaagccatcggcgaagccctgcaggcggccgcctga

SEQ ID NO: 355001 - DNA, 801 bp, Pseudomonas aeruginosa
gtggacaccctgaagatcgccaccttcaacgtcaacggcatccagacccggctggccgcgctgctggcctggctggagcgggaagcgccggacatcgtctgcctgcaggaactgaagacgcccgacgcgcgcttccccgccgcggcgctggagaaggccggatacggcgcgatctggcagggccagtcggcgtggaacggcgtcgccatcctcgcccgcgacagccagccgctggaggtacgccgcggcctgccgggcaacgccagcgatccccacagccgctacctcgaagcggccgtcgacggcctgctggtggccagcctgtacctgcccaatggcaatccccagccgggaccgaagttcgactacaagctggcctggttcgagcacctcatccgacacgccgccgagctgatggagagcggccatccggtggtgctggccggcgacttcaacgtggtgcccagcgacttcgatatctacgacacccgctcctggaaaaaggacgccctgctccagccggagtcccgcgagtgcttcgagcgcctcctgcggcagggctgggtggacgcgctacgccagcgtttccccgaccggcgcctctataccttctgggactacttccgccagcactggcaacgcgacgccgggctgcgcatcgaccacctgctgctcagcgccagcctggcggaccacctggaagacgccggggtggatcgctgggtgcgcgacgaggagcacgccagcgaccacgcgccggcctgggtaagcctgcggcgtccctcagagccccggcgctag

SEQ ID NO: 355002 - DNA, 399 bp, Pseudomonas aeruginosa; identical to SEQ ID NO: 354787

SEQ ID NO: 355003 - DNA, 924 bp, Pseudomonas aeruginosa
atggaccgtttcgatgcgatgcaggcctttgcccgtgtggtggagaccggcagcttcaccaaggcggcggagacgctgcacgtgagccgcaccagcgtcacccagttggtccagcaactggaagcgcggctgcgggtacgcctgctcaaccgcaccacgcgcaagctcaacctgaccgccgacggcgccgcctactacgagcgggtggtacgcctgctggcggaactggacgatgccgagaccagcctctccagcgccgccctggcgccccgcgggcgtctccggatcgacgtaccgagcccgctggcgcggctgctgctgatcccggcgttgcccgagttccatgcgcgctatccggagatccagatcgacctgggcgtgagcgatcggctcgtcgacctgatcgacgagaacgtcgactgcgtcatccgcggcggcgaactgcgcgaccagtcgctgatggcgcggcgggtcggcgacctgcaactgggggtctacgcggcaccggcctacttgcagcgcgccggcgtgccgagccacccgcgcgaactggaggacagccaccagcgtatcgtcggcttcctctgggcgcgcaccggcaaggccctgccctacgccatgcgcaggggcgaggaatgcctgcgggtggcgggccgtcatgtgctggcggtggacgacggcaacgcctacctggcggccgggctggccggcctgggcatcctctggctgccgcactacatggcgcgcgagcccctcgcccgcggcgagctgctgccgctgttcgaggactggagcctggagccgatgccgctgtacctggcgttcccgccgaaccgccacgtcagcggcaagctgcgggtgttcatcgagtgggtcgccgaactgatcgcgcggcatgcgccgccgttgcatccgccgctctga

SEQ ID NO: 355004 - DNA, 330 bp, Pseudomonas aeruginosa
atgagcatccacacccgcccctggcgcctgcccctggccgccctgttgctcggcctgagcggcgcggccctggcgcacaacccgatctgcgaatgcgaggaagtgcaggccggcgagatccgctgcaagggcggcttctccgacggcagcggcgcccccggcgtaaccctcgacgtgatcggctacgacgagcagatcctggttcccggcaagctcggcgccgactcgaccctgaccttcaagcgtcccgacggcgagttctacgtgctgttcgacgccggccccggccacgtggtggaaatcgaccacgccgacatcgccgcgccatga

SEQ ID NO: 355005 - DNA, 561 bp, Pseudomonas aeruginosa
atgagcgtcgaaaccgtccgcccggccggcgccggccacgagaccctctacgtactgctcggcagtgtgctgatcctggccctcgccgccacggtggtcgggctgcgccagcagtcccatgaagcgcaagccctggacgcccaccaggtggacgcccggctcgacctgaatgccgccgaacagggcatctacgccgacctgcaggtcgccgccgaagacatccaggcgcgcctggacgacggcgaagccgcgccctccgtcgacgaactggccgccgagggattcccgcccttcgtcgccgacgtcgccgcaagcagccgcggcgagcaccgctggagccacggcgaaaccgccgggcgtccgagctacctgggcgtcagcggcaagcccgaggtggccggctcgttcctcctgctgctcggccccgccgaagtctggctgaagcccgccgcggccgctgccggcgccgtaccgggcgacgcccgagccctggccgacgccggctggcgccaggtggtcagccgcttcgacgccggcgtgacccgtcagcaccgccattga

SEQ ID NO: 355006 - DNA, 954 bp, Pseudomonas aeruginosa
atgctgttctcccgtcgctcatcccgtccgcgcggcctcgccgccctcctcccgggccgtgccctgctggccgccctgctgctggccctgctcgccccgctggcccaggccgaagacggcaagcgcctgcgcatcggcatcaccctgcatccctactacagctacgtgagcaacatcgtcggcgacaaggccgaggtggtgccgctgatccccgccggtttcaacccgcatgcctacgagccgcgcgccgaggacatcaagcgcatcggcacgctcgacgtggtggtgctcaacggcgtcggccacgacgatttcgccgagcgcatgatcgcctccagcgaaaagcccggcatcccggtgatcgaggccaacgccaaggtgccgctgctggccgccaccggcatggccgcgcgcggcgccggcaaggtggtcaacccgcacaccttcctgtccatcagcgcctcgatcacccaggtcaacaccatcgcccgcgaactgggcaagctcgacccggccaacgccaaggcctacacccgcaacgcccgggcctacgccaagcgcctgcgggccctgcgcgccgacgccctggcgcggctgaacaaggccccggccgccgacttccgcgtcgccaccatccacggcgcctacgactacctgctgcgcgaattcggcctggaagtcaccgccgtggtcgagccggcccacggcatcgagccgagtccgagccagttgaagaagaccatcgaccagctcaaggcgctggacgtgaaggtgatcttctccgagatcgacttcccctccacctacgtcgagaccatccagcgcgagtccggggtgaagctctattcgctgtcgcatatttcctatggcgactacagcgccggcaagtacgaggaagaaatggcgcgcaacctcgacaccgtggtccgcgccatccaggagtccggcgcatga

SEQ ID NO: 355007 - DNA, 756 bp, Pseudomonas aeruginosa
atgaccgtggccgaacggctttgcgccacgccttgcgggccggccatcgacttcgccgggatcgacctgagcctcggcggcagccgcatcctcgatggcgtgcgcctgcgcgtcgaggccggcagcgtgcacgcgctggtcgggccgaacggcggcggcaagagttcgctggtcaagaccctgctcgggcagatgccgcatcgcggcgagctgcgcctggagtggcccggcgcgcccggctgcatcggctacgtgccgcaggcgctggagttcgaccgcggcctgccgctcaccgtcgacgatttcatggccgccatgtgccagcgccgtccggccttcctcggcctgtcgcgcagccggcgcccggcgatcgacgcggccctggaacgggtcggcatgctggccaagcgcggtcggcgcatgggcgccctctccggcggcgagcgccagcgcgtgctgctggcccagggcctggtaccgccgccgcaactgctggtgctggacgaaccgatgtcggccctcgacgagggcggcatccaggtcttcgagcggctgctgctggactggcgccaggccggcgtcaccgtgctctggatcgagcacgacctggaggccgtcggccgcctcgccgaccgggtcagcggtctcaaccgccacctgctgttcgacggtccggcggccagcagcctgaccccggaacgcctgctcacgctgttctccacccagccccggaagaacgcggaggccagccgatga

SEQ ID NO: 355008 - DNA, 906 bp, Pseudomonas aeruginosa
atgaacgacgcctacgaacaactgcgccaggccgtccaggcctgggccgccgccggctacctgccggagaccctggcctacggcttcgtcgtcaacgcgctcctcgccggactgctgatcggcccggtgctcggcggcctcggcaccctggtggtggtcaagcgcttcgccttcttctccgaggcggtcggccacgccgcgctcaccggcgtggccatcggcatccttctcggcgagccctacaccgggccctacggcagcctgttcggctactgcctgctgttcggcgtcctgctcaactacctgcgcaaccgcaccggcctggccccggacaccctgatcggggtgttcctctcggtgtccctggcgctcggcgccagcctgctgctggtgctggcgggcaagatcaacgtgcatatcctcgagaacgtgctgttcggctcggtgctgaccgtgaacggccatgacctcgcggtgctggcggcggtcgccgtgctggtgccgtgcctggccctgccgctgtacaaccgcatcatgctggccagcttcaacccgcaactggcggcggtgcgcggggtcgcggtgaagagcctggactacctgttcgtggccctggtgaccctggtcaccgtcgccgcggtgaaagtgatcggcgcgatcctggtcggagccctgctggtgatcccggcggcggcggcgcgcctggtcagccagtcgctgaaagggttcttctggctggcggtgctgatcgccaccgtcagcacgctggccggtatcctgttgccgatcatgttcgacctgccgattccctccggcgccgcgatcatcctggtcgccggcctggccttcggcctcgccgccatcgctcgcggctgcctgccgcacctgaaaggaacccccggatga

SEQ ID NO: 355009 - DNA, 918 bp, Pseudomonas aeruginosa
atgaacctgaaaccccattgcctcgccctggccctggcttgcgccggactcgccggcccgctcccggccctcgccgcgacgccggccgcggctcagtccgcgcaagtcacggtactggccagcctgccggtcacccacgccctcgccgaacgcctactgcgggacaccgaggtcaagctgcaacgggtcgccccggccaacctgccggccagccgccaggcctcgttcttcgccgggcgcggcgccggcggcctggccaaagccgccgggcaggccgacgcggtgatcgacctgcgctcgatctggagcgacgacccgctctacccgctggcccgccgtagcaatatccgtatcgtcgagatcgacgccgcgcgtccggtggacggcgccctgcccggcatcgccctgcgccccggcagcgacctgcatgcctacccctggctcaacccgaccaacctggggcgcatggccgatgtccttgccagcgacctggaacgcctggcgcccggcgccgcagcgaccatccaggccaacctggcgacgctgaagaagcaattgctggaagcgaccgccagcaacgagactcgcctggcgaaggccgacaacctcagcgtgatcagcctctccgaacgcctcggctacctgctcgccgggctcaacctggacccgctggacgtggagatccaggccgacgacggctggaccgagaccgatatccaggctttcgccgaggagctgaagagcgaggacatcgccctggtcctgcaccatcgccagccacccaagcccctcgccgatgccatcgccgccagcggcgcacgcctggtagtggtggacaccgaggcggcggacccggtggccggcctggaaagtgacatgaaagcgatagtcgaagggctgctggccggtaaaggctga

SEQ ID NO: 355010 - DNA, 765 bp, Pseudomonas aeruginosa
gtgggcggtacgcccgtacggctgttctgcctgccgtattccggcgccagcgccatgacctacagccgctggcggcgcaagctgccggcctggctggcggtgcgtccggtggagttgccggggcgcggggcgcggatggccgagccgttgcagaccgacctggcgagcctggcgcagcaactggcgcgcgagctgcacgacgaggtccgccagggcccctacgcgatgctcgggcacagcctcggcgccttgctcgcctgcgaggtgctgtatgccttgcgcgagctgggttgcccgacgccgctggggttcttcgcctgcggcaccgcggcgccgtcgcgacgcgccgagtatgaccgcggtttcgccgaaccgaagagcgacgccgagctgatcgccgacctgcgcgacctgcaaggtacgccggaagaggtgctgggcaaccgcgagctgatgagcctgaccctgccgatcctgcgcgccgatttcctgctctgcggcagctatcgtcaccagcggcgcccgccgctggcctgtccgatccgaacgcttggcggcagggaggacaaggccagcgaggaacagttgctggcctgggccgaggaaacccgcagcggtttcgaactggaactgttcgacggcgggcacttcttcatccatcagagcgaggccgaggtgctggcggtcgtcgagcgccaggtcgaggcctggcgcgcggggcagggcgccgcggcgttggcggtggagtcggcggcgatctgctga

SEQ ID NO: 355011 - DNA, 219 bp, Pseudomonas aeruginosa; identical to SEQ ID NO: 323450

SEQ ID NO: 355012 - DNA, 1410 bp, Pseudomonas aeruginosa
atgcacgtcgccaccagcgtcatcgaagaccagccgctccgcgccaccccggcggagggcgaaacgctctacgaattctcccagtcgcccttgctggaacggcaaagccgccaggagtccaacgcgcgcagctatccgcggcggattccgctggcgctgaagaaggccagggggctgctggtggaggacgtcgaggggcgtaccttcatcgattgcctggccggcgccggcaccctggcgctggggcacaaccatccggtggtgatcgaggcgatccgccaggttctggccgacgagctgccgctgcacaccctcgacctgaccaccccggtgaaggaccagttcgtccaggacctgttcggcctgctgccgccggcgctggccgccgaggcgaagatccagttctgcggcccgaccggcaccgacgcggtggaagccgcgctgaaactggtacgcaccgccaccgggcgcagcaccatcctgtcgttccagggcggctaccacggcatgagccagggcgcgctggggctgatgggcaatctcggaccgaagaagccgctgggcgcggtgctcagcacgggcgtgcagttcctgccgtatccctacgattaccgttgcccgttcggtctcggcggcgaggcgggggtcaaggcgaacctgcactacctggagaacctgctgaacgatccggaaggcggcgtgcagttgccggcggcggtgatcgtcgaggtggtccagggcgagggcggcgtggttccggccgatctcgactggctgcgcggcttgcggcggatcaccgagcaggccggggtggcgctgatcgtcgacgagatccagagcggcttcgcccgtaccggcaggatgttcgccttcgagcacgccggcatcgtccccgacgtggtggtgctgtccaaggccatcggcggcagcctgccgctggcggtggtggtctaccgcgaatggctggacaaatggcagcccggcgcccacgccggcaccttccgtggcaaccagatggccatggccgccggttcggcggtgatgcgctacctgaaggaacacgacctggcggcccacgcggcggccatgggcgagcgcctggccgagcacctgcgcatcctccagcgcgactatccgcaactgggcgatatccgcggtcgggggctgatgctcggggtcgagatcgtcgacccgcagggcgaggcggatgccctcggtcatccgccgaccgacggcgccctggcctcgcgggtccagcgcgagtgcctgaggcgcggcctgattctcgaactgggcggccgccacggcagcgtggtgcgcttcctgccgccgctgatcatcggcgccgaacagatcgacgaggtggcccggcgtttcgcccgcgccctcggcgcggcgctggccggctaa

SEQ ID NO: 355013 - DNA, 492 bp, Pseudomonas aeruginosa; identical to SEQ ID NO: 354804

SEQ ID NO: 355014 - DNA, 1395 bp, Pseudomonas aeruginosa
atgaacgctacccgcagaagcctcgaacagtggcgcgactatgtcggcggctgcctcgacttccgtcccgaggaaggcatcttccgcatcgcccgggacatgttcaccgaaccggagctgttcgacctggagatggagctgatcttcgaaaagaactggatctacgcctgccacgaaagcgaactggccaggccccacgacttcgtcaccctgcgcgccggacgccagccgctgatcgtcacccgcgacggcaacggccagttgcacgcgctggtcaacgcctgccagcatcgcggcgcgaccctggtgcgggtcggcaagggcaaccagtcgaccttcacctgtccgttccatgcctggtgctacaagaacgacggccggctggtgaaggtcaaggcgccgggcgaatacccggaaggcttcgacaaggccacccgtggcctgaagaaagcgcgcatccagagctacaggggcttcgtcttcgtcagcctggacgtcgccggcgaggacgacctggtggacttcctcggcgacgcccgggtgttcctcgacatgctggtggcgcagtctcccagcggcgagctggaagtgttgcccggcacctccacctacacctacgaaggcaactggaagctgcagaacgagaatggcctggacggctatcacgtcagtaccgtgcactacaactacgtagccaccgtgcagcaccgccagcaggtcgaggccgagcgcggcggcgcggccgccaccctcgactacagcaagctcggcgccggcgacgcggccaccgacgacggctggttctccttcgccaacggccacagcgtgctcttcagcgagatgcccaaccccgccgtacgccccggctacgccagcgtgatgccgcggctggtggcggaatacggccaggcccgcgccgagtggatgatgcatcgcctgcgcaacctcaatctctaccccagcctgttcgccatcgaccagatcagctcgcagctgcgcatcgtccgcccgctggcctggaaccgtaccgagatcgtcagccagtgcatcggcgtcaagggcgagtcggacgccgaccgggagaaccggatccgccagttcgaggacttcttcaacgtctccgggatgggcacgcccgacgacctggtggagttccgcgaagcccagcgtggcttccaggcccgcctggagcgctggagcgacatctcccgcggccacggcaagtggctcgaaggcgcgacgccgaacagccaggcgctgggtatcgcgccgctgctgaccggcaccgagatcacccacgaaggcctctacgtcaaccagcacgcgcattggcggcgcttcctcctcgacggcctggagcgcctggccctgcgcgcgaaggaggtgaccccatga

SEQ ID NO: 355015 - DNA, 1002 bp, Pseudomonas aeruginosa
atgatgaggacccatcccgtcgccgatcgtggcgatctccatgccgaccacctggacctggccgccgcccgttcctggatgtcgaaggtctgcgggccgcaccggctcgaagcggcgagcccgggactggtgcagttcgagcaccacggcaacgtgctgaagtcgatgtgcaccaccctcggctacatcggctacggtaccgacgtcaccatcaccgtcgaggatgccgcggcgttcaacgcctacagcctgagcctgccgctcagcggcgagcaggagctgtgccggggcgggctgcgcctgctctccgacgtccgccgcggggtgatcatcgcgcccaacgagcgccaggagctgagcatcgccggggactgccgcaagctgcaggtggtgatcggccgcacggcgatgcgcaaggtcctggaggagatgttgcagcggccgatcgatacgcccttgcgcttcgatccggagatggatgccctggacggcgcctccgcgtcctggtggcgcaccgtgcggcacatcagcgaggagatggcgcgcagcgaactctacgcccaggcgtttttcagcagcgacctggaacgcgcgctgatcaagggactgatcctggcccagccgaacaactacagcgaggccctgcagcagggccttggcgggcgcccgccgcactacctgctgcgcgcccgcgagtttctccaggccaacgcccgcgagaccctgagcctggaggacgtggaacgcgccgccggggtctcgcggttcaagctgttcgagggcttccgtcgctacttcggggtgtcgccgatgagctacctgaagcactaccggctcgccgcggtgcgcgaggaaatcctcgccagcggcggcgcccgcagcatctcgacgatcgccctgggctggggcttcagccacctcggacgcttctccgtggactaccgcaagcgcttcgaggaaaccccgagcatgacccagcgccgcgctgcgcggcgctcctga

SEQ ID NO: 355016 - DNA, 873 bp, Pseudomonas aeruginosa
atggagcttcgtcacctgcgctacttccaggcgctggcccggaccctcaacttcacccgcgccgccgagcagttgcacatcgcccagccaccgctgagccggcagatccagcaactcgaggaaatgctcggggtggccctgctggagcgcggccggccgctgcgcctgaccgaagccgggcgcttcttccacgaacagagcgcgacgctcctggaccaactggaaagcatctgcgacagcacccggcggatcggccagggccagcgccagtggttcggcatcggcttcgtgccctcggcgctgtatggcgtgctgccggagctgatccgccacctgcgcggcgacccggagctggagctgggcctgctggagatgaccaccctgcagcaggtcgaggcgctgaagagcgggcgcatcgacatcggtttcggacgcatccgcatcgacgacccggcgatccgccagagcgtgctcagcgaagagccgctggtcgccgccctgcccgccgggcactcgttgctcggccagccgctgagcctggagcgcctgtcgcgcgagccgttcgtgctctaccccggccagccgcggccgagctacgccgaccacgtgctggcgctgttcgccacccacggcctgagcctgcgcgtgacgcaatgggccaacgagatgcagaccgccatcggcctggtcgccgccggactcggcgcgaccctggtgccggcctcggtgcagttgcagcaccgcgacgacgtcgcctaccaggccctggccgacgcctccctgacctcgccgatcatcgtcagccggcgccagggcgacggctccccgcacctgcggcgctgcctggcgctgatcggccgcgaggacgcctga

SEQ ID NO: 355017 - DNA, 1122 bp, Pseudomonas aeruginosa
atgagccaagccgtgatccaaagcctcgagtcgatcatcgtcgacctgccgaccatccgcccgcacaagctggccatgcacaccatgaaccggcagaccctggtgatcctccgcctgcgttgcagcgacggcatcgagggcctcggcgaagccaccaccatcggtggcctggcctacggcagcgagagcccggagagcatcaagagcaatctcgacgcgcatttcgctccgttgctgctgggccagccggcggacaacgtgaatgccgcgatgcagcgcctggaccggcacatcaggggcaacaccttcgcccgctcggcggtcgagaccgccttgctcgacgcccatggcaagcgcctcggcctggccgtcagcgaactgctcggcggccgcctgcacgacagcctggaggtggcctggaccctggccagcggcgacaccggccgcgacatcgaggaagccgagcggatgctcgacctgcgccgccaccggcacttcaagctgaagatcggcgccggtgaggtggatgccgacgtggcccacgcgatcgccatcaagcgcgcccttggcgagcgcgccagcgtgcgggtggacgtcaaccaggcctgggacgaaggcgttgcccagcgtgcctgcgcgacgctcggcgacaacggcatcgccctgatcgaacagcccatcgcccgccacaaccgcgtcggcctggcgcgcctgagcagccgcggcggcgcgccgatcatggccgacgaggccatcgagagcgtcgaggatgccttccacctggctcgcgagggcgccgccccggtgttcgccctgaagatcgccaagaacggcggaccgcgcgcggtgctgcgtagcgcggcgatcgccgaggcggccgggatcggcctgtacggcgggaccatgctcgagggcggcatcggcaccctggccgccgcccacgccttcgtcaccctcgaccgcctggcctggcacagcgaactgttcggcccgttgctgctgactgaggacatcctcctcgagtcgccgcgctaccaggatttccacttgcacgtgccgcgtgcgccgggtctcggcctggcgctcgacgaggagcgcctggcgcgcttccgccggcgctga

SEQ ID NO: 355018 - DNA, 291 bp, Pseudomonas aeruginosa
atgctgttccacgtgaagatgaccgtgaagttgcccgtcgacatggacccgcaacaggccgagcggctcaaggtcgaggagaaggaaatggcccagcgcctccagcgcgagggcagctggcggcacctctggcggatcgccgggcactacgccaactacagcctgttcgacctgcccagcgtcgaggcgctgcacgacaccctgacccggctgccgctgtttccctacatggacatcgagatcgacgggctttgccggcatccctcgtcgatccatgccgacgaccgctga

SEQ ID NO: 355019 - DNA, 933 bp, Pseudomonas aeruginosa
atgaccgtgaagatttcccagactgccgacgtccagcgcttcttcgaagaggccagcggccagctcaacgaacgcggcgatccgcgcaccaaggccctggtgcggcgcatcctcgacgacacggcgaagctgatcgaagagatgcaggtcacgcccgacgaattctggaaagcggtggactacctgaaccgcctgggcagccgccaggaagccggcctgctggccgccgggctgggcctggagcattacctggacctgctgctcgacgcccaggacgccgaggccggcctcaccggcggcacgccgcgcaccatcgaagggccgctgtacgtcgccggcgcgccgctaagcgacggcgaggcacggatggacgacggccgcgaccccggcaccgtgatgttcctccagggccgcgtcagcggtcccgacggccagccgctggccggagccatcgtcgacgtctggcacgccaatacccaaggcacctattcctacttcgacagcagtcagtccgaatacaacctgcgccggcgcatccgcaccgacgccgacggccgctaccgtgcgcgcagcatcgtgccctccggctacggttgcccgagcgacggcccgacccaggaactgctcgaccgcctcggccgccacggccagcggccggcgcacatccacttcttcgtctcggcgcccggccatcgccacctgaccactcagatcaacctggcgggcgaccgctacctgtgggacgacttcgcctacgccacccgcgatgggctgatcggcgacctgcgcttcaacgacgatcccgccgcggcccgcgaccgcggcgtggagggcggacgcttcgccgaactggatttcgacttccagctccaggccagcccggcgcccgccgccgagcgccgcagccagcggccgcgggcattgcaggagtaa

SEQ ID NO: 355020 - DNA, 903 bp, Pseudomonas aeruginosa
atgaaggcgttgctccatggcatcgccgaaggtaacgggcggacgctgcgcaacctgctgggcctgctgatcttcatcggcggcggctacctgctcggccgccacgcgctgttgctggccgaactcaacctgccggcgcccatcgtactggcattgaaaggcggcctgctctgcgccttcggtaccgctctcggggcgatgccggtgctggtggtgaagaccatgccggcgcgcctgtcggatgcgctgctgggcttcggtgccggcgtgatgctctcggcgacggccttctcgctgatcatgccggcgctatccgcggccggcgacctcggctactcgaagttcggcgcggggttcctggtcagcttcggcctggcggtcggcgtgatggggctgttcatcctcggccggctgatgccggacgtccatcccggttgcgagggcgcgccactgtccggtggcattcccccgcgcatcctgctgttcgtcacggccatcgtcctgcacaacatccccgaaggcatggcggttggcgtgtcggccggtgccggcctggacgaggcgaacggcctcgccctgggcatcgctctgcaggatgtgccggaaggtctggtggtggcgctggtgctggccggagtcggtatgtcgcgtttcaaggcgatgctggtcggtgccgcgtcgggcctggtcgagccgctgttcgcggtgctctgcgcctggctggtcggcctctccgcgctgctcctgccctgggggctggccgccgcggggggagcgatgctcttcgtggtcacccacgagatcattcccgagtcccaccgccagggacatgccgccgaggctacgctgggcctggtgttcggcttctgcctgatgatggtgctggataccgcgctgggctag

SEQ ID NO: 355021 - DNA, 591 bp, Pseudomonas aeruginosa
ttgccttacgcctacgatgccctggaaccgcacatcgatgcgctgaccatggatatccaccacagcaagcaccaccagacctatgtgaacaacctgaacgccgcgctggaaggcacgccctatgccgagcagccggtggaaagcctgctgcggcaactggctggtctgccggagaagctgcgcaccccggttgtcaacaatggcggtgggcatgccaaccactcgctgttctggaccgtgatgtcgccccagggcggtggccgtcccgatggcgacctggggcgggccatcgatgagcagctcgggggcttcgaggcgttcaaggatgcgttcaccaaggctgcgctgacccgcttcggcagcggctgggcctggctcagcgtgactccccagggcagcttgctggtggagagcagcggtaaccaggacagcccgctgatgaacggcaatacgccgatcctcggcctggacgtatgggagcacgcctattacctgaagtaccagaaccgccgcccggaatacatcggcgctttctacaacgtgatcgactggcgggaggtcgcgcgtcgctatgcgcaagccctggcctag

SEQ ID NO: 355022 - DNA, 396 bp, Pseudomonas aeruginosa; identical to SEQ ID NO: 320862

SEQ ID NO: 355023 - DNA, 1350 bp, Pseudomonas aeruginosa; identical to SEQ ID NO: 354727

SEQ ID NO: 355024 - DNA, 525 bp, Pseudomonas aeruginosa; identical to SEQ ID NO: 342790

SEQ ID NO: 355025 - DNA, 1443 bp, Pseudomonas aeruginosa; identical to SEQ ID NO: 354729

SEQ ID NO: 355026 - DNA, 864 bp, Pseudomonas aeruginosa
atgcagcaggatgcttttatagacaaactagatggctattccttcgagcttcgctacgaggagaaggatgccatcagccacatgatcgacatgagttccctttcggcttcgattgatggattcagtcgaatctactcagctgtcgggcatttcgttgccactgggcagtacgcaaagcagatgccagcgctatccgtgaagacgtatgtcatggagcctcaagccaaatgcttcagccttccagggatgctgcagttcgccgtcaattctggaatttttcagggccttgcagcggcagcatttaccctcatacttgggtacgtcctcaacagaaatagcgccaacaaggaagagatgaagcatctgcgtgagcttttcgaaaagcaactcggttacagccaggccgcaaccgagaagatgctttcgaccatagataagcttgcgactgggttgcagccttctgtgaggaaatccatgactcccattggagagtcatgcgatcgaatcgatctatacctggacggcaggaagcaccagacggtggatcaggctatgaaggatatggccaatgcagacgagcctagtgagctatctccagagcagacctacgaggtggtgatcacagagctagatcggctcaagagctctgcgaaggtgcatttctccgcgccagatattgacgaagatctggaagatgatggatcacccagaaggatccctgctgacatcatggatccagccgttgcactggagggaaacgcctacctttcagcttttgtcgccggcactaagatatccatcagggcaaaggctctccttaggggcggactcgtggtcaagctctacatttctgattcgctctag

SEQ ID NO: 355027 - DNA, 483 bp, Pseudomonas aeruginosa; identical to SEQ ID NO: 354762

SEQ ID NO: 355028 - DNA, 747 bp, Pseudomonas aeruginosa
atgcccagacattcgtaccgatccggcaggacatcggcgcttctgctcgtcctgctggcgagcatcgcccaggcgcgggcaagcgtggtggtgaccgggacccgggtgatctatcccggcgaggcacgggagaagaccgtgcaactgagcaatcgcgatgcgtttcccaacgtcgtccaggcctgggtcgacatcgacgccccggacgcgccgccggaccaggcggacgcgccgttcctggtcaacccggcggtattccgcatggccccggacagcggccagacgctgcgcatcgtctacaccgggcagggcctgccgggcgatcgcgaatcgctgttccatctcaacgtcctgcagatcccgccacgcaacagcagccatgcggatcggaaccagatgctgctgatgctgcgcaatcgcctgaagctgttctaccgcccggcgggcatccagggccgtcccgaggacctgcccgggcaactgcgtttcgcactggtccggcgcagcgccggctgggcggtgcgggtggacaacccgagcggctactacgcctcgttcgccagcgccacgctcagcgtcggccagcgccgctggcgcttgcgcagcggcatgctggagccgcgcagccatgccgaatggcaggccgaaacccgcgaagccctgccgccgggacgcgtgcgcctgcacgcgctgctgatcaacgactacggcgcccatatggatatccgtcatgacctatcgccatga

SEQ ID NO: 355029 - DNA, 2619 bp, Pseudomonas aeruginosa; identical to SEQ ID NO: 354759

SEQ ID NO: 355030 - DNA, 858 bp, Pseudomonas aeruginosa
gtgaacggttccccacaggctcgccagcacgagcacccgccggccgttgccgcctccctggccggcgacctgcgcctcgcccggcgtttccaggccgccctggcgcgcggtcgggtgcgcctggactggcaggccgtacggcatgccgggcatccggaatgggagccgctctaccgggaaaccctgctcagggtcacggccgccagcggcgagccgccgttgccgacccaggaactgatcctggcgctggagcggctcggcctgatacgcctgctcgatcgctgcgtgctgggcacggtcctcgaccggctgaacgccgagcctaccttgcgcctggcctgcaacctgtcgcgccagagcgcggcgatggatgcctggtgggaagccgtctgccgatggctggccgcccgtccgcaggtggcacggcggctgacgctggagctgaccgagaccgccgtgggcgagagagtcgcgacccgggagttcatccgacgcctgcgcgaacatggcgtgcgcatcgcgatagacgacttcggcgcggcgcacaacaacctggacttcgttctcgatgcccgtcccgatgtgatcaagatcgattgccggtatacccgcgaagcacgtcgctcggcgaagggcgccgaagtgctgcgccatctgctggccctgtgccgcgaactggcgccctgcgtggtcctggaaggtctcgaggaggacgatgcgttcgcccggctgccgaccggggacgtctatctccagggcaacgcgatcgcgccgccgatgcgggtcgaaccgccgctgtccgtacgccggccgaagagccgggcgcggatcgaggcgctggcgagccgccaggggtga

SEQ ID NO: 355031 - DNA, 519 bp, Pseudomonas aeruginosa; identical to SEQ ID NO: 354750

SEQ ID NO: 355032 - DNA, 948 bp, Pseudomonas aeruginosa
gtgagccagactacgcccgccgtgcgcaccttccaagacctgattctcgccctgcagaactactgggccgagcagggctgcgtggtgctgcagccctacgacatggaagtgggcgccggcaccttccacaccgccaccttcctccgcgccattggcccggagacctggaacgccgcctacgtccagccgagccgccgccccaccgacggccgctacggcgagaaccccaaccgcctgcagcactactaccagtttcaggtggtcctgaagccgaacccggagaacttccaggagctgtacctcggctcgctgaaagccatcggcatcgacccgctggtccacgacatccgcttcgtcgaggacaactgggagtcgccgaccctcggcgcctggggcctgggttgggaaatctggctgaacggcatggaagtcacccagttcacctacttccagcaggtcggcggcatcgagtgctatccggtcaccggcgagatcacctacggcctggagcgcctggccatgtacctgcagggcgtggactcggtctacgacctggtctggaccgacggcccgttcggcaaggtcacctatggcgacgtgttccaccagaacgaggtggagcaatccaccttcaacttcgagcacgccaacgtgccgaagctgttcgaactgttcgacttctacgaaagcgaagccaaccgcctgatcgcgctggagctgccgttgccgacctacgagatggtcctcaaggcttcgcataccttcaacctgctggatgcgcggcgcgccatctcggtcaccgagcgccagcgctacatccttcgcgtgcgtaccctggcccgcgccgtggcgcagagctacctgcaggcccgcgcgcgcctcggcttccccatggccacccccgaattgcgtgacgaagtactggccaagctgaaggaggccgaatga

SEQ ID NO: 355033 - DNA, 2058 bp, Pseudomonas aeruginosa
atgatgagcgccaaggatttcctggtcgaactgggcaccgaagagctgccgccaaaagccctcaacagcctcggcgaagccttcctcagcggtatcgagaagggcctcaaggctgccggtctgagttacgccgctgcgcgtttctatgcggcgccgcgccgtctcgccgtgctggtcgagcaactcgccgtgcagcagcccgaccgtaccgtcaacctagacggtccgccgctacaggccgccttcgacgccagcggtaacccgacccaggccgccctgggcttcgccaagaagtgcggcgtggatctgcagcagatcgacaagagcggtccgaagctgcgcttcagccagaccatcgccggccaaccggccgccggcctgctgccgggcatcgtcgaggcctcgttgaacgaactgccgattcccaagcggatgcgctgggcagctcgccgcgaggagttcgtgcgtccgacccaatggctggtgatgctgttcggcgacgacgtggtcgagtgcgagatcctcgcccagaaagccgggcgcgaatcccgtggccaccgcttccacaatccggacaatgtgcgtatttccagcccggcagcgtatctggaagacctgcgcggcgctcatgtgctggccgatttcgccgagcgccgcgagctgatcgccaagcgcgtggccgaactggccgccgagcaacagggcagcgccatcgtgccgccgagcctgctcgacgaagtgactgcactggtcgagtggccggtgccgctggtctgctccttcgaggagcgcttcctcgaggtcccgcaggaagccctgatcaccaccatgcaggacaaccagaaatacttctgcctgctggacgccaacggcaagctgctgcctcgcttcatcaccgtcgccaacgtcgagagcaaggcgccggagaacatcgtcagcggtaacgagaaggtggttcgcccgcgcctcaccgacgccgagttcttcttcaagcaggacaagaagcagccgctcgaaagcttcaatgagcgcctgcgcaacgtagtgttccaggcccagctcggcaccgtgttcgagaaggcccagcgcgtctccggcctggccgcctacatcgccgaacgtataggcggcaatgcgcagaacgccgcgcgcgccggcatcctgtccaagtgtgacctggcgaccgagatggtcggcgagttccccgaaatgcagggcatcgccggctactactacgccacccacggcggcgaagcggaagacgtcgccctggccctcaacgagcagtacatgccgcgcggcgccggcgccgagctaccctcgaccctgaccggcgccgccgtggcggtggccgacaagctcgataccctggtcggtatcttcggcatcggcatgcttcccaccggcagcaaggacccctacgcgctgcgccgcgctgcgctgggcgtgctgcgcatcctcatcgagaagcagctcgacctggacctggtagccgcggtcaacgccgccgtcgagcaatacggcgacaaggtcaaggccgccggcctggccgagcaggtgctggacttcgtgttcgaccgcctgcgcgcgcgctacgaggacgaaggcgtggacgtggccgtgtaccagtcggtgcgcgcgctcaagccaagctcgccgctggacttcgaccagcgcgtacaggccgtccaggccttccgccagttgcctgaagccgaggccctggccgcggcgaacaaacgggtgtcgaatattctcgccaagtccgaggacgaggttccgccgaacgtggatgccagcctgctggtggaagccgccgagaaggccctgggcagcgccgtggcgaacgccgaaagcgaagtcgcgccgctggcagcggcacgcgactatcgcgccgcgctggcccgcctggcggccttgcgcgagccggtggatacgttcttcgccgatgtgatggtcaatgtcgacgacgcggcggtgcgcgccaaccgctatgcgctgctggccaagctgcgcgggtcgttcctcggggtggcggacatctcgctgctcggctga

SEQ ID NO: 355034 - DNA, 1707 bp, Pseudomonas aeruginosa
gtgaaacgcctgaaaaagacactgcacctttcaagcttgtccctcgtttccctggctctttcttccgccgccctggcggccgctccggtcatgctcgaccagggcaaggaatggaccgaaagccaccgccaggacttctacagccgcgaccagggctcgcaggtgatgcccctgccctggctcaaggcgttgcgacagccggatggaacgcctttcctcgccgacagcctggcccgctacggctatttgcccaatcccaaggcgcccgcggaaggcctgccggtgggcttcaccgtagccggcacgggcgcccggcagatggtcggcatgacctgttcggcttgccatacccggcagatcgaggtgaagggcactgcctatcggatcgacggcggtccggcgatcgtcgacttccaggcattcctcgccgacctcgatcgggccgtgggatcgctgaccagcgatgacgccgccttcgacgccttcgccaagcagatcctcggggccaatccgcctcccggtgcgcgcgacgccctgctcgcggcggtgaaggaatggtacgagccctatcacacgctgatcgagcgcgcgctgcccaaggacacctggggaccggcgcggctggacgcggtatcgatgatcttcaaccgccttaccgggctggatatcggcaccgcgccgccctacctgattcccgacaacatcaaggcggcggatgcgccggtgcgctacccgttcctgtggaacgcggcgcggcagaacaagacccagtggcccgggttcgccgccaacggcaacgacctgctcggcctggcgcgcaatgtcggcgaggtctacggggtgttcgccaccttccacccgcagaagagcaagttccacctgctgggcatggactacctgaagatcaactcggccaacttccacggtctgggcaagctggaagacctgatcaagaagatcggcccgccgaagtggccctgggcggtggacaagcacctggccaggaaaggcgcgctgatcttcgcccgcaagaccgacgaaggtggctgcgtggagtgccacggcatccggatcaaggacctggtgctttgggacactccgctgagggacgtcggcagcgacagccgccagcacgccatcctcgatggccaggtgcagaccggcgtgatggagggcgcgcggatgccgttcggccagccgctgaaggcgaccgacggagccttcgatgtactcgccgtagcggtggccggttcgatcctgcagcacttcgtgccgatcctcggtgagaagcacgatgccaaggcggcggtggtcaagccggaaagcgtgatgaccgacgaaacccggcaactgctgaccgccttccagaagccggtgcgtacccaggccgacccctacccctacgagtcgcgggtcctgcaggggatctgggcagcggcgccgtacctgcacaacggctcggtgccgaccctggaagagttgctgaagccggccgcggagcgggtggaatccttcccggtgggctcggcctacgacgtggacaaggtcggcctcgccgcccagcagacccaattcggcagctatgtgctgaagaccaccggctgcgagcagcgtgattccggcaacagccgctgcggccatgagtacggcaccagcctgtcggccgaggagaggcgcgcgctgctggagtatctgaaggtcctgtag

SEQ ID NO: 355035 - DNA, 537 bp, Pseudomonas aeruginosa
atgtcccgttccctgctgattctcgaccgcgatggagtcatcaacctcgactccgacgattacatcaagaccctcgacgagtggatccccatccccagctcgatcgaggccatcgcccgcctgagccaggccggctggaccgtcgcggtggctaccaaccagtccggcatcgcccgtggctattacgacctggcagtgctcgaggccatgcatgcgcgcttgcgcgaactggtcgcggagcagggcggcgaggtcggcctcatcgtctattgtccgcatggaccggacgacggttgcgactgccgcaagccgaagccgggtatgctgcggcagatcggcgagcactacggggtcgatctgtcgggtatctggttcgtcggcgacagcatcggtgacctggaggcggcgcgggccgtcgattgtcagccggtgttggtaaagaccggaaaaggtgtacgtacgctgggcaagcccttgccagagggcaccctgatattcgacgatctggcggcagtcgccagcgcattacttcagtaa

SEQ ID NO: 355036 - DNA, 774 bp, Pseudomonas aeruginosa
atgtcgacagtgcaggccatcagaaccgtcctcttttacctgctgctgtccgccagcgcgttcgtctggggcaccctcagcttcttcatcgcgccgatcctgccgttccgcgcccgctaccgcttcgtggtacagaactggtgccgcttcgcgatctggctgacccgcgtggtcgccggcatccgctacgaggtgcgcggactggagaacatcccggaaaagccctgcatgatcctctccaagcaccagagcacctgggaaaccttcttcctctccggcttcttcgagccactcagccaggtactcaagcgcgagctgctctacgtgccgttcttcggctgggccctggccctgctcaagcccatcgccatcgaccgcagccagcccaagctggccctcaagcaactggccaagcagggcgacgagtgcctgaagaaaggcgcctgggtgctgatcttcccggaaggcacgcgtattccggtggggcagatgggcaagttctcccgcggcggcaccgccctggcggtcaacgccgggctaccggtactgccgatcgcccacaacgccgggcagtattggcccaaggccggctgggccaagtacccgggcaccatccaggtggtgatcggcccggccatgcacgccgaaggcgaaggcccgcgcgccatcgccgagctaaaccagcgcgccgaagcctgggtcagcgagaccatggccgagatcagccccatccagcagcgggtcagccatccggagccgtcggtggtctcgtga

SEQ ID NO: 355037 - DNA, 1170 bp, Pseudomonas aeruginosa
atgaccgaacctgccgtcctgcccgccatcgcggcgctgcgggaagagatggttaccttgcgccgccacatccatgcccacccggagctgggtttcgaggaacggcgaaccgccgcgctggtcgccgaatgcctggaggcctggggctaccaggtcagccgtggagtgggtcgcaccggcgtggtcggcaccctgtgccgcggcgagggcccagcgctgggcctgcgcgccgacatggacgcgctaccgatccaggaagccaccggcctgccctacgccagccaggtggacggcgtgatgcacgcctgcggccacgacggccacaccgcgatgctcctcgccgcggccaggcacctggtcgagtcgccgcactggcgcggcaccctgcaactgatcttccagcctgccgaagagggcctcggcggtgcccgcgcgatgctcgacgacgggctgctggagcgcttcccctgcgacgccatcttcgccatgcacaacgtcccgggataccccgtcggccacctcggcttccatcccggccccttcatggcctcggccgataccgtggtcatccgcgtgatcggcagtggcggccacggcgcggtgccgcagcgcaccgtcgacccggtggtggtctgctccgccatcgtgctggccttgcagagcatcgtctcgcgcaacgtcgatccgcaggacaccgcgatcgtcagcgtcggcgcaatccatgccgggacggtctccaacgtgatcccggccagcgccgaaatgatcctcagcgtccgggccctgaccgcggaaacccgtgccctgctggagcgccgcatcggcgaactggcccgcggccaggccgccagcttcggcgcgcgggcggaggtcgactaccggcattgccatccggtgctggtcaaccatcccgggcagaccgcgttcgcccgcgaggtggcccgcgactggctgggcgaggaatgcctgatcgacggactgcggccgttcaccgccagcgaggatttcgccttcatcctcgaacgctgtcccggcagttacctggtgatcggcaatggccagggcgagagcggctgccagttgcacaaccccggctacgacttcaacgacgactgcctggccgtcggcgccagctactgggtgcgactggccgagcgcttcctggcctga

SEQ ID NO: 355038 - DNA, 714 bp, Pseudomonas aeruginosa
atgaacgcggtactcgacgaatactggcaggcctacctgtggaccgacggcctgcaactgaccggactggcgatgaccctgtggctgctgatcctcgccgtggcgcttggcttcctgctggccatcccgctggcggtggcgcggacctgcggcaacccgctgctgcgctacccggtctggctctacacctacgtgttccgcggcaccccgctgtacatccagttgctgttcttctacaccggcgtctacagcctgaatgccatacgcgcccaggactttctcaacgcgttcttccgcgacggcttcaactgcacggtgctggccttcgtcctcaacacctgcgcctacatgacggaaatcttcgccggcgcgatcaggaacacgccccacggcgaagtggaagcggcgcgcgcctacggcatgggcggcttcaccctctaccggcgcatcgtcctgccctcggcgctgcgccgggcactgccgtacttcagcaacgaagtgatcctgatgctgcattccacctcggtggcgttcaccgccacagtgccggacctgctcaaggtggcccgcgacgtcaattccgccacctatgcgccgttcctgtccttcggcatcgccggcgcgctctacgccggcaccgccttcctgctgatctggctgttccgccgcggcgagctgcgctggctggcctacctcagaccgcaaacccactga

SEQ ID NO: 355039 - DNA, 768 bp, Pseudomonas aeruginosa
atgtacagcctgcaggtcgaagacatccacaagcgctacggcagccatgaggtgctcaggggcgtttcgctcagggccggcaagggagacgtgatcagcatcatcggctcctccggctcgggcaagagcaccttcctgcgctgcgtcaacttcctggaaaagccctgtgccgggcgcatccgcgtcggcgacgaggaactgcgcacccgtcccggcgccctgggcgagctgcgcgccgccgatccccggcagttgcagaggatccgcagccggctggcgatggtcttccagcatttcaacctgtggagccacctgacggtgctggagaacgtggtcgagtgcccggtcaacgtcctgagaatgaaccgcgacgacgccgtggcccgcgcgcgccactacctggccaaggtcggcctggcggagaaggtcgaacggcagtatccctgcgaactctccggcggccagcaacagcgcgtggcgatcgcccgcgccctggccatggagccgcaggtgatgctgttcgacgaaccgacctcggcgctcgatccggaactggtcggcgaagtgctgaaagtcatgcagcagttggccgaggaaggtcgcaccatggtcctggtcacccacgagatggccttcgcccgccaggtttccagccatgtgatcttcctccaccagggcgtgatcgaagagcaagggacgccggaccaggtgttcggcgcgccgcgcagcgagcgcctgcgccagttcctcgccggcaacctgaaatga

SEQ ID NO: 355040 - DNA, 1332 bp, Pseudomonas aeruginosa; identical to SEQ ID NO: 321091

SEQ ID NO: 355041 - DNA, 357 bp, Pseudomonas aeruginosa
ttgtaccgtcgctatgcctcggcgctgccgggcggcgattcctggttggcgcgccgtccctggcgagtcgacggcaactggctggtgctgcaccggcgcagcctggccgagcgtagcgagctgctgctcagctcggtgtctgccgacggcagcttgctctggaccctggagctgcccatcgagcgtcccgagcggctgttccgcctggatgcccacaacctgcttctcagcggccgtggagaggaaggcgggcggttggtgcgggtcgatctgcgccggggcagcggcatcgtccatcgcctcgggcgcggcggcgcgccattgccgcgggtcgagtggcccgaaggccaaccgtga

SEQ ID NO: 355042 - DNA, 1503 bp, Pseudomonas aeruginosa
gtgcgcccagcgcgcggtcatgaagtcgatggtctccaccgcgcgcagggcgacgacccaggcgtagcgacggccgtcgccgaccacgccgaccgatttcaccggctggaacaccacgaacgcctggctggtcttgtggtaccaatcgaaggcgcgcagttcctcgatgaagatgtggtcggcctggcgcagcaggtcggcgtactccttcttcacctcgccgaggatgcgcacgcccaggcccgggccggggaacgggtggcggtagaccatgtcgtagggcaggcccagctccaggccgatcttgcgcacttcgtccttgaacagttcgcgcagcggctcgaccagttcgaactgcatgtcctccggcaggccgccgacgttgtggtgcgacttgatcacgtgggccttgccggtcttggcgccggccgactcgatcacgtcggggtagatggtgccctgggcgaggaacttcacgtcctgcaacttggtggcttcttcgtcgaagacttcgatgaaggtgcggccgatgatcttgcgcttctcttccgggtcggcgacgccggccaggcgaccgaggaacttgtcctcggcgttggcgcggatcaccttcacgcccatgttctcggcgaacatggccatcacctggtcaccttcgtgcaggcgcagcaggccgttgtcgacgaacacgcaggtcagttggtcgccgatggccttgtgcagcagcgcggcgaccaccgaggagtccacgccgccggagaggccgagcaggaccttggaggaaccgacctgggcgcgcacggtggcgatggcgtcgtcgacgatgttcgagggggtccacagcgcggcgcaaccgcagatgtcgaggacgaagcgcgagagaatgcgcaggccctgcttggtgtgggtgacttccgggtggaattgcacgccgtagtaggcgcgggcatcgtcggccatggcggcgatcgggcagctcggggtgctggccaggatgtggaagccggccggcatctcggtgaccttgtcgccgtggctcatccacacgtcgaggccgagcacgccgtcgtcgtccacgtggtcctcgatgccgtccagcaggcgcgccttgccgaccacgtcgacgcgggcgtagccgaactcgcgcaggtcggagccctgcaccttgccgcccatctgctcggccatggtctgcatgccgtagcagatgccgaacagcggcaccttcaggtcgaacaccgcctgcggcgcgcgcgggctgtcggcttcgtgtaccgactcggggccaccggcgaggatgatgccgcgcggcgcgaaggcgatgatcgcctcgttgctcatgtcgaagggatggatttcgcaatacacgccgatctcgcgcacgcggcgggcgatcagttgggtgtactgggagccgaaatcgaggatcaggatacggtgggcgtgaatgtcttgggacatggccatctctcgctacggaattcgaaaacgacacggggctga

SEQ ID NO: 355043 - DNA, 627 bp, Pseudomonas aeruginosa
atgttcggcttcggcaagaaatccgcgcccgcgccatccggcgacagcgagcaagccgccgcccccggcgaggccggccggcagacgccagccagcggcggcagggcgtccgccaacggcgacgtgaagctgccgtcgcgcccttcgccgctggccggcatgagcgagcgcctgctcaagcagaccgaggcgccgccgccggacaccagcgccctgaacagtcaagtcgtgcaggcggtgcagatgagcaacagcgaaaccgccggctatgcgccgtcgcagatcgccatcgcgccgaacatgatgatcagccaggcctccgggctggtggcgcaatccgccgccagctacttcgacggagtcagcaagatcgccctggccagccaggcgatcctgctccggcagatgacccagaacatcgccgaaaacaagctggcccaggctgccgaggacgcgctcggcgcccttgccaccgacctgctgatgggcgctgccgccgcggtagccgcggcggccggggcgatcgaggcggaatcggccagcttcgccatcgacaagatcgaccagagcatcgccaagtacagcgagaccctcgccagtcgcggcggcaaggacacccaatcgtag

SEQ ID NO: 355044 - DNA, 132 bp, Pseudomonas aeruginosa; identical to SEQ ID NO: 321099

SEQ ID NO: 355045 - DNA, 1110 bp, Pseudomonas aeruginosa
atgtccaacctgctcctctccccgctcgccgtaggcaacctggccttgcgcaaccgcatcgtcatggcgccgatgacccgctcccgggcgcaacagccgggcgacgtgccgaccgccctgaacgctctctactatgcgcagcgcgccggcgccgggctgatcgtcagcgagggcacgcagatttcccgcctcggccagggctacgcctacacccccggtatctacagcgaggcgcaactggccggctggcgccaggtcaccgaggcggtgcacgccgccggcggactgatcgccgcgcagctctggcatgtcgggcgcatgtcgcatcgctcgctgcaggccggcggcgaggcgccgatcgcgccctcgccgatccaggccaaggcccaggtgttcatcgccgatggccagggcggcggatccatggcgccggccgacgcgccgcgggaaatgaccctggaagacatccgccgggtccgcgacgaattcgtccgcgccgcacgcaacgcgctcgacgccggcttcgacctggtcgagctgcatggcgccaatggctacctgatcgaccagttcctcgccagcgccagcaaccggcgcagcgatgcctacggcggtagcctggagaaccgcgcgcggttcctgctggagatcgtcgacgcgctggtcgccgcggtcggtgccgagcgcgtcggcctgcgcctgtcgccctggggcacgatcaacgacatgcacgacgacgagccggaagcgatgaccctttacctcgccgaagccctgcagcgacgcggcatcgcctacctgcacctggccgagtgggaatggagcggcggcccggcctacccgcaaggcttccgcgagcgcctgcgcgaacgcttccgcgcgccgctgatcgtctgcggcaactacgacgccgagcgcgccgaagcgatactccaggccggactggccgacgcggtggcgatcggccggccgttcatcgccaaccccgacctggtcgagcggatccgtctcggcgcgccgctggccgaggccaaccaggcgcggttctacggtggcgacgccgccggctacaccgattacccgaccctcggccagtccgctacggcctga

SEQ ID NO: 355046 - DNA, 591 bp, Pseudomonas aeruginosa
atggcaacgcgaggcaggccacgggcattcgacagggacaccgccctgcagcgagccatggacgtgttctgggtgcgtggctacgaaggcgcttcgctggcggccctgaccgaggcgatggaaatcaggccgcccagcctgtacgccgccttcggtagcaaggaagggctgttccgcgaagccctggcccactatctcggccagcacggccgctatcgccgggatgtcctcgatggcgcgccgagcgcccgcgagggcgtggccgagctgctccgcgagaccgtcgcgcgcttctgttccgacgagttcccgcgcggttgcctggtggtgctcgcggcgctgaccggaaccccggaaagcgaggcggtgcgggacgcgttgagcgccgagcgcggcgagtcgatccgcctgttccgtgagcgcatgcggcgcggcatcgctgacggcgacctggcggcggacaccgacgtggaggagttggcgaccttctatgccaccgtgctgttcggcctcagcgtgcaggccaaggaccgggtgccttgcgagcgcctgctggcggtggtcgaacgggcgctgcgcgcctggccctga

SEQ ID NO: 355047 - DNA, 927 bp, Pseudomonas aeruginosa
atgaatactgacaatcatggtgaggaaaactcaccattcaggcgccgtcgcctgccctcgctgaacgccctgcgctgcttcgaggccgccgcccgcctggagaacttttcccgtgccgccgaggccctgtgcctgacccacggcgccatcagccgcgccgtgcggaccctggaggaggaactcggttgtgcgctcttcgaacgccgcggccagcgggttttcctcagcgaggccggcaggcgcctgctcgccggcaccggcccggccctcgacctgatcgagcgcaccggcgaggccctgcgcgcggaggccggccccaccgcgctggtgctgtcctgcgaaccgaccttgctgatgcgctggctgatcccgcggatcgccggattcatgcaggaacagccacgactgtcgatccagctggtcgccggcggcgggccgttcgccttcggccgcggcatcgacctggcgatccgccgcaacgacttcccctggccgcccggcagccatgcccactggctgttcgacgagcagatcgggccggtctgccgggcgagcgacgtcgaacggcatttccacctcgatgcaggcccgcccgggcttcgcgccgtcgcaccgcgcctgcacacggcgacccgcccgcaagcctggaacacctggacccgtctcgccggacaggcgccggcgacgaccgaagggcagcgcttcgagcacttctacctgagcctgcaggcggccggcgccggactcggcgtagccatcggcccctggcaactggtgcgcgacgatctgtccgccggcctgctggcggcgccgctgggattcctcgccgacggcagcagctatcacctgctgaccccgcgaccgttgcaggccggagagcctgccaccctgctgctggaatggctgcgccgcagcgcggcggcctga

SEQ ID NO: 355048 - DNA, 1077 bp, Pseudomonas aeruginosa
atgcgcgaagaagaccgcgccttgctcgaggaactcctgctggcacgtggccccggtggccaggaagacgaggtcagggccatctgccagcgggaactcgagggctgttgcgacgaggtcggcagcgatgccgccggcaacctggtcgcgcgcatcagcccgccgcacctgccgcgcgagcaggcgcggcgggccgcggtgcggctgctcgcgcacctcgacgagatcgccatgatcgtcaagcgcgtcgaggccgacggtaccctgcgcgtagtggcgctcggcggcgcccagccggtgagcttcggcgtctgtccggtacagatcctggccggcgaggcggtactcgacggcgtgctgtcctacggcagcatgcatgctaccggcgagtcgccgcagggctccgacgtgctctcgggcgcggtgcactggcgcgacgtacacgtggtcacccggcgcagcgccgaggaactggcgaatctgggcgtgcgaccgggtacccgcgtggtgctcaaccgtctgtggcggcgcccgttgtacttccaggattgcgtcgccgcgcacttcctcgacgaccgcgcaccgctgctcgccgtgctcggcgtggctcgcgagatcgcccggcgccgcgacgagttgcacggcgacctctacctggtgctcaccaccatggaggaggagagtaacgccggcgcgctgttcgccgcgcgccgactgccgggcgacatcagcatcgcggtggaagtcggcccaacggtagccgaatacggcacccggctgtgccgcgacccgatcgtcaacagcggcgactccaagggttattacagccgccatgtcaccgaccgcctgttgcgcgccgccgaacgctgccagtaccagccgcaggcggcgctgctggtggacttcgcctcggacgccagcgccctgctgagccacggcgaggccgcgcaggtcggctgcatcggcattccgaccgagaacacccacggtttcgagatcgtcctggaagagggcatcgaggcttgccggcggacgctggtcgagttcctcgtgcaaccgccggacgacgaagcctga

SEQ ID NO: 355049 - DNA, 351 bp, Pseudomonas aeruginosa; identical to SEQ ID NO: 354774

SEQ ID NO: 355050 - DNA, 222 bp, Pseudomonas aeruginosa; identical to SEQ ID NO: 354775

SEQ ID NO: 355051 - DNA, 264 bp, Pseudomonas aeruginosa; identical to SEQ ID NO: 318906

SEQ ID NO: 355052 - DNA, 348 bp, Pseudomonas aeruginosa
atgtccggacccgataccctcagccaggccttcggcaccttactgctggccctggccttcagcgtcttcatcgttttcgttcgcggctaccgcccgggcggggtcagcggcgcctggtacgacctggtgctcgccttcgtcgcggtatggctggcgttctggcccgaagccggcgtactcgcacgctcgccgagcctggccaatgccctggggttggtcttgcaggtcggcgctaccctgctcggctgcctgctcggttacggggtggcaaggggattgcggcgggcgatgcgggaaacccggcaaaaaagatcggcttcttcgccaacgagccggcgaggttcctag

SEQ ID NO: 355053 - DNA, 591 bp, Pseudomonas aeruginosa
atgcgcaacctggaaaccgcaaccctgaagctggggatattccatccccacgacagcctgagccaggcgctgatcgccgccgccctgcagcggcagatcgaagtcagcgccttgcaagccgacctcaacagcctgcaggcgcgccccgggctccgctgcaagccagccagcctggcgtcgtcgatcgaggtcagccaggcggctgccggtctcgacctgctgttcgcgccgttgtccgactacgccgccgaagccttgccgccgatctgcgccgcgctgatcgatggcgccctgcgcgccgaggtaccgcgcctgttcctgcttggccattggcaatggctggtggcgccgcgcgatgccggcgaggagcaactgggtgccgggctcgagcgcagcctcacggtcagcggcctggactggacgctggtggaggtcccgagcctgcccgccggcctgcgcatcgacgatttcagccgcgccggcgacgtcgcggaagtggaggccgccagggtgttcgcctgcgccgaagcgctgctcgacgaagtccgtctcggcctgcacaagcgccagtgcctgcgcctggcgccctga

SEQ ID NO: 355054 - DNA, 1953 bp, Pseudomonas aeruginosa
atgaaaaccacaagaaaaccgaaagtccccttgaaccaggccacgcgcaaccgcctgctcgacgaagcggtcgacgactacgcgatccacaccctggacagcgctggccgtatcgccagctggagcgccggcgcggcgcgcctgttcggccacgacgcgagcgagatcctcggccgcgactacgcctgctttcatacccgcaaggaccgcgacgccggcgttccgcaacaggcgctgcgccaggcggatgccgagggccgcttcgagaccgagggctggcgggtgcgcagcaacggcaagcgcttctgggcgcaggtggtgatcgacgccatccgcgacagccagggccagttgctcggcttcgcccagctgatccacgacctcagcgaagggcgcgcggccaaggaggcgctgcggcgcagccaggagcagttccgcctgctggtgcagagcgttaccgactacgccatctacatgctcgaccaccgcgggcggatcaccaactggaacctcggcgcccagcggatcaagggctacctgccggaagaggtgatcggccggcacttctcctgcttctacacccccgaagaccgcgaggccggcgaaccggcccgcggcctggccgccgccgaacgcgaagggcgtttcgagaaggaaggctggcgggtgcgcaaggacggcagtcgcttctgggccaacgtggtgatcgatccgatccgcgacagcgatggccggctgatcggcttcgccaaggtaacccgtgacatcacccaccggatcgaagccgaacgcgaactggaacgggcccgccaggagctgttccaggcccagaagatggagtccctggggcacctcaccggcggcgtggcccacgacttcaacaacctgctgacggtgatcatcggcagcctcgggctgctgaagaaacgcctgcccggcgaccagcgcaccgccgacctcttgcagaacgccttggaggccgcccagcgcggcgccaacctgacccagcggatgctttccttcgcccgcaagcaacgtctcgatccgcagccctgcgcgatccccgacctgttgcgcgggatgaccgacctgctgatccattccctgggaccgagcgtatcgattgagacgcgctttcccctggatctcgacctcggcctgaccgacgccaaccagctcgaactgtccatcatcaaccttgccaccaacgcccgcgacgccatgcccaacggcgggcgcatcgtcttttccgcgagcaaccagcgggtgccggcggacaatccccatcgcctcgcaccgggcaactatatctgcctgagcatcagcgacaccggcagcggcatggacgaggaaaccctgcgccgtgcggtggaacccttctacaccaccaagggaattgggcgtggcaccgggctgggcctgtcgatcgtcgacggcctcgccgagcagctcggcggccggctcaccctggagagccagccgggcgtcggcaccaccgcgaacatctggatacccgccgtcccgcgaaccccggaaagcgcccgtacgggcaatggcgcgacgccgcagccgcccagcgaaagcgagcgggtgcgcttgtcctgtcgagtactggtggtggacgacgacccgctggtgttgaacaacaccgcggcgatgctggaggacctcggttgctcggtactcaaggccgactccggcagcctggccctggagattctcacggcgacgccggagctggacatcctcctgaccgaccaggcgatgccacggatgaacggcagccagttggtggagcgggtcatggcccagggccggccgctgaagatggccctggccaccggcttcgcggaaaagatcgaaggcgcggcggcacagttgcccaagctggccaagccgttcggccaggaagagttgtacctgttcctgaccggcacgctgaaggccggctga

SEQ ID NO: 355055 - DNA, 609 bp, Pseudomonas aeruginosa
atgacccgcgaaatggctcggctactgatcagtccctccaatgcctggcctcgtctgcgccaggactacgaccatcaccctttcgccttcctcgttccgctgttgctattgccgctgctgccggcggcctgcctgttcatcggcacgacccaggtcggctggtcgctgccgggcaacgacagcgtgcaacacctctccagcggcagcgccctgctgctggcgacgatgtgttacctgggcttcgtcgccggcgtggtgatcatgggcttattcgtacgctgggtgctgttccgcacgccgtcgcgtcccagcgtaccgggcagcctgaccttcaccacggcgatcgccgtgcccttgatgctcgccgggatcgtcgccctggtgccctggcggatcctcctgctgctggccgcggcggctgcctgcgcctactcggtacgcctgctgttcaccggcctgccgctgttcatgcgcatgcaggagcggcagacattgttctacgccttctgcatcctcggcgtcggcttcctgaccctgctgaccaccgccttcatcttcatcgagttctgggggcaaagcctggccggcagcggcgagtacctgcgctga

SEQ ID NO: 355056 - DNA, 669 bp, Pseudomonas aeruginosa
atgcacaagaaagttgccgtcatcctctccggttgtggcgtctacgatggcgcggaaatccacgaaagcgtgatcaccctgctccgcctcagccagcgcggcgccgaggcacaatgcttcgcgccgaacatcgcccagcaccatgtggtcaaccacctgaccggcgaggaaatgccggaaagccgcaatgtcctggtcgagtccgcgcgtatcgcccgcggcgaagtcaaggacctgcgcgaagcccgcgccgaggactacgacgcgctgatcgtgcccggtggcttcggcgctgcgaagaacctcagcgactttgccatcaacggcgcgcaatgccaggtgcagccggacgtgctggcgctggccaaggctttcgccgaagccggcaagccagtcgggctgatctgcatcgctccggcgatggcggcgaagatctacggcgccggcgtccaatgcaccatcggcaacgacgccgacaccgccgacgcgctaaagcagatgggtgccgagcacatcgacgcgccggtggacgagatcgtcgaagacagcgcgcgcaagctggtgaccaccccggcctacatgctcgcccagtcgatcgccgaagccgcttccgggatcaacaagctggtcgaccgggtgctcgaactggtggaccaggacaaggcctga

SEQ ID NO: 355057 - DNA, 474 bp, Pseudomonas aeruginosa
atgagcgaaacgccctcccccgccctgcctgacgacgtccaccaactggtggcggatttcttccagcgcatccccttcaaccgcatgctcggcatccgcgtggtgagcctcggccgcgagcgggtagtcctcgacctgccgatgaaggacgaactgatcggcaacttcgtccagggcattctccacggcggggtgatctccagcctgctcgacgtcaccggcggtgcgatggccctgatcggcgccctcgaacggcatcgcgaactgccaggccacgagcgcatggcgcggctgtcgaagctcggcaccatcgacttgcgcgtcgactacctgcgcccgggacgcggccggacgttcaccgcccatgcggtgccgcttcgctcgggcaacaaggtcgcagtggtgcgctcggaactgcatagcgacgacggcacgctggtcgccgtcggtaccggtacctatctgtgcggctga

SEQ ID NO: 355058 - DNA, 483 bp, Pseudomonas aeruginosa
atgcgtatctggatcgatgccgacgcctgccccaaggcggccaaggaactggtctgcaagttcgccctcaagcgcaagctggaagtctggatggtcgccggccagccgcaggtcaagccgccgttcgcctgcgtgcgtctggtggtggtggaaagcgggatggatgcggctgacgattacctggtggagcaggccgagccgggcgacctggcgatctgcagcgacgtaccgctggccgatcggctgatcaagaaacaggttgccgccctcgatcctcgcggccgcgagttcgacgcgcggaacatgggcgataagctggccatgcgcaacctgatggccgacctgcgtgaccaggggcagatgggcggcggccaggcgccctacgctgagcgtgaccgccaggcgttcgccaacgctctggaccgcctgctcacccgcctgcagcgggaagccgatctacgcgcgagtcagccgcacagatag

SEQ ID NO: 355059 - DNA, 1959 bp, Pseudomonas aeruginosa
atgggcgggaaggcgaagggacaatttaatctcttccattctcacttcgtcttcgccatgcaccctccgaaaatcctgctgtggctgctgccgctggtctgcgcgttcagccttggagctattgccgacacggccgtcgacccctcccaagccttgcatctgttgagttacctggcggccgactatccgccgaccgtggctgacggcaagatcgtcgaccccagcgaataccaggaacaggtggagttcgttggcaacctgcaggcattggtcctgaccctgccgatgcgccccgagcgcgccgagctggagaggggcgtcgccagcctgcgccaggccatcgagcagcgcttgccgggaagggacgtggccctccaggcgcgcaacctcgaggcacgggtggcggatatctaccaggtggtgcagacccccgcgatcacccccgacccgagccgcgcggcgccgatctatgcccagcagtgcgcgatctgccatggcgatgcgggcaagggcgacggccccgccggcatcggcctggaaccgccgccagcgaacctcaccgatcgccagcgcctcgaccacctgagcctctacgacctgcgtaacgtcatcggcctgggcgtggctggcactgacatgccggcgttcgccgaccagctcgacgaacgccagcgctgggacctggccagctatgtggccggcctgagcgccggcagtgcgcagccggacaaggcccatgcctacccgctggcgaccctggccacgcagactccggccgaagtcgccgagcacgacggcgaggccgctgcggagagcttccgcgccttgcgtgcgcatccgccgctggagcagcgcggtcctgggcagttgatcgactataccgccgccaccctggacaagagtttcgcggtctatcgcgaaggtgaccgcgaccaggcctacgacctgtcggtggcggcctacctggagggcttcgagctggtggaaagctcgctggacaacgtcgacgccgatttgcgccgctccaccgagaagcaactgatggcctaccgccaggcgttgcgcgatggcctcccggaaacccaggtggcgcaacagctggagctggccaagggcaagctggcagaggccgccaagcagcttggcggcgactcgctgagtttctccatcagtttcgtttccgccttgttgatcctgttgcgcgaaggggtagaggcaatcctggtgcttgccgccatcctcgccttcctgcgcaataccgggcaggaaagcgccgtgcgtggcgtgcacgtcggctgggggctggccttcgtcgccggcttcgccacctgggcgttggccgcctatgtgatcgatatcggcggtgcccagcgcgagctgatggagggcttcacctcgctgttcgcctgcgtgatggtgctctggctcggcgtctggatgcacgaccgccgccacgcggcagcctggcaggactacatccgcagcagcctggtgggcggtggtggacgcttcggcttcgcagtgctggcgttcttctcggtctaccgcgagttgttcgaggtcatcctgttctacgaaaccctctggttgcaggccggaccggccgggcacaatgccgtgatcggcggtgcggcgaccgccgtggtcctgctgatcggcctggcctgggtgatcctgcgtggttcggcgaaactgccgctggggttgttcttcagcatcaacgcggcgttgctctgtgcgctctcggtggtgttcgccggacatggcgtcatcgccttgcaggaagccggggtgatcggcacccgcccggtgccgttcttcgacttcgactggctggggatcaaggccgacgcctattcgctgtcggcccaggccatggcgctggtggccatcgcgctgctctacggacgtagccggatcgtcgagcgccagcgtgcggcggccaacgcggccgactga

SEQ ID NO: 355060 - DNA, 630 bp, Pseudomonas aeruginosa
atgctcgtcagtacctggttcgccttcttcctcgcctgctgggccatcagcctgtcgccgggcgccggagccatcgcctcgatgtcctgcgggttgcagtacggctttgcgcgaggctactggaacgcgctgggcctgcagatcggcctggccctgcagatcgccatcgtcgccgccggcgtcggtgcgttgctggcgacctcggcactggctttcagcctgatcaagtggttcggcgtggcctacctggtgtacctggcggtgcgccagtggcaggcgccgccacaggccttgagcaccgatggcgaacggcctctggggcgaccgttgaccctggtgctgcgtggtttcctggtcaacgccagcaatcccaaggcggtgatcttcatgctcgcggtgctgccgcagttcatcgacccgcaccagccgctgctggcgcaatacctgatcatgggcggcaccatgatcgtcgtcgacctgatcgtcatggccggctacaccgggctggctgcgcgcgtgctacgcgtactgcgttcgccgcgccagcagaagctggtgaaccgtaccttcgccagcctgttcgtcggcgccgcggggctgctggcgacggtacgccgagcgccgctctga

SEQ ID NO: 355061 - DNA, 759 bp, Pseudomonas aeruginosa
atggaatggctcgccagtcctgaaatctgggtcgcgttcctgaccctgaccgccctggaaatcgtcctcggcatcgacaacatcatcttcatctcgatcctggtcgggcgcctgccgccggcccagcaaccgaaggcgcgcttcttcggcctggccctggccatgggcacgcggatcctgctgttgctctcgatcacctgggtcatgcgcctgaccaccgacctgttccacctgttcggccagggcatctccgggcgtgacctgatcctcttcttcggcggcctgttcctgctgttcaagagcaccatggagatctaccacagcctggaaggcgcggaagaagagcagaagagcggcggcaaggtccacggcttcatgggcatcatcgtccagatcgcgatcatcgacatcatcttctccctggactcggtgatcaccgccgtcggtctggtgcagaacgtgccggtgatggtcgcggcgatcgtcatctcggtcggcgtgatgatgctggcggcaggcaccatcagcgacttcatcgagaaacacccatcgctgaagatgctcgccctgtcgttcctcatcgtggtcggaaccgtgctggtggccgagtccttcgaagtgcacgtgccgaaaggctacgtctacttcgccatggccttctccctggcggtggaggcgctgaacatccgcttgcgcggagccctggcgcgcaagcgcggcgaagagccggtgaagctgcgcaagggttcgccggactga

SEQ ID NO: 355062 - DNA, 465 bp, Pseudomonas aeruginosa
gtgacccgtatcggcgagcgttatccggtgccgccggagctgctcctgccgctgcgtggcggcctgcgctggctgatcatggtcagcgcactgatcatggtgctggagcgcctgggcgtgtccgccgaagtgctgtggaccgcgctgaccggtttcgccgcggtggcggcggtagccttcttcgccatctggagcgtgctctccaacctgttctgtgcgttgctgatcttcaccgtcggaccgttccgcatcggcgaccgcgtggagctgatcgatagcgccgacaaaccgggcgtcaccggacgcgtggttgccatcaatctcttgtatacgacactggaagaaaccctcgaggatggctcgccgggcccgctgctgcaggttcccaacagcctgttcttccagaaagccgtgcgtcgctggcgtgggccaggtttttcaactccaacaaaaaacgggaaataa

SEQ ID NO: 355063 - DNA, 210 bp, Pseudomonas aeruginosa; identical to SEQ ID NO: 318808

SEQ ID NO: 355064 - DNA, 1662 bp, Pseudomonas aeruginosa; identical to SEQ ID NO: 318807

SEQ ID NO: 355065 - DNA, 4212 bp, Pseudomonas aeruginosa
gtgtacagcctcggcaggctggatatcgcccgcgacgatgccggcaaccgtgccgccagcctgcgcaacctttccggggtgatcgagagcggcaaggacttcagcctgcgtgccagcctgatcgagaaccgtcgcgccgtgctggaaagcaagtcgggcctgtacaccgcgaagatggagcagaccgcctgcatcgaaggcgtcaacgcgggcgactgcagcggcaagcgcaacgccatctggaccatcacccagcgcgacaagaccgaggtcaccgccagcagcgccatggggcaactgctggccggaggcgacttcgccatcgacggcggcaccctgaacaacctttccagtctgatcggcagcggcggcaacctcaccgccaacctcgaagtcctcgacaaccagggcctggaaaccggcgagctggaaaccatccgcgtgctgcgtaccgctcgcggcggcgatatcggcggcatcgaccagaagtcgcgcaacttcaccaacctctactggtaccagagcgccaatttcgacccggcgcgcgcgggcgagatccccgccgcgctcaacgcgatcctcagcgactggtccttcgagtacgaattcccgagcaaggggccgaccccgatcagcagtggcgaccagtcctacgcagcggtgatccaggccgccggcgacgtcacggtcaatgccagcacgcgcatcgacaacggcgtcacccgccccggctacaccttcgtcggcagcggccgccaggtgggcgacagcgcggtgggcggcagcggggtttcggtggtcgtgccgctgacctcgcaactgccgcccgacctggcgcagcgccaggtcaacccggttaccctgcccggcttcagcctgccccagggtgacaacggcctgttccgtctcagctcgcgcttcgccgaggatggcaacggcagcgccgcgctcggtgccggcgccgaccgcacccagggcggcagcggcgtctcggtcggccagcagggcgccggcaacgccgccggtacctggcagggccagggcgtgcgagtcgacggcctggctggcgcggccaacgtccagggtcagggcggcagcacgctcggcggtagcctgccgggcgtcgcccgggtccagggcgtgcccggcaacgccacgccgagcgccagccacaagtacctgatcgagaccaacccggcgctcaccgaactgaagcagttcctcaactcggactacctgctcagcggcctgggcatgaacccggacgatagcaagaagcgcctcggcgacggtctctacgagcagcggctgatccgcgacgcggtggtggcgcgcaccggccagcgctacatcgacgggctgagcagcgacgaggcgctgttccgctacctgatggacaacgccatcgcttacaaggacaagctccagctgcaactgggcgtgggtctgagcgcggagcagatggcggcgctgacccacgacatcgtctggctggaagaggtcgaggtgaacggcgagaaggtcctcgcgccggtggtctacctggcccaggcggagggtcggctggcacccagcggtgcgctgatccagggccgcgacgtgaagctggtgagcggcggcgacctgcataacgtcggcaccctgcgcgcgcggaacgacctctcggcgacggccgacaacctcgacaacagcggcctgatcgaggccggcaagcgcctcgacctgctcaccggcgactcgatccgcaaccgccagggcggggtcatcgccgggcgcgacgtgagcctcaccgcgctgaccggcgacgtgatcaacgaacgcagcgtgacccgctacgacagcgcgctcgacggccgcacctgggagcgcagcttcgccgacagcgccgcgcgggtggaggcggcgaacagcctgaacgtccaggccggacgcgacatcgccaacctcggcggggtgctgcagagccgcggcgacctcagcctcgacgccggacgcgacgtcaccgtcgccgccgtcgaggaccgccagggccagacccgctggagcacgtcgcggctacagagcgtgacccagctcggcgccgaagtcagtgccgggcgggacctgaacgtcagcgccgggcgcgacctcagcgcagtggccagcgccctcgaagcgcgccgcgacatcgccctctccgccgggcgcgacgtgaccctggcggcggcggcgaacgaggagcatgcctacagcaagaccaggaaggtcacctaccaggaagacaaggtcgcccagcaaggcacccgcgtggatgccgggggcgacctggcgatcaatgccggacaggacctgcgcctgatcgcgagccaggccagcgccggcgacgaggcctacctggtggccggcgacaagctggaactgctggccgccaacgacagcaactactacctgtacgacaagaagaagaaaggcgacttcggccgcaaggaaacccggcgcgacgaagtcaccgacgtcaaggcggtgggcagccagatcagcagcggcggcgacctcaccctgctcagcggcggcgaccagacctaccagggcgcgaagctggaatcgggtaacgacctggccatcgtcagcggcggcgcggtgaccttcgacgcggtgaaggacctgcaccaggagagccatgagaagagcaagggcgacctggcgtggaacagcgccaaggggaaagggcagaccgatgaaacgcttcggcagacccagatcgtcgctcagggaaatctggcgatcaaagcagcggacgggctgaagatcgatgtgaagcatatcgaccagaagaccgtttccgagaccatcgatgtcatggtcaaggccgatccgagcctcgcctggttgcgggaggccgaaaaacagggtgacgtcgattggcgcaaagtccgggaagtacatgacagcttcaagtacagccattcggggttgggcgctggcgcggcattggccatcgccattgtggttacctacctgacctggggtgcgggtagttcgatggcaggcgtcgcggccaaaagcgcaacaggtgtcgctgccaactccgtcgccagtgccgtagccaccaacgcggcgatcagcacggtgaacaaccgcggcaaccttggcgcggtggcgaaagacgtgtcctccagcgacagcctgaagggctacgcggtcgccggtatcagcggcggcttcatgcccagcagtctgggtgcccagcttgccgttcgctccgcgctgaacaccgtggtgaacggtggcaagttcagggacaacgtcgcgcaggctgcgatcagcatggcggcggacgcgctaagcggcgcgatcttcgacaaggtcggagatgcgttggtcggcagcggccttcccaagaaggtggcggtccatgcgattgtcggcgggttgatcggcgaggctgccggcggcgatttccgtaccgcagccctggccgctggcgccaacgaggcattggtaagcctcgtcggtgaaaagatcttccctggcgaggctcatgagcgcgtgctggcgatgacctcgcagttgatagggatgacagtggctgcggcggccggaggcgataccaaggcccaagagaaagccgcctgggtggctcagcaggccacggtgtacaacaacctgaatcacgcggcggcggagagcctgctcaaggaaatcaaggattgtcgcgcggcaggcggctgtggcgaggagaagttgcaaggcatcctcggcaagtacgaaaagctgtcggccgagcgttcaaacgctatcggccagtgtgcttcgcgccagtgtgtggacgacatcgtcgacagttcgatccggatggacgatccggtttccaaagagctgctcagcctactgcggcagaccacctacgacacacccggcttgttgcagggcaatcccgacgcggtcgtgtcgcagacgccgaatccaagtggctggggagatctctttgccctggacaagcaactggcgttcgccaagaacctcaaggaaggctggctgacaccggaggaaacggctgatctggatcgctggaatgcgtccacttcctggctggatcgcactgctggccgacaactggatcccaaggagaaggcttacctgctctcggagctgggggcgcagcggctatggcgcttcttggggggagggggagtgttggagcgggtgcaaagggagcgactcctgttgtaa

SEQ ID NO: 355066 - DNA, 381 bp, Pseudomonas aeruginosa
atgaagaacgcaatggccctgaccttggccggcctgctggccgctccttccctcggcttcgccgccgcgccggacgcagtgatggtcttcgcccgccagggcgacaagggcagcgtatccgtcggcgacaagcacttccgcacccaggccttcaaggtccgcctggtgaatgcggcgaagagcgagatcagcctgaagaacagctgcctggtggcgcagtccgccgccggccagtccttcaggctggataccgtggacgaggaactcaccgccgagaccctcaagccgggggccaccgtcgaaggcgaggcgatcttcgcctctgaggacgacgcggtgtacggcgcatcgctggtcaggctgagcgaccggtgcaagtag

SEQ ID NO: 355067 - DNA, 2205 bp, Pseudomonas aeruginosa
atgagcagcctgccacacagcaccgggcaagccctggatcgcgtcgacgggccagccaaggtcaccggccaggctcgctacgccgccgaatatcctgccgccgacctgctccacggcagcgtggtcagtagcgacgtcgcccgcggccgggtgcgcggcatcgactgtgcggcggccctggcggtacccggggtggtcgcggtactgcatcacctgaaccggccgccgatggcgggcgacgacgagccctacaaggacgccgatgccgccgaaggcgaacccttccgcccgctgttcgacgaccgcgtcctgtacagcggccagccccttgccctggtcctggcacggagcctggaactggcccgctacgcgggctcgctgctgcgcatcgacatcgagcccgagccgcaccagaccgacctgctggccgccctcgaccaggcccatgaggctcccgccgaactgcccgccgagcgcggcgatttctacaccgcctaccgcgccgcgccgattcgggtcgaggccagctacagcacgccgatcgagcaccacaatcccatggaaccgcacgcgtccacggtcatcgtccagcccgacggcagcctgctggtgcacgacaagacccaggggacgcagaacagccaggcctacctgcaaaaggtcttcggcctgcccgccgacaaggtaagggtctgtgccgcctacgtcggcggcgccttcggctccggcctgcgtccgcaataccagttggccctggcggtgatggcggcgctgcaactgcggcggtcggtgcgcgtagtgctgacccgccagcagatgttcaccttcggctaccggccgcgcaccctgcagcgcctgcaactgggcgccgatgccgaggggcgcctgcttgcgctgggccaccaggcgacagcgcagacctcgcgcttcgaagacttcaccgagcacgtggtggagtggagcggcatgctctatcgctgcgagaacctttccctggcctaccgtctggtgccgctggacgtctataccccgctggacatgcgcgcccccggcgcggcgctggggctgatcgggctggaatgcgcgatggacgaactggcggtgcggctcggcatggaccccatcgcgctgcgccggttcaacttcgccgagcgcaacggcaacgaggacaagccgtactccagcaaggcgctgctggcctgctacgaggagggcgcacggcgcttcggttggcaggcccgcgacccacggccacggagcatgagcgaagggcgccagttgctcggctggggcatggccggcggcgtctgggaggccatgcagagcaaggccagcgcgagggcgcggctggaggcggacggcctgctgcgggtggccagcgcgaccacggatatcggcaccggcacctacacggtgatgacccagatcgccgccgacgccgctggcatggcgccggaagaggtgcgcttccagcttggcgacagtgcgttgcccaaggctccattgcagggcggctcgttcaccgtctcgtcggtcggttccgccgtccgcctggcctgcctgcgcctgcgccaggccctggtcgcccatgccagggcccgccatccggagctggccggcaccgccgaagaacgcttccgcatatgccgtggccatctggaagcgggcgatacgcgatacgccctggccgacctgctgcaagggctgccggaagacgcgttgcaggtggaggtggaagctgaaccctcggcgcggcgcaaaggctacgccaccgcgacccattcggcggtattcgtcgaggtgcggatcgacgaagccctcggtaccctgcgtgtgagccgggtggtcagcgcggtcgcggcggggcgggtgatcaacccgaagaccgctcgcagccagatactcggcggggtggtctggggcctgggcatggccttgcaggaggaaacccaggtcgaccatgcgctgggccgctgcatgaaccacaacctcgccgagtaccacatcccggttaacgccgatattggcgatatcgaggtgatcttcgtcgacgaacccgacgatatcgttaacgaactgggctccaagggcgtcggcgaaataggcatcgtcggcgtcgccgccgcagtggcgaatgccgtgtaccacgccaccggccgccgcctgcgcgacttcccgctgaccgtcgacaagttgctcggctga

SEQ ID NO: 355068 - DNA, 402 bp, Pseudomonas aeruginosa
atggtcaacaccgccgtcggcctgatttcccagctcacccaccagaccaaggacatcgagaacatcgtcaccaccatccagagcgtcgccgaacagaccaacctgctggccctcaacgccgccatcgaggctgctcgcgccggcgacatggggcgcggcttcgcggtggtcgccgacgaggtgcggcaactggcggcgcgcaccagcggcgccacggtggagatcaagaacgtggtcaccgagaacgtcaagctgacccagcagatcaaccacaacatgcagaccatcgagtccagcgcccaggagaacaacaaccagatcaccaccgtggccggcatcatgcaggagatcagcaagggcgccgagcacgtggcgcgggtggtgtcgagcctgttcaagtga

SEQ ID NO: 355069 - DNA, 438 bp, Pseudomonas aeruginosa
atgagcctctggcgacaaacgcccgacctggagcaactgaacgcctcgcagaagaacagcatcggcgacctgcttggcatccgcttcgaagccttcgacgacgagtcgctgaccgcgagcatgccggtcgactcgcgtacccaccagccgttcggcctgctgcatggcggcgcctcggtggtcctcgcggaaagcctgggctcgatggccagctacctgtgcgtcgacaccagtcagtactactgcgtcggcctggaagtgaacgccaaccacctgcgtggcctgcgcagcggccgggtcaccgcggtggccagggcgatccacctggggcgcaccacccatgtctgggacatccgcctcagtggcgacgacggcaagccgagctgcatcgcccgcctgaccatggcggtggtgccattggcgggcagggcgggctga

SEQ ID NO: 355070 - DNA, 1668 bp, Pseudomonas aeruginosa
gtggtcactgcaaatcgtctgccgctcgaagtcttcttcgagcgcgaaaagcgtcatccgcaacggcgttacctggtgcagcccatcggtggcggccgggtcgaggagctgagctggggcgaggtgggcgaccaggcgcggcgtgcagccgcctggttgcgcagcctggatctccccgccggcagccgtatcgcgatcatctcgaagaactgtgcgcactggatcgtcactgacctggcgatctggatggccgggcacgtttccgtccccctctatcccaatctcaccgccgagtcggcgcgccaggtgctggagcattccgagtcggcggtggtcttcgtcggcaagctcgacgactggccggcgatggcgcccggagtccccgagggcataccgaccgtggccatgccgttgcacccggaagggcgtttcgaccgccagtggagcgacctgcaggcctgcgcgccgctcgaaggcgacacgccgaccgccgtcgagcaactcgccaccctgatctacacctccggaaccaccggcgtgcccaagggggtgatgcacaacttcagcagtttcgccttcgccgccagccgcggcgtggaactgttcggcacccgcgaagacgaccggatgctctcctacctgccgctgtgccacgtggcggagcggatgttcgtcgagatggggtcgctctacgggggaaccacggtgttcttcgccgaaagcctggacaccttcgtcgaggacatgaagcgtgctcggccgaccctgctgttcggcgtgccgcgcatctggaccaagttccagatgggggtgtattcgaagatgccggcgcagaagctcgaccgcctgctgaagctgccgatcctcggccgcatcgtcggtcgcaaggtgctcgccgggctaggcctggacgcggtgcgctacgcgctctgcggcgcggcgccggtacccgaggcgctgctgctctggtatcgccgcctgggcctggatgtgctcgaggtctacgggatgaccgagaacagcggctactcccacgtctgccggcccggccggcagaagaccggctggatcggccagaacagccccggcgtcgaggtacgcatcagcgacgagggcgaggtgcaggtgcgtagcggcgcgaccatggtcggctactacaaggaaccggagaagaccgcagaggtgctcaccgccgatggtttcctgcgcaccggcgacaagggcgagcaggacgccgaaggcaacctgcgcctgaccgggcggatgaaggaaatcttcaagaccagcaagggcaagtacgtggcgccggcgccgatcgagaaccgcctggcggtgcacgatcgcatcgagcaggtctgcgtggtcggcgagggcctcagcgcgccgctggggctctgcgtgctctccgaggtcggtcgccgggaggccctcaacggtacccgcggggcgctggaaagcagcctgcgggcgcacctggaacaggtcaacggtgcgctcgataagcacgagcgcctggtcggcctggtcctggtgcaggaaacctgggcggtggacaacggtttcctcacgccgaccttgaagatcaagcgcaatatggtggaaggtgcctatggctcgcgcttccacgaatgggtggaacgccgcgaggccgtgctctggcacgaatga

SEQ ID NO: 355071 - DNA, 1023 bp, Pseudomonas aeruginosa; identical to SEQ ID NO: 354733

SEQ ID NO: 355072 - DNA, 873 bp, Pseudomonas aeruginosa; identical to SEQ ID NO: 354734

SEQ ID NO: 355073 - DNA, 717 bp, Pseudomonas aeruginosa
atgcccggtgggcaccgcgctgagcgacagcagcggcgtctggccgggggcgaggtcgtgcaactgctcgtcgagccgttgcaacagctgtgcggcgtcgccgcgcgcgtcgatcaggcgcagctccagcccgcgctgctggcgcgcggcgagcaggcacaggctgttggaaccgtattcgtcgaagctgctgatcgcccgtatccgtggatgggcggccagggccgcggcaaaggccaccgaccatgcgcggctggcgcagtcgagcagggcgatgtgccgtggctgggtgccgagcactcgcgcgacgctgtcgcggaccgccagcaagggctcggcgaaatgctcggcggcgcgctgcacgccccagcgccgctcggcttccagccagctgtcgagggcgtcgtagagcacctgcggcggcaggctggcggagccatgggcgaagtgcgcgtagctgccccaggccggggtctcgcggcgcaggcgcagcagttcgtcggcaccgaaggcgtcgggggcggcggggaagagcgcgctcatggccgcaccgccgcgatcagttccacctccaccgcggcgccgcgcggcagctcggccacgccgacggcggcgcgggcgtggccgccgcgcgcgccgagcacctcgtcgaaatattcgctggcggcatcgatcaccgccggctgctggacgaaacccgccgcgctggcgacgtag

SEQ ID NO: 355074 - DNA, 759 bp, Pseudomonas aeruginosa
atgcccgaggtcacccgcgtgagcgagtccgatcgcctgttcgcccaaccccagcaacgtgtcgccgacttcgtgttcaacgaagacgtggtgcgcgtgttccccgacatgatcaagcgctccgtgccgggctaccccaccatcgtcgagaacatcggcgtactcggcgcgcagttcgcccagccgaacagcgtgctctacgacctcggctgttcgctcggcgcggtcacccagtcgctgcgccgccacgtccgcaacgacggctgccgggtgatcggggtggacaactcgcacgcgatgatcgagcgctgcagtgaatacctgcatgcccaggacgccatgtaccaggagctgctgccggtcgagctgatcgaggccgacattctcgccctggacctgcaacccacctcgctggtggcgatgaacttcaccctgcagttcgtcgcccccgaccagcgcctcggcctgctgcgcaggatccgccaggcactgctgcccggcggcgcgctgatcctctcggagaaactgcgcttcgccgatgcgcaggagcacgcgctgctcaccgacctgcacatcgccttcaagcgtgccaacggctacagcgagctggagatcgcgcagaagcgcagcgcgctggaaaacgtcatgctccccgacaccttcgaggaacaccgtgaacggctgctggccgccggcttcagccgggtcagccaatggttccagtgtctcaacttcgcctcgatgatcgccctgccatga

SEQ ID NO: 355075 - DNA, 573 bp, Pseudomonas aeruginosa
atgggcaccgctcttcgttactcactgctctgggcatccactgtcttcgtttcctcctgcggcagcctgctgcccagcgaacgagcggaagtccaatcccccttcgtcgactacctcgatgccgaactgcgctattcccaggcgcaacccggcagcacgacccgttcgcagctgttcgggctgggtttcgatccattgacccagggcaacggccgcatgctgtcgttcatcgacgtgcggctcatgttcatccagccgaacatccccatcgattacctgccgggcggcctggtgcaatgcctggaagcgaaggaccgttgcatcggctacgccttcgatttcagcaagaccgacacccagcgggtcggcagcttctgggcggacgtgttcaacttccgcaagaaacgggagttgcagggctggtcgttcaaggcggtgttcgtcttcgtcaacgacgtgctggtgcacaaggtcagcaacggcgaaccgaacatccatcgcctggaagacaagaagaacccgctgggtccgctgcagggcgcgggagagtacttctccgacaagctcaggtga

SEQ ID NO: 355076 - DNA, 753 bp, Pseudomonas aeruginosa
atgctccgcgcctccttcgtcctgctcgccctgtcctgcgccgctcctctgctctcgctggccgaaccgttgcgcttcgcaggcgacgacggctgcccctacctgtgccctggcacgccgcagcggcccggctacctggtcgaggcgctcagccaggtccttcgggagccaccgcacttcgacagcctgccctggccgcgcgccgtgcagatggtccgcgacggccatcgcgacggcctggtcggcgcctatggactcgacggcctgcgggtcggcagcgagcccatcggctgggtcgggctggccttctacacccgccacgacagcgactggcactactccggcgatgcttccctgctcggccagcgcctgggcctcgcccagggctacgtgaacaatccgcgcttcgaagcctggcgcagccaggccggcgacgacgacctgcacctgcaggtcctcggcggcgagcgcgtgctgccgcgcaacctgcagaaactgctgctcggccgcatcgacgtgctattggaagaccgcgacatcatcgagcactacctggagcatcatccgcagctcgccggacaggtccgccgcgccggcgaactgcccgggcggcagccgctgcacgtcggcctcagcccgcacctgccggaggtcgacgcgcgtctcgcggaactcgacgaagggctgcgccaactgcgtcgcgaaggcaccctgaaggtcctcggcgagcgctataggctttctttcgaatga

SEQ ID NO: 355077 - DNA, 405 bp, Pseudomonas aeruginosa; identical to SEQ ID NO: 322058

SEQ ID NO: 355078 - DNA, 1998 bp, Pseudomonas aeruginosa
atggtggaggtggactatccgaagaccccgatcgatcccagtgacgaagtgaaggcctacggcatggccctgatcaacgcgatcaaggagctgctgccgctcaacccgctgtacagcgaggaactgaagaactacctgaaccgcttcagtcccaacgacccgtcgccgctcaccgacttcgccgcggccctgaccaccgcgcccggcggcgaactgcaggaagtgctggacaccgtgccgatcctcaagcggatggagaaggtcttgccgctgctgcgcaaggaagtggaagtcgcgcgcctgcagaaggaactgtccgccgaggtcaaccgcaagatcggcgaacaccagcgcgaattcttcctcaaggaacagttgaagatcatccagcaggagctgggcatcaccaaggacgacaagagcgccgacgccgacgaattccgcgcccgcctggaaggcaaggtgctgcccgagcaggcgcgcaagcgtatcgacgaagagctgaacaagctgtcgatcctcgagagcggctcgcccgagtacgccgtcacccgcaactacctggactgggccacagccctgccctggggcgtgtacggcaaggacaagctcgacctcaagcatgcgcgcaaggtcctcgacaagcatcacgcgggcctcgacgacatcaaggatcgcatcctcgagttcctcgccgtgggtagtttcaagggcgagatcgccggctccatcgtgctcctggtcggcccgccgggagtgggcaagaccagcatcggcaaatccatcgccgagagcctcggccggccgttctaccgtttcagcgtcggcggcatgcgcgacgaggcggagatcaagggccaccgccgcacctacatcggcgccctgcccggcaagctggtgcaggcattgaaggaagtcgaggtgatgaacccggtgatcatgctcgacgagatcgacaagctcggcgccagctaccagggcgacccggcctcggcgctgctggaaaccctcgacccggagcagaacgtcgaattcctcgaccactacctggacctgcgcctggacctgtccaaggtgctgttcgtctgcaccgccaacaccctcgactcgatccccggaccgctcctcgaccggatggaagtgatccgcctgtccggctacatctccgaggaaaaactggccatcgccaagcgccacctgtggcccaagcagttggaaaaggccggcgtacccaagggccgcctgagcatcagcgatgccgcgctgcgcgcggtgatcgagggctatgcgcgggaagccggggtgcgccagttggagaaacagctcggcaagctggtgcgcaagtcggtggtcaaactgctggaggatcccgagtcgaaggtgaagatcggtcccagggacctcgaggactacctcggcatgccggtgttccgcagcgagcaggtgctttccgggatcggcgtgatcaccgggctggcctggaccagcatgggcggcgccaccctgccgatcgaggcgacccgcatccacacgctgaaccgtggcttcaagctcaccggccagctcggcgacgtgatgaaggaatccgccgagatcgcctatagctacatcggctcgcacctgaagaagtatggcggcgacccgaccttcttcgaccaggcgttcgtccacctgcacgtgccggaaggcgccacgcccaaggacggccccagcgccggcgtcaccatggccagcgccctgctctccctggcgcgcaaccaggtgccgaagaaaggcgtggcgatgaccggcgaactgaccctgaccggccaggtcctgcccatcggcggggtccgcgagaaggtgatcgccgcgcgccggcagaagatcttcgagctgatcctgccggaagccaaccgcggccacttcgaagagttgcccgactatctcagggaagggctgaccgtgcatttcgccaagcgctacggcgacgtggccaaggtgctgttcccggcctga

SEQ ID NO: 355079 - DNA, 1125 bp, Pseudomonas aeruginosa
atggcatggtattcaaccggcaccgtcgcggtgacagaaaatagcccgaccgtcaccggcaccggaactcagttttcttctaatgtccgggtaggcgacgcctttattgcccctgacgggcgcctctacgaagtgagcaacgtcgccagttcgacggtcatgtcgataaagcccaactaccggggcagcacggctagcggccagccctatgcggtggcgccaatcctgggttacgacaaggagctgagcgatcgattcaacctgatagcgaaccagtggggagggacgctggccggcattcagccgtgggcaacggcaccgacgccggcccaggcgaggaactcgctcgagttgcgcagcgccgcccaggccgatatcggtacaacgcttggaaacgccatgccggtcggcgcattcgggattggttctgagcgtcctgaccgagcaccatcgattcatcgttatgcgacaagcgtcgagatattcgattcgacaactgttgactccgtggcaactggcattagcaacggatctgtgttgacgatcggctacgacggatccgacttgcgaggagcgcagatgtttttcggccaggtgccggcatctacggtcaaaggtcggtgcgggaaattctcgtctgcccctattttcgagttctacacgactataaacacgacgagagcaaccgacgggacgcttcgtgctgcatcgccggtcgtgcgtatcgccaacgttgatgggagcttgagaccggacctcaacgaactggacttcgagcctgcgggggcttggggtgtagccaacgcagaggcccgcggcgttgctgttcaacggctcgccgttggcgtctacaaggtctctggtagcctggggctagcgaaagagggctggcgcgtgatcgaccctgcgtctcccgacggcggtcgcccactcggtatcactgacagcgaacaggctgaggatgggacggtcaccatccggctcttcaaacagcgctggacactcagtgacgacggcgagatggtgctcgggaagggcgccccactggatgtcccgctcaacagttggatcgatgtccgattgtcgatgccggccccccccgagatgcagcccgagactgtgtga

SEQ ID NO: 355080 - DNA, 1116 bp, Pseudomonas aeruginosa
atgccttttctgagcgacatgctcgaccagtcccgccggcagcaggacgaggaacaggccctggcgcgggagaatcttgccgaggcaagtctgctccaggcccacctgagtcaccgcagcgccctgcacagccgtttccgtttcgacccggcggcggtgatggactgcctgcgcgccgaggtgctcggccaggaaccggcgctacaggccgtcgaggacatgctcaaggtggttcgcgcggacatcgccgacccgcgccgtccgctgttcagcgcgctgttcctcggccccaccggggtcggcaagaccgagatcgtgcgcgccctggccagggccctgcacggcgacgccgaggggttctgccgggtggacatgaacaccctgtcccaggagcactatgccgccgccctcaccggtgcgccgccgggctacgtcggggcgaaggagggcaccaccctgttggagcaggacaagctggacggcagtcccgggcgccccggcatcgttctcttcgacgaactggagaaggccagcccggaagtggtccatgcgctgctcaacgtgctcgacaacggcctgctgcgggtcgcttccggcgagcgcacctaccatttccgcaacaccctggtgttcatgaccagcaatctctgcgcccatgagatccagcgctacgacgagcgtcgccaacgcctgccctggcgcctgctgccggtcggcggcgaacgccggcggcgggacatcgacgggatggtccgggcccggctgctgaagaccttctcgccggagttcgtcaatcgtctcgatagcgtggtcaccttcaactggatcgaacgcaacgtcgtcgcgcgcctggtcgagttggaggtgcagcggctcaaccggcgcctggagaagcatcgctgccgcctggaggcgaccccggaggtgctggcgaagatcgcccgcgccggcttcgaccggcagttcggcgcccgtgcgttgcgccgcagtgtccgtcatcatctcgaggtaccgctggccgagcatctgctcgaccaccaccagccgggcgacgggaactgcacgatctacctggcgagcctggagcacgagcgggttcgcttcgtgcggcgctga

SEQ ID NO: 355081 - DNA, 549 bp, Pseudomonas aeruginosa
atgggcggccagatcagcctgcgcagcgaactgggcaacggctcctgcttctcggtcgagttcgatcttccgctgaccgggcctccgcccagcgagtccagcgaagcgcgttccggagttgccgaggtcgaggagcagaaagaggcaagggcgctctcgatcttgcttgcggaagaccatccgttcaatcggctgaccctgaccatgcaattggaaagccttgggcaccgggtgacctccacggaagatggcgaggaagcattcgaacgttggcagggcgaagacttcgatgtcgtgattaccgacggcatgatgccgcggatggatggctacgagctggcgcgacggatccggtcgcaagaggcccttggcggtcggcgtcgctgcttggtgatagcgcttaccgccagcgccgagaaggatgcgctggagcgctgcctggctgccggcatggaccgggtcctgttcaagccgactacgctcgatgagctcgctcgggcgctgaacgggggagagccgctcatgcctacgagcgtcgattcgaaatga

SEQ ID NO: 355082 - DNA, 771 bp, Pseudomonas aeruginosa; identical to SEQ ID NO: 354741

SEQ ID NO: 355083 - DNA, 450 bp, Pseudomonas aeruginosa
atgggggcgggggtcgccggtaccgaatggccggcggaaatgctccgcgaagtgagctacggaccgctggaggcggtgggtcaggcgctttcccgaacctggaccatgagcctgctaacgctcgactccataaagaaaatgttgctcggcgagctctcggtaaaaaacttgagcgggccgataaccattgctaaagtggcgggcgcttcagcccagtctggcgtgggggattttctcaatttcctggcctatctgagcattagcttgggggttctcaacctgctgccgatccctgtcctcgatggcgggcatctgctgttctatctggttgagtgggtgcgcgggcgcccattatccgaacgggtacaggcttgggggatgcagatcggcatcagtctggtcgttggcgtgatgttgctcgctctggtcaacgatctgagtcgtctgtag

SEQ ID NO: 355084 - DNA, 2388 bp, Pseudomonas aeruginosa
atgaaacgctttctgctacccgcgctgctgtcagcgctgatgatcgccgaggttcacgccgagtccttcactgtttccgatatccgggtcaatggcctgcagcgcgtgtccgccggtagcgtgttcgccgccctgccgctgaacgtcggcgagaccatcgacgaccaggccctggtccaggccacccgctccctgttcaagaccggcttcttccaggacatccagctcggccgcgatggcaacgtgctggtagtcactgtagtcgagcgcccgtcgatctccagtatcgagatcgagggcaacaaggcgatttccaaggaagacctgctcaagggcctgaaacagtccggcctggccgagggcgagatcttccagcgcgccaccctcgaaggcgtgcgcaacgagctgcaacgccagtacgtggcccagggccgctactcggccgagatcaacgcggaagtgatcccgcagccgcgcaaccgcgtcgcgctgaagatcaacatcaacgaaggcacggtcgccgcgatttcccacatcaacgtggtgggcaacaccgtcttctccgaagaagacctgaccgacctgttcgaactgaagaccaccaactggctgtcgttcttcaagaacgacgacaagtacgcccgcgaaaagctctccggcgacctcgagcgcctgcgctcctattacctggaccgcggctacatcaacatggatatcgcctccacccaggtatccatcaccccggacaagaagcacgtctacatcaccgtcaacatcaacgagggtgagaagtacaccatccgcgacgtgaagctgaccggcgacctgaaggtgccggaagaggaagtgaagcgcctgctgctggtacagaagggccaggtgttctcgcgcaaggtgatgaccaccacctccgacctgatcacccgtcgcctgggcaacgagggctacaccttcgccaacgtcaacggcgtgccggaagcccatgacgacgacaagaccgtctcggtgaccttcgtcgtcgacccgggcaagcgcgcctacgtcaaccgcatcaacttccgcggcaacaccaagaccgaagacgaagtgctgcgccgcgaaatgcgccagatggaaggcggctgggcctccacctacctgatcgaccagtccaaggcccgcctggagcgcctcggctacttcaaggaagtcaacgtcgagaccccggcggttcccggcaccgacgaccaggtcgacgtcaactacagcgtcgaagagcaaccgtccggctcgatcaccgccagcgtcggcttcgcccagagcgccggcctgatcctcggcggctcgatcagccagaacaacttcctgggtaccggcaacaaggtcagcatcggcctgacccgcagcgaataccagacccgctacaacttcggcttcgtcgacccctactggaccgtcgacggcgtcagcctcggctacaacgccttctaccggaagaccgactacgacgaactcgacgtcgacgtcgccagctactcggtgaacagcctgggcgccggcatgagcatcggctacccgatcagcgagacctcgcgcctgacctatggcctgagcgtgcagcgcgaccagatcgacaccggccgctacaccgtggacgagatctacgacttcctcgacaaggaaggcgacaacttcaccaacttcaaggcttccatcggctggtccgaatcgaccctgaacaagggcgtgctggccacccgtggtcactcgcagagcctgaccctggaaaccaccctgccgggcagcgacctgtcgttctacaagatcgactaccgcgggcaggtcttcgccccgctgaccgacaactacaccatgcgcttccacaccgagctgggttatggcgacggctacggatccaccgagcgcctgccgttctacgagaactactacgccggcggcttcaactcggtgcgaggcttcaaggacagcacgctggggccgcgcagcacgccatcagttgcgcgtgatggcaacggtaaccagatcgttggccctgacagcaaaggccgctacaccgacccggaccaggatcccgaagccttcggtggtaacatcctgatcaccggcggcgccgagctgctgttcccgctgccgttcgtcaaggaccagcgccagttgcgtaccgtgctgttctgggacgtgggtagcaccttcgataccgactgcccgaccaaaaccaccaccaactgcgacggcatcaagaccgacaacctcgccagttccgtgggcgtcggcctgacctggatcaccgcgctgggcccgctgagcttcagcctggcgacgccgatcaagaagccggacaacgcggaaacccaggtcttccagttctccctgggccagaccttctga

SEQ ID NO: 355085 - DNA, 507 bp, Pseudomonas aeruginosa
gtgcgtaagttcacccagttcgtcctgatcaccgcagccatcatggcggctccttcggcgttcgctgaaatgaagatcgcggtgctcaactaccagatggcgctgctcgagtccgatgccgccaagcaatacgccgtggatgccgagaagaagttcggcccccagctgaacaagctgaagaacctcgagcgcgacgccaaggcgctgcaggacaagctggtttccaacggcagcaagatgtcccagggcgaccgcgagaaggccgagctggacttcaagcagaaggcccgtgacttccagtttcagtccaaggaactgaacgagtcgaaggccgccgccgaccgcgacatgctgaagaaactcaagccgaagctggaccaggccgtcgaggaaaccatcaagaaaggcggctacgacatggtcatcgagcgtggcgccgtggtcgacgtcaagccgcaatacgacatcacccgccaggtgatcgagcggatgaaccagctgcgttga

SEQ ID NO: 355086 - DNA, 1137 bp, Pseudomonas aeruginosa
atggctgacggattacgcgtagccctggtcgccggcgaggcctccggcgacatcctcgggtccggactgatgcaggcgctgcgggcgcggcacccggatatcgagttcatcggcgtcggtgggccgcgcatggaggccgaagggctgtccagctatttccccatggagcgcctgtcggtgatgggcctggtcgaagtgctgggcaggctgccggagttgttgcgacggcgcaagcgcctgatccgcacgctcatcgaggcccggccggatgtgatgatcggcatcgatgctcccgacttcaccctcggcgtcgaacacaagctgcgccaggctggcctgcgcaccgtgcattacgtcagcccttcggtgtgggcctggcggcagaagcgggtgctgaagattcgcgaagcctgcgacctgatgctggcattgttccccttcgaagcacgtttctacgaagagcatggggtgcctgtgcgtttcgtcggccaccccctggccaacaccattcccctggaggcggatcgcgctgcggcccgcgcgcggctcggattgccggcggacggacaggtgctggcgctgatgccgggcagtcgcggcggcgaggtcggcaagctcggcgccttgttcctcgacaccgcccagcgcctgctcgtcgaacggccgggcctgcgtttcgtgctgccctgcgccagcgctgcacggcgcgaacagatcgagcagatgctccagggccgcgagcctctgccgctgacgctgctcgacggtgcgtcccatgaagcgcttgccgcctgcgatgcggtgctgatcgcctccggtaccgcgaccctcgaggcgctgctctacaagcggcccatggtggtggcttatcgggtcgccgggctgacgtaccggattctcaagcgcctggtgaaaagcccgtacatctccctgccgaacctgttggccggacgcctgttggtgccggagctgatccaggacgccgcgactccgcaagcgctggccgcaaccctcttgccgctgctggacgacggctcgcagcaggtggaattcttcgatgccatccatcgggccttgcgccaggatgcctcggcacaggcggcggaagccgtcctgcaactggtggagcgccgctga

SEQ ID NO: 355087 - DNA, 777 bp, Pseudomonas aeruginosa
atgagtttgatcgatcctcgcgccatcatcgatccgagcgccaggctggcggctgacgtccaggtgggcccgtggtccatcgtcggggcggaagtggagatcggtgaagggacggtgatcggtccgcacgtggtgctcaagggccccacgaagatcggcaagcacaaccgcatctaccagttttccagcgtcggcgaggatactcccgacctgaaatacaagggcgagccgacgcgcctggtgatcggtgaccacaacgtgatccgcgaaggcgtgaccatccatcgcggaaccgtccaggatcgagcggaaaccaccattggcgaccacaacctgatcatggcctatgcgcacatcggccatgacagcgtgatcggcaaccattgcatcctggtgaacaacacggcgctggccgggcatgtccacgtggacgactgggcgatcctgtccggctacaccctggtgcaccagtactgccggatcggcgcgcacagcttttccggcatgggcagcgccatcggcaaggacgtcccggcctacgtgacggtcttcggcaacccggccgaagcccgcagcatgaacttcgaaggcatgcgtcggcgcggcttcagcagcgaggccatccatgccctgcggcgtgcctacaaggtggtctatcgccagggacataccgtcgaggaagccctggccgagctggccgaaagcgctgcccagttccccgaggtcgcggtgttccgtgattccatccagagcgcaacccgcggcatcacccgctga

SEQ ID NO: 355088 - DNA, 441 bp, Pseudomonas aeruginosa; identical to SEQ ID NO: 318676

SEQ ID NO: 355089 - DNA, 615 bp, Pseudomonas aeruginosa
gtgatcggcgaaggcggctggctggcgccgcgggtcacgctctaccacgacgtcaccatcggcgcgcgggtgagtatccagtcgggcgcggtgatcggcggcgaaggcttcggtttcgccaacgagaagggcgtctggcagaagatcgcccagatcggcggggtgaccatcggtgacgacgtcgagatcggcgcgaacaccaccatcgaccgtggagcactgtccgatacgctgatcggcaacggtgtgaagctggacaaccagatcatgatcgcgcacaacgtgcagatcggcgatcataccgccatggccgcttgcgtcggcatttccggcagcgccaagatcggcaggcattgcatgctcgccggcggcgttggcctggtcggccatatcgagatctgcgacaacgttttcgtgaccggcatgaccatggtgacccgctcgatcaccgagccgggatcgtattcctccggtaccgccatgcaaccggcggccgaatggaaaaaaagcgccgcgcgcattcgtcaactggacgacatggcgcgtcgacttcagcagctggaaaaacgcctggctgccgtgacctcaagcggtgacgcttcatctgatgcgtaa

SEQ ID NO: 355090 - DNA, 1347 bp, Pseudomonas aeruginosa
atgactagaactcgcaaaagaacggcgctttacctcggcctgccactgctcatcgtcctgctggccgtcggcggctggctggcctggacccagtggctgggcagcgccggctacccgcgcaaggtcatgcaacacgcagaggagttgcacgaacgcatcctctccttcgacagccggatcaccgtgccgctggacttcggcaccaccggcaacgaggtggacaaggacggaccgggccagttggatctggtcaaggctggccgcgggcgcctgtccggcgctgccctggcgatcttcggctggccggagatgtggaacggccccgacgcgccgcacaagccgacccccggtttcgtcgacgaggctcgtcaccagcaggaaattcgttacaagattctcaccggcatggtccgcgactttcccaaccaggtcggcatcgcctactcccccgaggacttccgccgcctggccatggaaggcaagttcgccatcgtcatgagcatgctcaacgcctacccgctgggcgacgacctgtcccagctggacaaatgggccgcccgcggcgtgcgcatgttcggcttcaattatgtcggcaacaacgattggtccgactcttcccgtcccttgccgttcttcaacgacacggcggatgccctgggcggcctctccccgctaggcaagcaggcggtcgaacggctcaacgatctcgggatgatcatcgacgtctcgcagatgtcgaccaaggccctggaacaggtcgccgccctcagccgcgcgcccatcgtcgcctcgcactccgcgccgcgcgccctggtggacatcaagcgcaacctcagcgaccacgagatgcaactgatcaaggacagcggcggcgtgatccaggtggtcggcttccccgcctacctgcgtccgctgagcaaaccgaccctggacaagctcgacgccctgcgcgcgcgcttcgacctgccgcccctggaaggcctggactatgcgctgatgccgggcgatccgatcatcaccatctggccggaacaacgcttcggtgaatacgccagcgccctctacggcatcctggaggaggagcccaaggccggcctcaaggaactggtggacgccatcgactacacggtgaagaaggtcggcatcgaccacgtgggcatcagctcggacttcaacgacggtggcggcgtggacggctggaaggatgtcagcgaaatccgcaacgtcactgccgaactgatcacccgcggttattccgatgccgacatcgccaagctctggggaggcaacttcctgcgcgcctggggcgaagtgcaaaaacgcgccaagccgacagccaccccctga

SEQ ID NO: 355091 - DNA, 798 bp, Pseudomonas aeruginosa
atgggtcgccgggccgagccaagggtcgtccacctccacccagcgcccagccgcaaaccagggaataccctgcacctctcgacgccgaacttcgccgggatggaaacgctcgtgggcacggtaccaatcctcgatacggtcgtcgatccagccatggaaggaccagaacacgggattcacatgggacgagaacggatcgccgaggaaatcgttctccgggcggaaccagcgcggcgagaaatccgacgggacgcggtcgcccatgaccggcgacccgttggatgggtcgcgggtcacggtcgcccagcgcatatgcaaccaatcgtgcatacccagctccatctccgagccgaactgtcccagggtcaacttcgccagatattccggatcctggtactgcgactcccaggccaggaaattggaatggtacgcttctgcgcttttcaacccacgcagccattcgctgtattcgtcgtccccgaccgctacccaggccggcggcacggagaaaccatctggattgtcgaagtagcggatgaagccgggacgatcgaattccagcggaaccgcggggcgcggcaaacgcttccaggatggcaggtcttgcatggatcgtgcggtatgcagcatatgccgatgcatgaaaaggaagtcgataccagaagcgttgcgatcctttcttggcccccgcgcatcgcgctcccggtccagcgggccaggctgccagcccaccccacgcaacgcattgcgctgcttctccgacagttgatgccacttgtcccgcgaggcgtgccatag

SEQ ID NO: 355092 - DNA, 1359 bp, Pseudomonas aeruginosa
atgaccagaccacgtacaagcaaggccctctacttaggcttaccgatcctcttcattactctcgtcggcgcaggcctgctggcctggaaagctttcgggccgagcagcgccagctacccacgcaaagtcatgaagcatgcagaggaattgcaggaccgcatcctctccttcgacagcaagatcaccgttcccctggatttcggtacgaccggcaacgaagtggacaaagacggccccggccagcttgatctgatcaaggctggccggggccgcctttcgggcgccgccctggcgatcttcggctggccagaaatgtggagcgggcccaattccccccacaaaccgaccctggggttcgtcgaagaggctcgccaccagcaggaaacccgctacaagatcctcaccggcatggttcgcgattttcccaaccggatcgctatcgcctactcgcccgaagacttccgacggctggccatggaaggcaagttcgccgtagtcatgagcatgctcaatgcctatccgcttggcgacgacctttcccaactggaccgctgggcagcccgaggcgtccgaatgttcggcttcaactatgtcggcaacaacagttggtccgatgcagctcgccccctgccgttcttcaacgactcgccggacccgctgggcggcctttcgccgctgggcaagcaggcggtacaacgactcaacgatctgggtgtgatcatcgacgtctcgcagatgtcgggcaaggcgctggaacaggtagccgcgctcagtcgcgcgcccatcgtcgcgtcacactcggccccacgagccctggtggatatcagacacaatctcagcgaccggcagatgcaactgatcaaggacagcggcggtgtaatccaggtagttggtttccccgcctatctgcgcccactcagcaaacccaccctggaaaagctcaatgcgttgcgtatccgcttcgatctgccccccctggaaagcctggactatgccctgatgccgggcgatccgatcatcgctatctggccggagtcgaagttcggtgaatacgccagcacgctttatggaatcctcgaagaagaaccaaaggcaggcctcaaggaactggtcgacgccatcgactacacggtgaagaaggtaggcatcgaccatgtcggcatcgcctcggacttcaacgacggcggcgggctggatggctggaaggatgtcagcgagaaccgcaacgtcaccgccgagctgatcatccgcggctattccgacgccgacatcgccaagctatggggaggtaacttcctgcgcgtctggggcgaggtacagaagcgcgccaagcccatctcctcccccatccagccgtaa

SEQ ID NO: 355093 - DNA, 381 bp, Pseudomonas aeruginosa
atgccagtcgacggtttcgcccgggttttcattgaagcgcagacgcaaccggtcgatggcctgctgtaccgggcgcggatgagaggcaagcaggaagttggcgaaatgcaggtaccgcggatcgaggtcgaagagctggcgcagagcctgccacttgtcgctgttcgactcggtggctgcctgggtgagtcgggccgaagaaagcagtggcaggccggcggcgatgataccggcctgcttgaggaaggtgcgacggtcggtcatgaagagatccgttacggctggatgggggaggagatgggcttggcgcgcttctgtacctcgccccagacgcgcaggaagttacctccccatagcttggcgatgtcggcgtcggaatag

SEQ ID NO: 355094 - DNA, 990 bp, Pseudomonas aeruginosa
atgaactgttcagaagtagacagcggaaagcttttagaggaaatattagagaatatcagaaaaacttcaaaaaaagcgagagccaatagagatcttggccacacagctatagttctagactatatagaaaaccttgaagaacaagaccatactaagataagagctttttttaggacattgaacggtctcttaagatcttctccaattctgattctgtggccagttaccgatctacacgatgttaaaacgatgattggatatgcatcagcagtatccagcacggtatttgtaaaagggaaagaaatactgagttttagcggcccccctattagcgcctacccaagcattgcaaaaaacacaatatcagtcttaaacgatgggctttccatttcagactttaacttaacggacgaagactttgatgaactcttaaaagagctacgttcagagggagaagacaaaacgactttaagaaactacctattgaaagtacgccagagatggtctgacataaataattatttacaaaagaaaagagagaaagtacctcaacaaacagaaatctggtttgttattgcctatccagatgcagaaaatatagctggtcagttctctagaaaaagcaaagatgtattcgatgcttggattgcctcccatgcaaaactatcggaatacattcacaacaaccaaaaggaggctgcctgggatgccaagcgacttcagtatgcactaaccgggaactttacaaccagaatcctttacctcccagcaaacacactagcctcaacagtctgtgcatacggagagatcccggactttccaccaagcaatgttcctgtaccaacttcttggttcaagaaagaaactgccaggaaaactttaagaaacagcccattagtacgccaactcttaaaccagcatgtaaagatgggaaaaagaaggggggggaacggcatctcaagccctcatagatgcagctccggtatataa

SEQ ID NO: 355095 - DNA, 903 bp, Pseudomonas aeruginosa
gtggtggaaaccctggacgacctgaccagcggcctggccgactcccgcgacctgctggacatggcggtcgaggaagacgacgagggtgccgtcgacgacgttgccagcgaagtcgagcgtctgcgcgagatcctcgagaagctggagttccgccgcatgttcagcggcgagatggacccgaacaacgcctacctggacatccaggccggctccggcggcaccgaggcccaggactgggccaacatgctgctgcgcatgtacctgcgctgggccgacaagcacggcttcgacgccactatcatcgagctgtccgagggtgaggtcgccggcatcaagggcgccaccgtgcacatcaagggcgagtacgcgttcggctggctgcgcaccgagatcggcgtgcaccgcctggtgcgcaagagtccgttcgactccggcaaccgtcgccacacctcgttcaccgcggtgttcgtatcgccggaaatcgacgacaacatcgagatcgagatcaacccggccgacctgcgcatcgatacctaccgctcctccggtgcgggcggtcagcacgtgaacaccaccgattcggcggtgcggatcacccacgtaccgaccaataccgtggtggcgtgccagaacgaacgctcccagcacgccaacaaggacaccgcgatgaagatgctgcgggccaagttgtacgagctggaaatgcagaagcgtaccgccgcgtcccaggccctggaggactccaagtccgacatcggctggggccaccagatccgctcctacgtgctcgaccagtcgcggatcaaggacctgcgtaccggtatcgagcgcagcgactgcgacaaggtgctcgacggcgatctagacgaatacctcgaagccagcctcaaacaggggctgtaa

SEQ ID NO: 355096 - DNA, 1506 bp, Pseudomonas aeruginosa
atgagcgaccaacaactcgaccagcacgaactgcaacaggaagaaaacaagctgatcgcccagcgcaaggaaaaacttgccgccgtgcgcgaagcccgggccatcgccttccccaacgacttccgccgcgacgcctacttcgcggacctgcagaaacagtacgccgacaagaccaaggaagagctggaagccgcagcgatcccggtcaaggtggccggtcggatcatgctcaaccgcggttccttcatcgtcctccaggacagcagcgagcgcctgcaggtctacgtcaaccgcaagaccctgccggaagaaaccctggccgagatcaagacctgggacctgggcgacatcatcggcgccgaaggcgtgctggcccgctcgggcaagggcgacctgtacgtcgacatgaccagcgtgcgcctgctgaccaagtcgctgcgtccgctgccggacaagcaccatggcctgaccgacaccgagcagcgctaccgccagcgctacgtcgacctgatggtcaacgaggaaacccgccacaccttccgcgtgcgttcccaggtcatcgcccacatccgccgtttcctcagcgagcgcggtttcctcgaagtagagaccccgatgctgcagaccatccccggcggcgccgcggccaagccgttcgagacccatcacaacgcgctggacatggccatgttcctgcgcatcgccccggagctgtacctcaagcgcctggtggtcggcggtttcgagaaggtcttcgagatcaaccgcaacttccgtaacgaaggcgtctcgacccggcacaaccccgagttcaccatgctcgagttctaccaggcctacgccgactacgaagacaacatggacctgaccgaggaactgttccgcgaactggcccaggcggtactcggtaccaccgacgtgccctacggcgacaaggtcttccacttcggcgagccgttcgtgcgcctgtcggtgttcgattcgatcctcaagtacaacccggagatcagcgccgccgacctcaacgacgtcgagaaggcgcgggccatcgccaagaaggccggcgccaaggtcctcggccacgaaggcctgggcaagctgcaggtgatgattttcgaggaactggtggagcacaagctggagcagccgcacttcatcacccgctaccccttcgaggtctcgccgctggcccgccgcaacgacgaagacccgagcgtcaccgaccgcttcgagctgttcatcggcggccgcgagatcgccaatgcctattccgagctgaacgacgccgaggaccaggccgagcgcttcatgttgcaggtcaaggagaaggacgccggcgacgacgaggcgatgcactacgacgccgacttcatcaatgccctggaatacggcatgccgccgaccgccggcgaaggcatcggcatcgaccgcctggtgatgctgctgaccaactcgccgtcgatccgcgacgtgatcctgttcccgcacatgcgcccgcaggcctga

SEQ ID NO: 355097 - DNA, 1707 bp, Pseudomonas aeruginosa
atgaaaccttcgcaatggacgcttcgctgggtgacgctctgtggctgcgggatgctggctgcttccgccgccgccgtggagttgccagggactgtacagccatcccagcttgatgaacgcttcaagccccgcagcgagccgcaagccaagcccgaggcgccgctggtggtgcccaagcaggtcgcgccgcaaggcagcgaacagatccgcttcgaactgcgcgagatacgcatcgaaggcaacacccgctatgacaaggcggtgctcgagtcctattaccagcatatgctcggcaagcaggtgtccctggccgaactggtcgacctggccaaccgcctcaccgccaagtaccgccaggacggctacctgttgacccaggtagtggtgccggagcagagcatcgagggcggcaaggtacgcctgcaggtgatcgagggttacctcgaacacgtgcagatcaagggaaccgtcgatgggccgcgggtgcgggtggaggaactgctcgcaccgctgaccgaaaaacgtccgctggatgccgataccctggagcgcggcctgctgctggtcggcgacctgccgggggtcaacgtgcagagcgtgctcagcccgggtcaggcgctgggctcgtcgaacctcgacgtggccttgcagcagcagcgatacgaaggcttcgtcagcctcgacaaccgcggttcgcactacaccgacccgaccaccctggccttcggcgccaccgagttctcccgcctgggcttctacgagcagatcgacgtgctcggtgcgatctcgccgttcagcgatgccacccgctacatccagttgcgcggcacgttgccgctgggcggcatgttcgccggcgataccctgcagatcatgggttcctattcgaaggtcaacccggacatcccggactcggtattccccttcgacagcgtcagcaagagcaccgaaggcagcatttcctacaaccatcccttcatccgctcgcgctcgcagaacctgagcggcggcctggcgttgcagtggaaggataccgagacccgcctgcgcgacttcgccagcgacgcctcgaaccccggtcgtgaccatgtgcgggtgttccagcaacgcctgacctatgactgggtcgaccgctggatgggcatcaacctggcggaggtgcgcaacaacatcggcctggacatgtggggcgcgaccaagaaggacgatgaacgtcgttcccgcgaagtggccgacggacgtttcgtctatctcaacggcaacatcgggcgtctgcaagggctcggcggaccctggtcggtgtatggcgagttgcaatggcagtacagcttcgacccgttgctgccgagcgagcgcttcggcgtcggcggcagcgggatcggtcgcggcttcgccccgggcaacatcaccggtgaccgtggcttcgccctgaagctcgaaccgcgctatggccaggcggtgggctatagctggctgcgcagctaccaggcctacgctttctacgactggggcaagacctacaacctcgacgtggacgatgacgagcagcagaagctcggctcgatcggtgccggggtgcgcttcaacctcaccgaccagttgtcgttcaacccggagattgcccgccaggtcatcggcgagccagccgaccagcgcgatgggaagcgcgagacgcgggtcctgttcaacgtggtggcgcgcttctga

SEQ ID NO: 355098 - DNA, 729 bp, Pseudomonas aeruginosa
gtgctcaacggtggcagcttgagccgcgtggctggtgagaatgtcggcgtgtacggcatcaaccagggcggcctggtgctgaccagtggcaactatgacctggcctaccagggtaatgacctgaccatcaccaaggcgctgctcaacgtattcgccgatgccaagagcaagcaggtcggcaccgccgacccggcgctgacctatcaggtttccggcctgaagaatggcgatagcgccggtcaggtgctcgccggcgggctcggtcgggtgggcggcgaagccgtaggccagtacgacatcctccagggtgggcttgccctcaccagcggcaactaccagctcaactaccagggcaacctgctgagcatcctgccgctgccggtcacgccgggcgacctggggcaactggcagcgctctccgacttgcgcgaactgcagaaggggcgcgatccggatacccccggggatgcggtctaccgcaccaccacgctggaaaacccgttcctcgaaaacccgttcctgcgcgcctacgctctgggcatggacgtcagcgatcctaacctgctgccggctaccgccgcgggtccggcggaggacgccagcgccaagcgggtggggcagttcaccgatcgtccgctcagagcagaggccgagagtggggcgggttgctcgaaccagagctacctggccgactactggagctgcttcaacaagcctctgaatttctaa

SEQ ID NO: 355099 - DNA, 234 bp, Pseudomonas aeruginosa; identical to SEQ ID NO: 354822

SEQ ID NO: 355100 - DNA, 348 bp, Pseudomonas aeruginosa
atgcctttgaagcagttttccagtgcactcgttctcgcggccctgctcgccggttgcagcagcaacggcgacagcccgtccaccgaaggcgccagcgtagccaccggcagcgccagcgcgcccgcggccaccccggcagcggacggccgttgcgacgccaacgcggtgcaggcctatgtcggcaagcaggcttccgcggccatcgtcgaagaggcccgccgcgccgccggagcggaagtcgcccgggcgctgcgcccgcacgatgcggtgaccatggactacaacccgcgccggctgaacatcgatgtcgacgacacgctggtgatcaagcgcctgtcctgcggctga

SEQ ID NO: 355101 - DNA, 240 bp, Pseudomonas aeruginosa
atggccaaggcactcatcagcgtactgttgttctccctcgctctcgccggctgcgccagcgactacaacccctctcgcccgtacagcagcgacgaggtcaggcaactggcgctggaggacctggcccggcgcagcctgtcgttcgaggaataccaggccaagcgtcaggcgattctcgaggaaaaaccgcaaaccgccgtcagccagtccaacgccgccctacgcagtaccgccatctga

SEQ ID NO: 355102 - DNA, 1314 bp, Pseudomonas aeruginosa
atgaacgctttgaaaggccgggacatcctggcgcttggttttatgacctttgccctgttcgtcggggccggcaacatcatcttcccgcccatcgtcggcttgcagtccggcccccatgtgtggctggcggcgctgggcttcctgatcaccgcggtggggctgccggtgatcaccgtgatcgccctggccaaggtcggcggttcggtcgacgccctcagccatccgatcggcaggtatgccggcggcctgctggcggcggtctgctacctggcggtcggcccgctgttcgccattccgcgcaccgccacggtgtccttcgaggtcggcgtggtgccgctgctcggcgagagcggcacggcgctgttcgtctacagcctggcgtacttccttctggccctggccatctccctctaccccggtcgcctgctggacaccgtcggacgcttcctcgccccgctgaagatccttgccctggcgattctcggcgtcgccgccttcctctggcccgccggcccgatcggcacggcccagccggagtacacccaggccgcgttctcccagggtttcgtcaacggctacctgaccatggacaccctcgccgcgctggtcttcggcatcgtcatcgtcaacgccatccgttcccgcggcgtgcagtcgccgcggctgatcacccgctacgccatcgtcgccgggctgatcgccggcgtcggcctggtgctggtctacgtcagcctgttccggctcggcgccggcagccatgccatcgccgccgacgccagcaacggcgcggcggtcctgcatgcctacgtgcaacataccttcggcagcctcggcagctcgttcctggcgggacttatcgcgctggcctgcctggtcaccgcggtcggcctgacctgcgcctgcgccgagtacttctgccagcgcctgccgctgtcctaccgcagcctggtgatcatcctggcagggttctccttcatcgtttccaacctcggtctgaccaagctgatccaggtctcgatcccggtgctcaccgcgatctatccgccgtgcatcgtgctggtggcgctgagcttctgcatcggcctctggcattcggcgacgcgcatcctcgccccggtgatgctggtttccctggcgttcggcgtgctcgatgccctgaaggcggcgggcctgggccaggacttcccgcaatggctgctgcacctgccgctggccgaacagggcctggcctggttgatcccctcggtcgccactctcgccgcctgcagcctggtcgaccgcctgctgggcaagcctgcgcaagtcgccgcctga

SEQ ID NO: 355103 - DNA, 753 bp, Pseudomonas aeruginosa
atgacggtacctttcaaggatcatttctccacggggtcggcgaactacgccgcacatcgtccgacctacccggcgcggttggtcgacgagctggccgcgctctgccccggcacccgcctggccctggactgcggctgcggcaccggacagctcacggtgctgttggccgagcgtttcgaacgggtggtcggtaccgacgccagcgccgcgcagatcgacaaggcgcaggctcgcgagcgggtcgagtatcgcgtggcattggccgaggacagcgggctggcggcagccagcgccgacctggtgacgatcgcccaggccgcccactggctggacctgccgcgcttctacgaggaggtccggcgtgtggcccgcgcggacgccatcctggctctggttacctatggcgtattgcatgtcgacggacccatggaaccgctggtccagcacttctaccaccaggtcgtcggcccctactggcctgccgagcggtgccacgtggaggagggctaccgcaatctgccgttccccttcgaggagcgtcgcctgccggacctggccatcgaggtggcctggaccctggacgaactgctgggctatgtcggtacctggtcggcggtgaaggaagccggcaaggcccttggccaggatccgggcgccgcgttcgtcgatgagctgcgcgaagcctggggcgacccgcagacgcgctatcgggtcagttggccgctgacggtgcgcgccggggtgatccgctga

SEQ ID NO: 355104 - DNA, 975 bp, Pseudomonas aeruginosa
atgccctgtcgcatcaccctcaacgcaaacggaggccccgaggtcctgcgcctggagcaagtccaggcgcagcaaccgggccccggcgaggtctggctggagcaggccgccatcggcgtcaatccgctggacctcggccagcgctcgggagcggtaccgattccgctgccgtccggcctcggcctggaaggcgccggagtggtcgccgcgctgggtccgggagtctccggactggcgccgggcgaccgcgtcgcctatgccaccggcccgctgggcgcctatgccagcgcccggctctaccccgccgagcgcttgctgaagctgcccgacacactcgctttcgaggacgcggcggcgctgctgttcaagggcatcaccgcgcactacctgctgtacgccacctaccccgtcgggcccggcacacgcatcctgctgtacggcgcggcgggcgccgtcggccagttgatggcggcctgggcccggcacctgggcgcctgggtgatcggcgtggtgtcgaaggcggaaagcgtcgagcgggccagggctgccggctgcgacgaggtgctggtgttcgacgcggccagtctcgccgcccaggtcgccgagctgaccgccgggcgcaaggtcgatgtggtctacgaccccatcggtcgcgctaccttcgaggcatccctgaacagcttgcgtccgcgcggcctgctggtgtccttcggcgctacctccggcgtgccgccagccgtcgaagtcgccaccctcaacgccaagggttcgctgttcctcacccgtccctcgctcgccgcccacaccgccaacccggaggaataccggctacgcgcgcaggctgtgctgcgcgcccatgcagacggtgtcatccagccccgggtctggcggcgctacccgctggccgaggcggccgcggcgcataccgatctgctggagggacgctcgcaaggcgcgctggtactcttgccctga

SEQ ID NO: 355105 - DNA, 1083 bp, Pseudomonas aeruginosa
gtgaccgctaggccgcacctgcaacaggcgcggcatgctctgcaaaaacaagaatcgattaacaacctgcagaagaaccccatgaatgccttcatccgttacatgcttgtcgcaatgctgctcgtcctgtcgcagaaaagcttcgccttgatgtgctggaaatcggacaacaagcaaaccgaagattatgtctacatcgatacgagcatcgctgttccatcggtcctccccaaggacaccgtactctggcggtctccgaactactccatatcgatcacttgcttccaggatcgcgactgggggccagagcaggtctatttctacctgagtccaaccggtcagggcgcgctgggttcggacctggaggtgggcatcaacctgaacggcgaagacctgcgctgctcgacactcgacaagtgccgaaaggagatcggcatgcacttcgatggttgctggacgggacgaggttgcgaaggcagggcgaagaagatgaccgtcaacttcaacttctttctctccaagcgggcaggtcccagtaccggtaaggaaggtcctatcacaggggtaaacgcctacccgattttccagttcgatggcgagagcgctatcaataacataggggggtacaacttccgcatgaccctccacggcttgaataaccttcgctacgtcgcctgcgcgtccacaatcagcctttctccgaaaaccgtcgacttccaaagcctgcaggcctatttcgccagccgggaccagatcctcaaggaacttccgttcagcgtcaccgccaataagaactgcagcagcgcctatggcctgaacgcgatgttcctcccctccggcagcacctccctgtggggttcggacactcttttggataacaacaacaagtccgtgggaatccgacttctcaagcaggaagaccgcagcatcatcgatatcggcaaggagttcgtactggtgcccaatagccagaaccaattggtggtcataagaaacttcctcgcccaggtgaggtggatgacgggcactccaacgccaggccccttcaacgccaccgccgcgatagaggtctactacaagtga

SEQ ID NO: 355106 - DNA, 2175 bp, Pseudomonas aeruginosa
gtgaccttcgacgcggtgaaggacctgcaccaggagagccatgagaagagcaagggcgacctggcgtggcagtcgtcgaagggcaagggccagaccgacgaaaccgtgcgccagagccagatcgtggcccaggggaatctggcgatcaaggccgtggaagggctgaagatcgacctcaagcatatcgaccagaagaccgtgagccagaccatcgacgcgatggtgcaggcggatccgcaactggcgtggctgaaggaggccgagcagcgcggggatgtggactggcgcatggtgcaggaggtgcacgatagctggaagtacagcaactcggggctgggggctgcgccgtcactggccattgccatcgttgcggctgcttacctcggcccggtgtatggccctatggccagcaatcttgccgttggcaccatcaataacggtggcgaccttggcaaagggctgcaacacgccaccagctccagtgctctcaagagctacgccatcgcggcggccacggcttacttgaccaccgagtacttcgacaaggtgctggacaccaagaccaacgtcgataccagcaaggtcacggtggacctgagtaccgtcagcggtgccagtcgcttcgccgccaaccaggcgatgcagaacctcaccagcacggccttgggtaaggctatgggacagggtggcagcttcggcgatgccctcaaggacagtctctacaatacctttgctgccgccggcttcaacgccattggtgacttcggcaagacccacaagctggaaaccggaagcgcgcaaatggtggtgatgcatgcgctgatggggggcttggccgcccaagcgcgtggcgacagcttcgctgctggagcgattggtgcaggactcaacgaagcactggtgaaggacctggacaaactggtcagcagctactcgccggaaaatcgcgaggcgatgctggccatggcctcgcaactgacggggctggtcggggtagtcgcgaaggaccccggtgccagttacaaggagcttgaaacggggagttgggcggcgaggaattctgtccaatacaactacctaaaccacgaagaaaaccaggaacgcttcgaggccaagaaggcatgtaacggcggagactcaaccgcttgtggccgcgtcgatgaattaaaccaactcgaccggagtcgcgatctggcactacttacggcctgttcttcggacggtagtagcacgacatgtacagcgctgcgtaaagaggcttgggaatctgcccagagtttgaaacaggccagttggactccagaagcacaagagcagtaccggcaagccatgcagaacccgcaactgatggcatacaccattgagggcgagctgcgcagcatctaccagatcaacgacccgataacggcagctgattccaagcggctggccgaggcgatggccagcttgggttctgacttcatcccaggttatggcgatggcaaggcgtttgtcgaagcgcaagaccccttcgactatacgatggccggaataggcttggtgccgggcattggggatggcgctgcgaagatcctggccaaggcgaaggcactttacaaggaaggtaaagtatccgaggctgctgatttggtcgagggactgggtaagctgccggctccgcaagggccaaaaggaactggaacggcgctgcgtgaagtagaagttagctctggcagcaaagggtcatggactaaggaactcaacaaaccagagccgaacacgatttataaagtggacgggaacaagacctatcagacagatagtcttgggcgtgttgagaaggttgagtccaacctctcgctgacgaagagtgaccggaatacttatcagcagtgcattgctggtaaatgcggggttagtggcgatgaaggtggccatctgattgcaagtatcttcaatgggccaggtgagaagctgaacctgcttcccatgaatgggaacttgaataaaggtgcctggaagtccatggagaacacttggtcatctgcgctcaagcaagggcagatggtcagtgtgaaaattgagcctgtctattctggctcatctgtgcgtcctgatagatttactgtcagatactctattgatggtggtcgccctgtcattgtcgatttcaaaaactcaccgggtggtatttga

SEQ ID NO: 355107 - DNA, 792 bp, Pseudomonas aeruginosa
atgaagcttatccttgatttcgacggacgccttctaaatccaagcaacatgctagaggccctatcaaaagcaggaaagaatacaaccatcagcataagcaacgcgcaagcattaaatatagacactcttctcaaggcaacaaccactgcagaaaacacaaaaaacctctcaacaactttcaacggcgcagagctgactgctaacaaccttcaggaagtcataaacttagcaggatcattaaccagagtatccacaatagccgcacaagccattaatataaacacacttctttccgcaatatctacagcaggcaactcaaagagttttagcgcagaattcaatggagcccaactcagcagcgacaacctacttagagcagtaaatgcggcaggcacaaacactagcataagcgtcaacaccgcacaagcgacaaatataaccgcccttcttcagactattcatgcagcaggtaacacaaaaacattcagcgcagagttcaatggcgctcaactcacttcaaacaacatccagcaggcgctgcgagcggcaggatcaaacacatcaatcagtatgaactccgcacaatccgccaaccaaagcactctacttgaacttctagacatagcaagttccagcaagcaattccaagccaattacaacggcggcatgtctaatccgagcaacctacaacagatagtttctcgtgcaggcgctagtgcaaccgtgtttatttccgacgcacaaggcctaccaatcgcaaatatccttacccttatatcatctgccggatga

SEQ ID NO: 355108 - DNA, 681 bp, Pseudomonas aeruginosa; identical to SEQ ID NO: 351926

SEQ ID NO: 355109 - DNA, 816 bp, Pseudomonas aeruginosa
atgaatcgcaaccgtcgcaacgccctggtcgccggcagcctcctgctgctggcggcgaacctggccgccctcggtggcgtcgcctggaaccggtccggcgaggccgaaagcaagctggtgctcagccagcgcgagctccagcgcaactggtcctacggtttctggagcgaagagaacagtggcgtcgaactgcgcctggagcttcgctcgccgagcagcgagccgcccagtgacctcgctcccccgctgccgcccgagcagatgcgcgccctcggtttcagcatcccggacgcgctcgacgaagagagcgtacggcgctaccgccgccaacaggaaaaacaggtgctactggtcctggagctcgacggcccggcctatcgccgcgaagtacgcctggccgaggagcgcctggccgaggccagcgcccgtagcaaggccctgcccaaggacgaaatgctgtccagccagatggaagccgctcgccaccaactgaagcatgagcagggagaggccagccgactgttcatcgtcgacgccggcctcgacctggccgccctgcgccagcgctaccccgagcgccagcgctacgccatcgtcaagggccgggtgcgtccctggtccgcggtcgacggaggcaggacgctggtcggcggctacatcagccgtaccgacctcgccgcgatcaacgtgccacgacaatggcacgcggtattcgccaaggtcgacggacaaaactaccggctagcgccgctggaactgcacctcagcttcggccagcgcctggagccctggatcaccaacgccgttcgccgctga

SEQ ID NO: 355110 - DNA, 1077 bp, Pseudomonas aeruginosa
atgcaacccatcgaccgcgcccaggcacagcagcgcgccaacgacatcctggtgtttcagcgcgagctgcaacgcctcgaccaggagcaggcgttccgcctcgaaccggcccaggcccggcaactcgccgactatcacctggccctgctggacagctaccgcgaccgtttcgacatcgaccacgacctgcgcagccagcaactttcgctgggcatgcgggtagcctcgttcttcggcgccctggccttcgccgccagcgtgttcctgctgttctatcgcttctggggcctgttccccaccgtcgcccaggtggcgatcctgatcggcagcgccttcgccgcgttcttcgccacgctctgggtccaggccaaggacgcctcgggctacttcagcaagctggcggcgatggtcgcgttcgcctgcttcgtcctcgacctgaccatgctcgggcagatattcaacgtcacccccagcgacctggcgctggtgccctgggcgctctacgccctgctcctggcctacctgtgcaacgcccgcctgctgctggcggcggcgatcctctgcgtgatgggtttcatcgccgcgcgcgtcggcacctggggcggcggctactggctgagcgtaggcgagcgaccggagaacttcttccccgccgccgcgctgatcttcgccgtgccgctgtgcttcgagcagcgcaacttcagcggcttcgccgtgatctaccgggtgttcgccctgctcggcctgttcctgccgatgctggtgctggccaactggggctcaggcagctacctggcgttaccgtcggcgctcatcgaggggctctaccaggtcgccggcttcgtcgccgccgccctggtgatctggctcggcgcgcgacgcaactgggcggacgtgagcaataccgggatcaccttcttcgtcatcttcctctacaccaagttcttcgactggtggtgggaagcgatgccgaagtacctgttcttcctggtgctcggcctcagcgccctgctgatcctgctggtcctgcgccgcctgcgcacgcccctgggcatcgccgcgaggactgacgcatga

SEQ ID NO: 355111 - DNA, 174 bp, Pseudomonas aeruginosa
atggtcatgcgattgttcgggctgctactggcggccttcctgatgagcggttgcagcgttcgggtgccgggcgcgtacgtcgaactggatccgttcgacgatggctactacggctacgatcgcggcggcccgccccattgtcctccgggccacgccaagaaaggctggtgctga

SEQ ID NO: 355112 - DNA, 726 bp, Pseudomonas aeruginosa
gtggagcaagccccggccactaccagcgaggctgccagcgaaaccacggcaagcgatgagaccgacgcgtcgaccagcgaagccgtcgaaacccaggacgcggacagcgaggccaataccggcgaaaccgccgacatcgaagcgccggtgaccgtcagcgtggtccgggacgaagccgaccagagcaccctgctggtcgcgcaagccactgaagaagctcccttcgccagcgaaagcgtggaaagccgcgaagacgccgagagcgccgtgcaaccggcaacggaagcggccgaagaagttgccgccccggtgcccgtcgaagcagcagcccctagcgagcccgcaaccaccgaggagccgaccccggccatcgcggcggtgccggccaacgcgaccggccgtgccctcaacgacccacgggaaaaacgtcgcctgcaacgcgaagccgagcgtctggcacgcgaagccgcagcagcagccgaagcggcagctcaggccgctcccgccgtcgaggaggtcccggctgtagcgagcgaggaagcgtcggcccaggaggaacctgctgtaccccaggctgaagaaatcgcccaggccgacgttccgtcccaggcggacgaagcccaggaagcggtacaggccgagcctgaagcttccggcgaagacgccgccgacacggagcacgcgaaaaagaccgaggaaagcgaaacctcgcgcccgcatgcctga

SEQ ID NO: 355113 - DNA, 1020 bp, Pseudomonas aeruginosa
gtgagcctggaactgcaagagcattgctcgctgaagtcctataacaccttcggcatcgacgtgcgcgcccgcctgctggcccacgcccgggacgaggctgatgtgcgcgaggccctggccctggctcgggagcgtggattgccgctgctggtgatcggtggtggcagcaacctgctgctgacccgtgacgtcgaggcgctggttttgcgcatggccagccaggggcggcgaattgtttccgatgccgcggattcggtgctggtcgaggcggaggcgggcgaggcctgggacccattcgtgcaatggagcctggaacggggcctggccggtctggaaaatctcagcctgattcccggcaccgtgggtgcggcgccgatgcagaacatcggcgcctatggcgtggagctgaaggacgtcttcgacagtctgacggcgctggatcgccaggatggaaccctgcgtgagttcgatcgccaggcctgccgtttcggctaccgcgatagcctgttcaagcaggagccggatcgctggctgatcctccgcgtgcgcctgcgcctgacgcggcgggagaggctgcacctggactacgggccggtacgccagcgcctggaggaggagggcatcgccagtccgacggccagggacgtaagccgggtaatctgcgccattcgccgggagaagctgcccgaccccgccgtattgggcaatgccggcagcttcttcaagaacccgctggtggatgcggcgcaggccgaacgcttgcgtcaggccttcccggatctggtcggctatccgcaggcggacggtcggctgaagctggctgcaggctggctcatcgacaagggcggctggaagggtttccgcgatggcccggtgggggtacacgcgcagcaggcgctggtcctggtcaaccatggcggtgccaccggtgcccaggtccgggcattggcggagcgtatccaggaggacgtccgtcggcgtttcggcgtcgaattggagcctgaacccaatctctactga

SEQ ID NO: 355114 - DNA, 720 bp, Pseudomonas aeruginosa
gtgcgtgagggcgccgagtacaagtacgtcacccttggcgagcgcggcgagcagatcatcctggctacctacggagagctgttcagcatcacccgtcaggcgatcatcaacgacgacctgcagatgctctcggatatcccgttcaagctgggccaggcggccaaggccaccatcggcgacctggtctatgcggttctgaccggtaacccggcgatgagcgatggcaaggctctgttccatgccgaccacagcaacctgctcactggcgcggcttcggcgctttccatcgacagcctgagcaaggccaagacccagatggccacccagaaagcccaggtagagaagggcaaggggcgcaccctcaacatccgtccgggcttcgttctgactccggtggcactcgaggacaaggccaaccagatcatcaactccgagtccgtgccgggcgccgacgtcaatagcggcatcgttaacccgattcgcgcattcgcacaggtgatcggcgagccgcgcctggacgatgcctcggcgaccgcctggtacatggctgccaagaaaggctctgacaccatcgaggtggcctacctggacggcgtcgatactccgtacctggagcaacaggaaggcttcactgtcgacggcgtggccagcaaggtccgcatcgacgccggcgtggcgccgctggacttccgtggcctgcagaaatccaacggcgcctga

SEQ ID NO: 355115 - DNA, 318 bp, Pseudomonas aeruginosa
atggcgaagaactatgtggaggacggcaacgtcctgactctcatcgcgcctgctggcggcgttcaatctggcgtgccggcggtgatcggagacctggtggtggtgccgctggtagatgccgccgcgggcgagccgttcgccggaaaaactggcggcgtctggagcctgcctgctgccgctggcctgacccagggtgccaagtgcagcgtgctcgatggggaactggtagctgctgccactgccgactcggtggcgttcggcaagatcaccgagcccaccgttgacggcttcgcgtcggcgatgctgatccaacaatga

SEQ ID NO: 355116 - DNA, 330 bp, Pseudomonas aeruginosa
atgagcgcgccgggccgttttggccggctgatccaacggctccacgagcgtgggcaagagcggttatctgatgccgtgggagagttccgcggcatcggtcgccccccgatcaaggggataccgctgcaggtcgaccgaaacctgagctacgacgggcctgatggggttttcatcacggacaaggttgggatcagttggctggcgaaggatgttcccacggcatcacgtggtgacctcttcgttatcgggtcgtcgcgctatctcgtcgaaaagctcattgcgaacgacggttggttgctgacggcagcaacgatcgaggaggaagcatga

SEQ ID NO: 355117 - DNA, 1317 bp, Pseudomonas aeruginosa
atgaatacttattttgatattccgcatcggctagtgggaaaggctctgtatgaatcatattatgatcattttggccaaatggatatattgtcagatggaagtttgtacctaatatataggcgggcaacagagcatgtaggtggtagtgatgggcgtgttgttttcagtaaactggagggtggtatttggagtgcgcctaccatagttgcccaggcgggaggacaggattttcgagatgtagctggtgggacgatgcctagcggaaggatcgtcgcggcctcgacggtttatgaaacaggagaggtgaaggtctatgtatctgatgattcaggtgtgacatgggtacataaattcacattggctagaggtggggcggattataattttgctcatggaaaaagttttcaagtaggggcacgctatgtgattcctctttacgcggcgacgggagtcaattatgaactgaaatggctagagtcttctgatggcggagaaacttggggcgaaggaagcacgatctacagcgggaacacaccatacaatgagacttcttaccttcctgtgggagatggcgtaattctggctgtagccagagtaggatctggtgccggaggagcgttacgtcagtttataagtctggacgacggcggcacatggactgatcagggtaatgtgactgcacaaaatggtgactctaccgatattctcgtagccccttctctctcctatatttactctgagggaggtacaccacatgtagttcttttgtacacgaacagaacgactcatttttgttattacagaacaatcctgctggcgaaagccgtagcaggctcctccggctggacggagcgtgttcctgtgtatagtgcgccagccgcctccggttatactagtcaagtcgttttgggaggtcgaagaatactgggtaatctattcagggagacgtcttctacgacgtcgggagcttatcagtttgaagtgtatctgggaggagtcccggattttgagtcagactggttttctgtttcttcaaatagtttgtataccctgagtcatggactccagaggtcgccgcgtcgggtggtcgttgagtttgcaaggtcatcgagtccatcaacatggaacattgtcatgcccagttatttcaatgatggagggcataaaggcagtggggctcaggttgaagtgggtagcttgaatattcggcttggaactggagcggcagtatggggcacgggatatttcggaggaatcgacaatagtgccacgactcgattcgctaccgggtattatcgggtcagagcatggatttag

SEQ ID NO: 355118 - DNA, 939 bp, Pseudomonas aeruginosa
atgaccagcctcaacctccgccgcctggcagcggcggccgccaccttcagcctctcgttcacggccgcggccgcgatcaacagcgccgccatcgtctcctccaccctttcccctcagtgcctcgaatacaaggtcgtcgggatctgttactggctgctctgcggcccgcatggctgcaaagtgaagacgtcggtcaaggtccgccactacgtgcctgacgcagtcgtctccagctatgcgaataccgggagcaacccctggaccgaggtgtcggcgctgggtacaccgaatccactcgcccaggccggcaatgacgcgaccaccaactacaaggccgagaacacgctcggccgcttcaaggaagcggatgtgatcggccatcctggcggggccacgttcagccggttcgccagcgcctctgggtacgtttgtcctggcgccacctttccgctggtgccctacttcctcagcacactggacgccattggctggcggcatggaattcccgagcaggtgtaccccgaagcgttggttccagggctgcgcgaggtgggtggaatcttctccggcgacatgtgggggaacctctatccgcgcagcggattcctgcaccagaccgacgactacaagacggcagccgtcatcgcccagcgcgccggcgatatcaccacgcgaatcggccagctccacgtctacctccccatgcgcgcagcccccaaggacggctactggccggcgggcgagctgaaagagggcgatgcctcgaccgggaaatggcaggagctgaccccatccctgagcctcaactgcgcggtgtttcccaactctgggccgaagacgcaagccgtcgacggcgattacgcctgggcgctctggcgtccctactcctgctgccagcgcaaggggcaaatcttcctcggcagtatcgacttccaataa

SEQ ID NO: 355119 - DNA, 1473 bp, Pseudomonas aeruginosa
atgtggcgcgaaaccaaactcttgctgattgacgacaatctcgatcgcagtcgcgacctggcagtcattctcaacttcctcggcgaagatcagctgacctgcaacagcgaggattggcgagaggtagcggcgggcctgagcaacagtcgcgaagccctgtgcgtgctgctcggcagcgtcgagtcgaagggcggggcggtagagttgctgaagcaactggccagttgggacgagtacctgccgatcctgctgatcggcgagccggccccggccgactggccggaagagctgcgccgccgggtgctcgccagcctggagatgccgcccagctacaacaagctgctcgactccctgcatcgcgcccaggtctaccgcgagatgtacgaccaggcccgcgagcgcggccgttcccgcgagccgaacctgttccgcagcctggtcggcaccagccgggcgatccagcaggtgcggcagatgatgcagcaggtcgccgataccgatgccagcgtgctgatcctcggcgagtccggcaccggcaaggaagtggtggcgcgcaacctgcattaccattccaagcgccgcgaggggcccttcgtcccggtgaactgcggggcgatcccggcggaactgctggaaagcgaattgttcggccacgagaagggcgccttcaccggtgccatcaccagtcgtgccggacgtttcgagctggccaacggcggcaccctgttcctcgacgagatcggcgacatgccgctgccgatgcaggtcaagctgctgcgcgtgctgcaggagcgcaccttcgaaagggttggcagcaacaagacgcagaacgtcgacgtgcggatcatcgccgcgacccacaagaacctcgagaagatgatcgaggacggcactttccgcgaagacctctactaccgcctcaacgtattccccatcgagatggcgccgctgcgcgagcgggtggaagacatcgccctgctgctcaacgaactgatctcgcggatggagcatgagaagcgcgggtcgatccgcttcaactcggcggcaatcatgtcgctctgccgccacgactggccgggcaacgtccgcgaactggcgaacctggtggagcgcctggcgatcatgcatccctacggggtgatcggggtcggcgaactgccgaagaaattccgccatgtcgacgacgaggacgagcaactcgccagcagcctgcgcgaagagctggaagagcgcgcggcgatcaacgccgggctgccgggaatggacgcgccggcgatgctgccggccgaaggcctggacctcaaggactacctggccaacctcgagcagggcctgatccagcaggccctcgacgacgccggcggagtggtcgcgcgggccgccgaacgcctgcgcatccgtcgcaccacgctggtggagaagatgcgcaagtacggcatgagccggcgcgacgacgacctgtcggatgattga

SEQ ID NO: 355120 - DNA, 651 bp, Pseudomonas aeruginosa
atgcgagtcatagactacccctcctacttgcagttgcgtgacaacgcagaagtgctggaagccgatggtcatggggacaaggttctgcgtctgcgcgacgggtccttcctcaaactgtttcgccgcaagcgcctgatttcctccgcagccctgttcccctatgcggagcgcttcgcccgcaacgccagcgaactggcgcggcgcggcatcgtctgcccgaaggtgctggacgtattgcggatcccacatatccagcgcgacgcggtgcactacgagccgctaccggggcagaccctccgccaactcgaccgcaacgacccggagtgcggcgacgcagtccggacgcaactgggcgagctgatcgccgtgctgcacgccaagggggtgtacttccgctcgctgcacctgggcaacgtggtgcgcacgccggaaggccggatgggcctgatcgacatcgctgacctgcgggtccagcgctcggcgctcagcgccgcccagcgcattcgcaatttcaagcacctgctgcgctacgaacaggatcgaacctggttcctcgacgacagcgagcacctggtgctcaaggcctatctccgcagcagccaggtccactggacactcgagcagctcctcaagcaactgcaactggattga

SEQ ID NO: 355121 - DNA, 1563 bp, Pseudomonas aeruginosa
atggtcttttcttcaaacgtgttcctgttcctgttcctgccggtctttctcggcctgtactacctgagcggcgaacgttaccggaacctgctgctgctgatcgccagctacgtgttctacgcctggtggcgggtggacttcctcctgctgttcgccggggtcaccgtcttcaactactggatcggcctgcgcatcggcgccgccggcgtacgcaccagggccgcgcaacgctggctgatcctcggcgtggtggtcgacctctgcgtgctcgggtacttcaagtacgccaacttcggcgtcgacagcctcaacgagatcatcacctcgttcggcatgcagccgttcgtgctgacccacatcctgctgccgatcggcatctccttctacaccttcgagtcgatcagctacatcatcgacgtctaccgcggcgataccccggcgacccacaacctgatcgacttcgccgccttcgtcgcgatcttcccgcacctgatcgccggcccggtgctgcgcttcaaggacctggtcgaccagttcaaccaccgcacccacaccgtcgacaagttcgccgaaggctgcacccgcttcatgcagggcttcgtcaagaaggtgttcatcgccgacaccctggccgccctcgccgaccactgcttcgccctgcagaacccgaccaccggcgacgcctggctcggcgccctggcctacaccgcgcagctctacttcgacttctccggctacagcgacatggccatcggcctcggcctgatgatgggcttccgcttcatggagaacttcaaccagccctacatcagccagtcgatcaccgagttctggcggcgctggcacatcagcctgtcgacctggctgcgcgactacctctacatcagcctgggcggcaaccgcggcagcaccttccagacctaccgcaacctgttcctgaccatgctcctcggcggcctgtggcacggcgccaacttcacctacatcatctggggcgcctggcacggcatgtggctggcgatcgagcgggccctcggagtgaacgccgcgccgcgcgtgctcaacccgttgaagtgggcgttcaccttcctcctggtggtgatcggctgggtgatcttccgcgccgagaacctgcaggtcgcctggcgcatgtacgaagccatgttcagcttcggcacctggcagctctccgaactgaaccgcgccagcctcaccggcctgcaggtcggcaccctggtcctggcctacctggtgctggcgttcttcggcctgcgccagttctacaaccagccattgcagaccaaggcgcccaaggccgcggcgaacagcgacgaagtggccgccgacggcccggccagtgcccagccgcgcgccccgcgcgaggccgccggcgacccggcggcgatcgcctactcgccgagcggcgcgctggtctaccagccgagctggctcagccagttgcccgtcctggccacccgcctggcgctgctcctgctgttcgccgcctcggtgctgaagctctccgcgcagagctactcgccattcctctacttccagttctga

SEQ ID NO: 355122 - DNA, 879 bp, Pseudomonas aeruginosa
gtgccgaccctatcacgccgcctgctctggccgctggccatccttttactggttctcggccgcccgctcgcggccgccgacctctactacctcggccagcgcatcccggacatccagaagccctgggacagccacgactaccaggtgctgatcgacgccctgaagaagatcgaggaaacccagaagaacgccctgccgcgacgcagcggcgaattcaccgggccgctctacctgcgcatggtcagcgaggaaaacttccgcccgcagctgaatatctacagccccttggagatccgccagaacgaggcccgcgaagtgctgttcaagctcaaggagctgatgcgcctgtacttcgacttccgcgccgccaagcagccctacggcgccgaggcgctgggcctgatgagctactcgctgcgcgagcagtcgatcctgttcaccctcaccgtcgaattctggatgaccctgtcccaggccgaacagcgcaaccccgcgcgtctgcagggcatgcaggaaaccaaggcggccgcggcgatgctcaccggcagcgccctcgactacctcggcctcaccgcccagttcgagcgccaggacctggtgctctactccgccgagctggccaaggaaatgcccgagctgttcatccacctgccctccccggtgcgcgcccagttgctggaacgcatcgccgatttcgccaaggaccacccttatcccgaggtccgcgacaacatgcgcgacctgcaaccggtgttgcaggcgatccaggccgacgtggaaaaacagctggcgcccgggcggaacgccaaggcaccggacaaacccctggacctgagcccgcctccggaggggaaacccagcggcgtcaaaggtttatga

SEQ ID NO: 355123 - DNA, 1116 bp, Pseudomonas aeruginosa
atgccttttctgagcgacatgctcgaccagtcccgccggcagcaggacgaggaacaggccctggcgcgggagaatcttgccgaggcaagtctgctccaggcccacctgagtcaccgcagcgccctgcacagccgtttccgtttcgacccggcggcggtgatggactgcctgcgcgccgaggtgctcggccaggatcaggcgctacaggccgttgaggacatgctcaaggtggttcgcgcggacatcgccgacccgcgccgtccgctgttcagcgcgctgttcctcggccccaccggggtcggcaagaccgagatcgtgcgcgccctggccagggccctgcacggcgacgccgaggggttctgccgggtggacatgaataccctgtcccaggagcactatgccgccgccctcaccggtgcgccgccgggctacgtcggggcgaaggagggcaccaccctgttggagcaggacaagctggacggcagtcccgggcgccccggcatcgttctcttcgacgaactggagaaggccagcccggaagtggtccatgcgctgctcaacgtgctcgacaacggcctgctgcgggtcgcttccggcgagcgcacctaccatttccgcaacaccctggtgttcatgaccagcaatctctgcgcccatgagatccagcgctacgacgagcgtcgccaacgcctgccctggcgcctgctgccggtcggcggcgaacgccggcggcgggacatcgacgggatggtccgggcccggctgctgaagaccttctcgccggagttcgtcaatcgtctcgatagcgtggtcaccttcaactggatcgaacgcaacgtcgtcgcgcgcctggtcgagttggaggtgcagcggctcaaccggcgcctggagaagcatcgctgccgcctggaggcgaccccggaggtgctggcgaagatcgcccgcgccggcttcgaccggcagttcggcgcccgtgcgttgcgccgcagtgtccgtcatcatctcgaggtaccgctggccgagcatctgctcgaccaccaccagccgggcgacgggaactgcacgatctacctggcgagcctggagcacgagcgggttcgcttcgtgcggcgctga

SEQ ID NO: 355124 - DNA, 939 bp, Pseudomonas aeruginosa
gtggcgctcaccggcagcaccaccgacggcctggcggcgatctacggcggcctgctggtgcagccgggcaaggagatcctgacctcctcccacgagcactactccacctacaccaccctggaataccggcacaagcgcatgggtacccaggtccgcgagttcccgctgttcaaggacccgcatcgggtttccgccgacgagatcctgtccagcatcgccgctcagatccgcccgcagacccgggtgctgggcatgacctgggtgcagtcgggcagcggcgtgaagctgccgatccgcgagatcggcaagctggtgcgcgaactcaaccagaagcgcgacgaacaggaccggatcatctacgtggtcgacggcgtgcatggtttcggcgtggaagacgtcagcttcgccgacttcgactgcgactacttcatcgccggcacccacaagtggctgttcggtccgcgtggcaccggggtcatcatcgcccgctcggaacagctccaggagcacctggtgccgagcatcccgaccttctcccgcgccgacaacttcggcaccctgatgacccctggcggctaccacgccttcgaacatcgcctggccctgggcacggccttcgagctgcacctgcagttgggcaaggccgaggtccaggcgcgtatccaccagctcaacgcctacctcaagcagcgcctgggcgagcatcccaaggtccgcctggtcacgccgaccagccccgagctgtcttcgggcttcaccttcttccgcgtcgaaggccgcgattgcgaggcggtcgccaaacacctgatggcgcaccgggtaatcagcgacgccgtggatcgcgatgtcggcccggtggtgcgcctggcgccgagcctgctgaacgacgaggcggagatcgaccgggtgctggaaatcctcgccccgcaactcgcctga

SEQ ID NO: 355125 - DNA, 1251 bp, Pseudomonas aeruginosa; identical to SEQ ID NO: 328572

SEQ ID NO: 355126 - DNA, 1314 bp, Pseudomonas aeruginosa
atgactcatttgaaagggttcgacctgctcgcccttggcttcatgacgttcgcgctttttctcggcgcgggtaacatcatctttcctcccagtgccggcatggcggcgggcgaacacgtatggagcgcggctttcggcttcctccttaccggtgtcggcctgccgttgctgacggtggtcgccctggcccgggtcggaggcggtattggccgcctgacccagccgatcgggcggcgcgcgggagtggcgttcgccatcgccgtctatcttgccatcggcccgctgttcgccaccccgcgtacagccgtggtgtccttcgagatgggcgtcgcgcctttcaccggggacggcggcgcgccgttgctcgtctataccgtcgcttacttctccgtggttctgttcctggtgctgaacccgggtcgccttgtcgaccgggtcggaaaggtcatcacgccggtgctgctgtcggccctgctggtccttggcggcgcggcgatcttcgcgccggcgggagagatcggcagcagttccggcgagtaccagagcgcgcccctggtgcagggcttcctgcagggctacctgaccatggataccctcggtgccctggtcttcggtatcgtcatcgccaccgccattcgcgaccgcggcatcagcgacagccggctggtcacgcgctattccatgatcgccggggtcatcgccgccaccggcctgtccctggtctacctggcgctgttctatcttggcgccaccagccagggcatcgccggcgacgcccagaatggcgtacagatcctcaccgcctatgtgcagcagacctttggcgtttccggcagcctgttgctggcggtggtcatcaccctggcctgcctgaccacggcggtagggctgatcacggcgtgcggcgagttcttcagcgacctgctgccggtttcgtacaagacggtggtgatcgtgttctcgctgttcagcctgctggtcgccaaccagggactgacccagttgatcagcctttcggtaccggttctggtgggactctatccgctcgccatcgtgctgatcgccctgagcctgttcgaccggctctgggtgtcggccccgcgggtgttcgtgccggtgatgatcgtcgcgctgctcttcggcatcgtcgacgggctgggggcggccaagctgaacgggtgggtgccggacgtcttcgccaagctcccgctcgccgatcagagccttggctggctgctgccggtatccattgcgctggtcctggcagtcgtttgcgatcggctgctgggcaagccgcgcgaagcggtcgcctga

SEQ ID NO: 355127 - DNA, 333 bp, Pseudomonas aeruginosa
gtgttcacccttcccgccaacacccggttcggcgtcaccgccttcgccaactcggccggaacccagacggtgaacgtgcaggtcaacaacgaaaccgtcgcgaccttcaccgggcaaagcaccaacaacggcatcatcggcagcaaggtgctcaactcgggcggcggcggcaaggtgcagatcctggtcagcgtcaatggccgctcttcggatctggtttcggcgcaggtgatcctggccaatgagctgaacttcgccctggtcggctctgaagacagcaccgacaacgactacaacgacgccgtggtggtgatcaactggccgctcggctag

SEQ ID NO: 355128 - DNA, 288 bp, Pseudomonas aeruginosa
ttgtgcaggccccacatcatcaatagcaggatcagcgagaagggcagggaggtcagcaccaccgccgacttcagcgcgtcgatgctgccggcgaacagcagcccgccggtgaccagcgcggtgaccgagccccagaacacccgcagccacttcggtccgtcgtcgtcggcgctgccgccgtgggcggagagggtggagaggaccacggtgccggagtccgccgaggtgacgaagaagacgaagctgaccagcaccgtgacggtgatcaccgcgcggctccaggggtag

SEQ ID NO: 355129 - DNA, 903 bp, Pseudomonas aeruginosa
atgaggccggaaacagccatcatcgagatccacgggcaatacaggattcacaccgagttctacggcaaccccgcggcgcagcagaccatcatcctggtcaacggctcgctgtcgaccacagcgtccttcgcccagaccgtgaagtacctgcagccgcattacaacgtggtgctctacgaccagccgtatgccggccagtccaaaccccataacgaaaaccacacgccgatcagcaaggaatgcgaggccaggatcctgctggaactgatcgaacgcttccgcgccgacgtggtgatgtcgttctcgtggggcggcgtcgccaccctgctggccctggcgcagcgtcccggacggatccgcagggcggtggtcaactcattctcgcctcagctcaacccggccatgctcgactacctgcatcgcggcctcgactacctcgccgcctgcgatcgcacccaggtcggcaacctggtcaacgaaaccatcggccgctacctgccgcagttgttcaagcgctacaacttccgccacgtcagcagcctggacgagcacgaataccaccagatgcacttccatatccgcgaagtgctgcgcctgaacgccgatagctataccgagagcttcgccggcatcgagatcccggtgctgttcatgaacggcgagctggacatctacaccacgccccacgaagcccgccagttcggccaactgatccgcggcgcggaattccacaccatccgcaatgccggccacttcatcgacgtcgagcacaaggccgcctggcagcagacccaggacgccctgctggccttcctccgcccgcagcgtacgcagccgctcaacccgatctaccgcccccagcccaacggcgccagcgtccccctcgccgccctcgccagctaa

SEQ ID NO: 355130 - DNA, 1014 bp, Pseudomonas aeruginosa
atgcccctgttgaattccctgactgtattgccgttgcctggcgggcagcgtttgagtggcgacgaaaccgatagccggctcagccttgccctggatggtgcgttgctgttgcgcctgcgcctggagcgcacagacacggaaatacggctggcggtggaggggcttcccggcggcgatgccgagcatgcgttgtgggccgccagctactggctgttcgcccgcgatccggattgccagcggctcgtctggtcgctgtcctgggaacccgaagagtccctggcgaaggggatgctgacaggagccgccgcagcgggcacctatgtctgcgaaaggggccggttctggcagttgccatggccctggctgccgcttgcccagccgtgctatccccagtcgatgcaacttaccgatggaaagcgtcatccgctgcgccggccgaagcccaggggagaggtctaccggcgcttcgatgcgcgattgggatgctggatatccttgcgtaccctggacatcgagagggacctggagcgttttcatcgctggcagaactcgcccagggtggcggagttctggcaggaggatggaagcctggaacaacatcgcgagcgtttgcgccagctcgaggcggatcctcatgcactggggctcatcggctgtttcgacgatgagcccttcgcctatttcgaggcctactgggcgaaggaggatcgcatcgcgccgttctacgtggccgaagactacgaccgcgggatccacatgctggtcggcgaggaggcccaccggggtccgcacaaggtcgcctgctggctatcggcactggtccactacctgtttctcgacgacccgcgctcgcagcgagtggtggcggaaccgcgcgcagataacgcgcggatgatcggtcacatgcacaacctgtgcttccactgcgagaaggagttcgactttccgcacaagcgggcggcgctgatgatcatcggccgcgaacggttcttcgagcgctgtcgtctggcctga

SEQ ID NO: 355131 - DNA, 699 bp, Pseudomonas aeruginosa
ttgcagttgcagacgagcctgggccagggcattgcgcgcctggcgcaggcgcaggttgtcctcgccggccgtgccgcgtcgcgcggtcagctcgccgatccgcgcctgggccgcggcgacccgggcacgggcggcctgggcctgggcgctgacctgctcgtgcatctgctgcgacacatggtggcgctgcaccagttgggcggtgcggcgcgcctcgctgtccagctcgccggcgctgctgcgcgcggccaggaggtcggccttggccgaggcgatggcggcatccagctcgcggttggtgcgctcggcttcctccagtgccagttcggcctggcgcacggccagttggaacggctcgggatcgaggcggaacaacacttcgccgggctgcacgtggccgttgttggacaccagcacctcggcgacctgaccgctgacacgcggcgcgacgcgcaccaccggccgggtcaactgggcctgcggggtgagcggcatccacaggtcggcgaccaggaagtagacgaacagcaacacgaataccgcgatagcgacttgaacccaacgggcaaatcgttgatcgggagtcatagggtacgagcctcgaatccagcgggaatgcagtcgccgcagcggggcctgaatgcgggggttggcgcggccgggatggaaccggcgacccggacgacggccagtgggtag

SEQ ID NO: 355132 - DNA, 1275 bp, Pseudomonas aeruginosa
atgaggtttctttttctgctgccgctgctgtgggtgcaagtttcctcggcctgggcagaggactattactggacggtgccgtatcccgacggcaaggtgaagtatcaaagcgctgtagcggcctgtagcgccaataaccagttctacatagacagggacagcggcaaatacacgcgctttgacaaaaagaacgtcgttatcgattcgggtcactggagttgcgggatcgttgcctatgctctgaactcgaaaggggtcgagtatgttgcgtccaatttcagcaacgttgctaatcgcaaaggcgactcttgtccagccggcaccgaatacaacgaagcgaccggctcgtgtgacaagccttgcgaagtgggcgacctgttcccagccaagggcccagactcgccggtagtcacctcgggtggtcgtaactatgtcggtgacggcggcgctccgactgcctgttatcagagctgcgagtacggcggcaatcccagcccggctagctgctatttcgttaaaggctccactacgacaggcttctgcaactacatcctcaagggcaccggccaaagctgcggtgccgattcctacaccttctcccaaaccggcgattcgctgaatccgcccgacaccccgaacaccgatccctccgacccgaacgatccaggctgtccgcccggctggtcgtggtcggggactacctgcgtcaagaccccgaccgatcccacggatccaaccgacccgaccacgccgggcggcgacggcggcggcgatggcaatggcggtggaaacaacaacggcggcggcaatgacggtggcaccggcaatggcggcgacggcagcgggggaggggacggcaacggcgggggcgatggtagcggcgacggtgacggcagcggcacgggcggcgatggcaacggcacctgcgacccggcgaaagagaactgctccaccggccccgaaggccccggcggcgaactcaaggaacccacgcccggcacctgggatgacgccatcgccacctgggaaaagaaggtcgaggaagccaagaaagaactcaagaccaaggtgaaagccaacgtcgaccagatgaagggtgccttcgacctcaacctggcggaaggcggcgggcaactgccctgcgagcccatgaccatttggggcaagtcctactccctctgtatctccgactacgccggccaactctccagcctgcgcgtggcgctgctgctaatggccgcgctgatcgccgccctcattctgctgaaggactga

SEQ ID NO: 355133 - DNA, 234 bp, Pseudomonas aeruginosa
atgggcgtcggggtgtgggcggaaatgctgcgccaggacaagaccccggaatacctgctgcaagacctctaccagatggagctgcagcgcatcaccctcaacatgcagatcagcttgatccactccatcggcaagcaggccgccgagtgtgcggaaaagatgggccaggccgaggccgagttcatgggccgactgcagcagagtcagacccgccctggttccgtgggcatgtag

SEQ ID NO: 355134 - DNA, 195 bp, Pseudomonas aeruginosa; identical to SEQ ID NO: 344396

SEQ ID NO: 355135 - DNA, 957 bp, Pseudomonas aeruginosa
gtgagtgtgaacccgatcattcaggctcagttcgtcgacctttacctcggtgaaggcttcgccgacgtgaagggcctggccggcgtcggcgcgcgccgagtcgaggtgcctcgcgagtgggagtcgcacgcccaggaactgctccagctctgcaggcaaacgctggaggagctgcaggatcccgagttcgccatcgtcgtcgacggtgtgctgctgcgcgtcacccaactggaagatgctttcaacggcgggagtgtcttcgtgctgcgccggtcgacagcccaagttcgaagcttcgaggatatcggctatccgagcgaggtggtcgctacgctcctgaacccgcaactgcagggcttgatcctgttctgtggcgatatggcgaccggcaagaccagctccgccgcctcgctgattctcgcccgactgcagaccctgggcggggttggcttcacagtcgaggatccacaagaaaccaatctcagcggccaacatggactcggccgctgtatccaagtcagaacctcacgacgctcgggaggctacagcgaagccctgttgcgcaccctgcgtaccggagccgacctgatattgatcggcgagatccgcgacgaagacaccgcctatcaggcttgcaaagcttcgctgaacggcaacctggtcatatcgaccatccacgccaagaactgcccgcaagccatcgaacggctgatcaccctggccaaacccctcgcgtccaatgcctacgacgtcgtggctgaaggcattcaggccgtgatctgccaggagttggtaagtgatggcggcgctcgaagactgcacgcagaaccgttgcttttcaccggagtggactccgtcgccatgcgcgataagatccgccggcagcagattcatctacttgaggacgatgtgaatcgccaggctcgcaaaagcctgtgggagcctatctatgaataa

SEQ ID NO: 355136 - DNA, 1113 bp, Pseudomonas aeruginosa
atggaactgttgaacgccaccccgctggccgccgcctacaaccaggggctcgacgccgaaggccgggagtcgctggtggtgatcgccaagggcagtttcgacctgccgctggacggtcgcgaggcgcgcctgctggacgagcagcaggcgctgctgatggtcgatgaattctatggcgagccggggttttccgcgccgcgccgggagtgcgagttcgttcccttcaagccgttctgcgatgtgctggtgctgggcagcgcccaggcgcccggcgggcggccggtacagcagttgaccgcgggcatccgcgtcggccgggtgagcaaggcgctggcggtgcatgggccgcgccagtgggaaccgggattgctcggtgccggcgcgggcgtcgcgcagccgttccagagccaggacatttcctacgccagtgccttcggcggcagccatgcctcgccggacaaccccggtttcatggattgctacatggccaatccggccggatgtggctggtttccgcgcagcgccgacaccgccgagatcgtcggcacgccgatgccggccacggaaaagctcggcgagccggtggacagcccccacggccgcttcacgccgatggcgctcggcccgctcggccgccactggcaggcccgggtcggcttcgccggccgctacgacgacacctggttggccgagcgcttcccgttcctgcccgccgatttcgacgagcgttacttccagtccgcgccggccgaccagtggaccgaccatctgcgcggcggcgaggaggtcctgctgctcaacctcaccggcgaggagcgcgcggccttccgcgtgccgcgcagggaggtcccggtgaccttcttcctgaaaaagggtggccacgaaaccgcgcaggcacggatcgataccctgctggtggactgcgacgcccgtcgcgtggaagtcacctggcgcattcgccggccgttgaagcgcaacctgttcgagatcgcccaggtgctggtcggcagcaagtccgccgcctggtggcgcgcccgcgagctgggcaaggactactacccctcgcttgccgcgttggcacgcagccgccaggccgaggaggacgaggcatga

SEQ ID NO: 355137 - DNA, 357 bp, Pseudomonas aeruginosa
atggaatggctctccggttttctcgatcagatcatcgccttcttccagtggatctgggatttcttcgcccaaggcatctatgacttcgtgcgcgacggcctggtggtcgccaccaaggcgtcgatgtacgccgcgctccagaccctgatcctgctgatcgatgtcagctacaccgccgctcgcgaactgatcgacagccttggcgtgccgcagatgatccgcagcatgtatgccgcgctgccggggccgattgcggcggggctggccttcttcggcgtgccgcaggcgctgaacatcatcatggtcgcggcggcgacgcgcttctgcatgcgcttcgtgccgttcattgggaggtga

SEQ ID NO: 355138 - DNA, 780 bp, Pseudomonas aeruginosa
atgcacctgctttacccctccgcccccgaccgcagcaacgcggtcgatgaactcttcgccgaggaatatgacgcggcccgttcggcaggcttggcctgttcgctgttctgcgacgaggaactggaaagtggacgcttccgcgcccgcccggagtttccggcaaacacccaggtgctgtatcgcggctggatgctcacaccggaaaactacgctcgcctgcacggcgcgatcctcgtcgctggcggacggcccctgaccagtccacagcaatatcggcactgccattacttgccggagtggcatccgctctgtgaggacctcacgccggcgaccctgttcctgtccaggaacgccgacttcgaggcagtgttggcgcaaagcccgtggcgcgcctggttcgtcaaggaccatgtgaaatccctgaccacccagcgcggctcgaaggccaccaatgctgcggaagtgcgggaagtcctcgattcgatcgagcgttatcgaggcaccatcgaaggcggtgtatgccttcgggagttcgaggcgctgcgtgcggaaaccgaggaacgctacttcgttcttcacggccgcgctcacgggcgtctcgatgccgtcccgccgctagtggaacaggtggcacaacgtatcgattgcccgttcttttccgtcgacgtggtcgagtcgaccagtggcgagttgcgcctgatggaactcggcgatggccaggtctccgaccgcaagcaatggcccgccgcacgcttcgcggcgatgctggcacaggcatag

SEQ ID NO: 355139 - DNA, 363 bp, Pseudomonas aeruginosa
atgagccggctcgctctgctcctgccggccgtgttgctggtcctgctggccggcgccttgctcggcggcggcctggttgcccgccattatcgtccgcaactggaggaggccctgggacaactcactgccagccgcgtcgccagcggccagctcgaggctttgctcgatgagcagcagcgcgcgctggcggcggtgcgggcgagcgccgagaggcgcgcgaaggacgccgagcaggcactcggcgaggccagggcgcaggccgcggagcagtatgccgcggccgtgcgtctgctccaagaacccgactttggcacggactgccaggcggcaggtgcggcgatcgaccgggagctgggactatga

SEQ ID NO: 355140 - DNA, 630 bp, Pseudomonas aeruginosa
atgaaactgaccgagcagcaattgctgcgcatttttcccaacgcccgcctcgtcgcgggcgttttcgttgtggcgttgcaacgggccatggacgagagggagatcgacacaccggcgcggcgtgccgcgtttctcgcccaggtcggccacgaaagcagtcagttgacccggctggtggagaacctcaattacagcgcccaaggcttggcggcgacctggccgagccgctatctcggccccgacgggcagcctaacgcgttggccttgcggctggcgcgcaaaccgcaggcgattgccgacaacacctacgccacgcgcaacggcaatggcgacgaagcgtccggcgatggctggcgcttccgcgggcgtggcttgctacagatcaccgggcgtgccaactaccggttggtcggcgaggccctcggcgagccgctggaagccgagccctggcgcctggagcagcccgtgccggcggcccgcagcgccgcctggtggtgggccggtcacgggctcaacgagctggccgaccgcggcgagttcgctgccatcacccgccgcatcaacggcggcctgaatggccaggcggagcgcctggcgttgtggcagcgggccagggcggtgctgtcatga

SEQ ID NO: 355141 - DNA, 276 bp, Pseudomonas aeruginosa
atgaaatcgatctacaacaccccaggcttcagcgaggagttgttgctggtttgcgcctcgctgcgcgagatcggactggacaatctggctgaccagttccgcgatgcagtgttcgaccgatccgtcgtcgaccaggccatcatcgcactgcgtgagcgggtgaagaccccttcgccggagcatgcggccgacaacgagccatggctgtactgcgactggcaggccaggcaaacagcttaccgactcctccagcgccttgagcgcgcaacacgctga

SEQ ID NO: 355142 - DNA, 255 bp, Pseudomonas aeruginosa
atgaacccattgttcaccaacctcacccaggaaaccctcgcttacctcgaggaccaactgtccaacaacgacgtcgccggcgatgacgagctcatcgacctgttcatcgaggagctgtcgctgaccttggagcaggccgaagcggctgtcgcgctacgcgatcagtacctctgccaggtcttcctggtcggccaagggccgctgcaccaagccgatgggctcagcttcgaccctcacaccaagagcgttcggtag

SEQ ID NO: 355143 - DNA, 183 bp, Pseudomonas aeruginosa
atgccgggcttccatgagatcagagccctctcgctgcatctgtataagaagaccgggaaagatggccaaaagatcgctgggcatgccagcgcggagatgacgaagaactatctgcgagaccacacggatgtggtctggtcagatgcgattcctgatctggatatcagccagatcagtagctaa

SEQ ID NO: 355144 - DNA, 1101 bp, Pseudomonas aeruginosa
atgttctgggtcggcgaccgctccgactaccatcgcctcttctacatcctgcttgcagccccgacgctgcttttcgtgattatccagccgcaactgttacgtccactgacccgctcgccgctgctcatcgccattctggccttcagcgcttacatgatgctcagcctgctctggtcaacgccggaaaactcggcgggttcgctgttcaaacggccgctgtacatcgttctactgctcttctgtgtggggatactggcgctacaggcacccgaacgcctacgcaacattacttggctggcggcactgggagcagttttcgccgcagcggtcacggtggtccactaccacctccagacacatcctgcatggatgcgcttgtccggatacggggctctctacaacccactgctgagtgcccatgtatatggcgcattcactgtggtctggctggtttactggatgcaatcacgccatcttcttgcgccactgccgctgctgtccctggcgatactatgctgcctgttgctgtcgaccggctcacgcaccccattgatcgcactcaccgcctgcctgggctggctgctggtcgccggtaatcagaaaaagaccctgatcgtcatcgggttggcagcgctgggcatgatcgtggcttatatcttcaatccagagctggtcacccagcgcggcgtctccttccgcccggaaatctggagcgaatccctgcgccagatcggcgagcacccctggcttggccatggctacgatcacccgatgcggatcaagctggccaacggcatgctgctggccgatccgcacaacatcgagctgggcgtgctgttcgccggcgggatcgtcggcctgctgctatggtctgcgatctacgccctggccttcgtcttcgcctggaagaaccgtcgcgaccccatggtgctgctggcgtctacctggctggtcttcggactggcttccggcctcacggaaggcaacgcgttcatgtcccgccccaaggagcactggttcctgatctggattccattggccctgctgtacgccctgtgggtgcagaaaagcgcccgcgacaaaaacgaaaccgcctcctga

SEQ ID NO: 355145 - DNA, 1107 bp, Pseudomonas aeruginosa
atgttctgggtcggcgaccgttccgactatcaccggcttttctatatcttgctggctgcaccgacgctgctgtacgtgatactgcaaccgcgtctgcttcgcccgctaacgggctcgccgctgttcatcgccttcctcgccttcagcagctacatgatgctgagcctgtcctggtcgacccccgagaactccaccggctcgctgctcaagcgccccctgtacatcgccctcctgttcttctgcgccgccatcctggcgctcgaagctcccctccgcctcaagaccgcgacctggctggcagcccttggcgcggtgatctccgcggcagccaccttgctgcaatactactgggacgccaacccgctgcgccttaccggttatggcgctctctataacccattactgagcgcccatgtctatggcgccttcacggcactctggctggcctattggatgcaatcccgccccatcctggcccccttgccactgatatctctggcgctgctcggtggccttctcatcgcgaccggttcacgtactcccctggtagggctcacagcggcccttatgtggctggtcctggccggagacaggaaaaaagccctcatcgccctggcactcgccctggctggagcgctactgggctacatcctgtacccggaagtgatcacccagagaggggcatcgttccgcccggaaatctgggccgacgccctacgccagatcagcgagcatccatggttcggacacggctacgatcatccgatgcgaatcgtcctgagcaacggcatgctgctcgccgacccgcacaacatcgaactgggtgtgcttttcgctggagggatcatcgggctcctgctgtgggtggcgatctacacactggccttcggcttctcctggaaaaaccggaagtctccagcggttctgctagcctcgacctggctggtgttcggcctggcagccggactcacggagggcaacgccttcctgccccgtcccaaggaacactggttcctgatctggattcccatggcgctgctgtatgcgctgtggatccagcaaaggttcgccgccagcaggcgcggtgaggatatcgccgcgccttga

SEQ ID NO: 355146 - DNA, 354 bp, Pseudomonas aeruginosa
gtgttcctcttcgagctgctgctggccgaagtggtcgacggccacctgccgaagttccgcgagctgtcgcgcttccccgaagtgcgccgtgacctggcgctgttggtggaccaggacgtgccggcacaagacatcctgacacaaatccgtgcggcggccggcgaatggctgacggacctcaggctgtttgatgtgtatcacggtaaaggcattgatccgcatagaaaaagccttgccgtcggcttgacctggcagcatccatcgcgcactcttaatgacgatgaagtcaatagcacgacgcagaacatcgtcacgtcgttggaagaaaggttcaatgccacgttaaggaaatag

SEQ ID NO: 355147 - DNA, 303 bp, Pseudomonas aeruginosa
atgggggctctgacgaaagctgaaattgcggaacgtctgtacgaagagctgggcctgaacaaacgggaagccaaggagttggtggagctgttcttcgaagagatccgccaggcgctggagcacaacgagcaggtcaagctgtccggtttcggcaacttcgacctgcgcgacaagcgccagcgccccggacgcaacccgaagaccggcgaagaaatcccgatcacggcccgccgcgttgtcacctttcgtccagggcagaaactgaaggccagggttgaggcatatgctggaaccaagtcataa

SEQ ID NO: 355148 - DNA, 357 bp, Pseudomonas aeruginosa
atgctggaaccaagtcataacgacgagctgccaccgattcccggcaagcgctacttcaccatcggcgaagtcagcgacttgtgcgcggtcaagccccacgtgctgcgctactgggagcaggagttcccgcagctcaacccggtgaagcgccgcggaaatcgccgctattatcagcgccaggacgtgctgatgatccgccagatccgcgcgctcctctacgaccagggcttcaccatcggcggggcgcgccagcgcctctccggcgacgaggccaaggacgacgtcacccagtacaagcagctcatccgccagatgatcgccgagctggaggaagtcctgctggtcctgaagaagtga

SEQ ID NO: 355149 - DNA, 774 bp, Pseudomonas aeruginosa
atgagcgagctgattcgggtcgaacgcgaagcggggctgctgaccctgcgcctggaccgccaggacaagaagaacgcgctgacccgcgcgatgtacagtcggatggccgaggcgctgctggaggcgcaggccgatacggctgtgcgggtagtgctgatcactggcggcgatgcctgcttcaccagcggcaacgacatcctcgacttcctcgagcaaccgccatccctgcgcgacagcccggtcggccgcttcatgagcgccctgctggaattccccaagccggtgatcgccgcggtgaacggaccggcggtgggtatcggcaccaccctgctgctgcattgcgatctggtcttcgttggtcgcaatgcgcgattgaagatgccgttcgtcaacctcggcctgacaccggagttcggctcgagcctgatcctgccgcgcatgctcggtcatgccaaggctgcggaattgctgatgctcggccaggacttcagcggcgagcaggcggcggcctggggcctggccaatgcggcgctggaggatggcgccacggtgctggagcacgcccgcgatgcggcccggcgcttcctgcacctggcgccctcggcggtagtggagagcaagcgcctgatgaaagcgccgtttatcgaggagcttcgccgggtgatcgccgaggaaggcgatatcttcagtacccgactgcgctcgcccgaggcgatcgaggcgctcagcgccttcatgcaccggcgccagccggatttctccaggttcgcctga

SEQ ID NO: 355150 - DNA, 219 bp, Pseudomonas aeruginosa
atgctcaagggcgaggtgaaagagggcgagacggtcaccttcttctacgacgccaaggacggcgtcggctaccgcaagggcgccgcgccgaagccggcggcacgcaagaagtccggcgccggcgagacgcccaggggccgcgcgacggcggcgaggaagccggcggcgaagaaaggcgccgccgccaagggcaaggccgacaagccgaagaccaagtga

SEQ ID NO: 355151 - DNA, 579 bp, Pseudomonas aeruginosa
atgcgcgtcaccacccacgctaccctggccgcggccctgctgctcagcgccgcctccgcgttcgccttcaatctcggggatgccgccaaggcggtcgccggggcatcccagggcgactccgcccaggtagccaccaccccgcagaccagcggtctgctcggcgcactcaccggccagctcggggtcagccaggagcaggcggtcggcggtaccggcgccctgctcggcctggccaagaaccagttggccggcaacgattattcgcaactggttaagaccatccccggcctcgacaagctggccggcaacaacgccctggccggtctcggcgggctcggcaacgtgctcggcaagagcggcggcgacagcaagggcctcggttcgctgctcggcaatgcggacagcatgggcgacgtgaacaaggccttcggcaccctgggcatggatagcgggatgaccgagaagttcgcccaggtgctggtcgactacttcggcaagcagggcgccaacagcgagctgctgggcagcctgagcaatctctggggagtgagcaaggcgggcggctcgtcgctgctctga

SEQ ID NO: 355152 - DNA, 918 bp, Pseudomonas aeruginosa
atgctgaacaccctggaagcctgcctgaaggcggtcgatgagattctcctgggcaaggaccgccaggtgcgcctggccctggcctgcctgctggcccgtgggcacctgttgatcgaagacctgccggggatgggcaagaccaccctcagccatgccctggcgcgggtgctcgggctcagtttccagcgcatccagttcacctcggacctgctgccgggcgatatcctcggtatctcggtgttcgacaaggacagcgggcaattcgtcttccatcccggaccgatcttcgccgaactggtgctcgccgacgagatcaaccgcgccacgccgaaaagccagagcgccttgctcgaggcgatggaagaaggccaggtgaccatcgagggcgccacccggcccttgccggaaccgttcttcgtcatcgccacgcagaacccggccagccagggcggcaccttctccctgccggaatcgcagctggatcgcttcctgatgcgcctgtcgctgggctaccccggacgcgcggcggaacgctcgctgttgctcggcgaagctcggcgcgatctgctgccgcgcctggaacccttgctcgaccacgcggcgctggccgctttccaggccgaagtgccgaaggtccgcgccagcgatgcgctggtggactacgtgctgcgcctggtcgaagcgacccgcacgcagccggccttcgccctcggtctgtcgccgcgcggtagcctggcgttgctcgccgcggcgcgtgcctgggcgctgctggcgggacgcgactatgtgattccggaagacgtccaggcggtgttgccggcggtcgccgggcatcgcctgcgcgaccaggcggaccccaccgggcacggtggcggcgcgctggtgcaatggctgctgcgcgaagtcccggcgctctga

SEQ ID NO: 355153 - DNA, 441 bp, Pseudomonas aeruginosa
atggccgagatcaatccgctttcaacggacctgcaacagcaactggcggagctgcaggcacaggggctcgccttgcttggcgtcgccgcggacgagacgccggcgcagatcgtcgccgccatcaccgactacgtgcgcgatgcgagggagcaggggcgcagcctcgacgacgaggcggtcttcgccctcggcgcgctgatcggcgcgcagtacgtgcgtggcctcggctggcactggggcgacgtgacctgggacggcgacccggacagcgccgccgtcggcgtgctcagccccgacgaatcgctgttcaacaaccccatcggctgggtaggccagatcgccgaaagcggcggcggggtgccgttcatgctcagctacaacatgatcctggccaaccaggtgccgctgttcgagcggggcagcgccaccggtctctattga

SEQ ID NO: 355154 - DNA, 333 bp, Pseudomonas aeruginosa
gtgttcacccttcccgccaacacccggttcggcgtcaccgccttcgccaactcgtccggaacccagacggtgaacgtgctggtcaacaacgagacggccgcgaccttcagcgggcaaagcaccaataacgccgtcatcggcacccaggtgctcaactccggcagcagtggcaaggtacaggtccaggtcagcgtcaacggccgcccctcggatctggtctcggcacaggtaatcctgaccaacgagctgaacttcgccctggtcggctctgaagacggcaccgacaacgactacaacgacgccgtcgtggtgatcaactggccgctcggctag

SEQ ID NO: 355155 - DNA, 984 bp, Pseudomonas aeruginosa
gtgaactacgccaaggccgcggacattgccaagctgttccagtcggttactagtagtggcgaagagaaagaaaattctcgtggttcgattaccgtagatgaccgtaccaacagcatcattgcctatcagccgcaggagcggctggacgagctacgccgaatcgtttcccagttggacatcccggttcgtcaggtgatgatcgaggcccgtatcgtcgaggccaacgtggggtacgacaagagtcttggtgtgcgttggggtggtgcctaccacaatggcaactggaacagctacggcaagaacggcaacatgggcatcaaggataaggaaggttacaactgcgggccgttccaggggcagtgtacgttcccgaccagagataattctccgaccccatttgtggatatgggggccaaggatgctacttccggtatcggtattggctttatcaccgataacatcattcttgacttgcaattatcggccatggagaaaaccgggaacggcgaagtggtttcgcaacccaaggtcgtaacttctgacaaggaaaccgcgaagatcctaaagggatcggagatcccatatcaggaggccagttccagtggtgcgaccagcacctcgttcaaggaggccgctctttctctggaggtgacgccgcagatcactccagacaatcggatcatcgttgaggtgaaggtgaccaaggatgctcccgacttccagaatgctttgaatggagttcctccgatcaacaagaacgaggttaacgccaagattctggtcaacgatggtgaaaccatcgttatcggcggtgtattcagcaacacccagacaaaggctgtcgacaaggtacccttcctcggtgacctgccttacttgggccgtttgttccgccgcgatacggtctccgacacgaaaaacgaacttctggttttcctgacaccgcggatcatgaataatcaggccatcgcaatcggtcgctga

SEQ ID NO: 355156 - DNA, 630 bp, Pseudomonas aeruginosa
gtgcatgtgaagcacgatcgcaccgagaccgtggacaacaacgagaccataaccatcggcgtcgaccgcaccgagaaggtcggcaacaacgagaagatcagtatcggcgcgaaccgcaccgaggacgtcggcagcaacgagaccatcagcatcggcgtcgaccgcaccgagaaggtcggcagcaacgagaagatcagcatcggtgccaatcgcaccgaggacgtcggcaacgacgagaccatcagcatcggcgcgaaccgtagcgagtcggtgggcaacaacgagacgatcagcatcggcgccgaccgcagcgagtcggtgggcgccaacgagaccatcgacataggcggcaaccagagcaccagcatcggcaagaacgagtcgcgcagcgtcggccagggccgcgatacctcggtgggcaaggacgatagcctggacgtgggcaagagcttcacgctcaacgccggcgactcgatcaccctggtcaccggtgccgccagcatccgcatgaagaaggacggcagcatcgtcatcagcggcaagaacatcaccatcgacggatccggggcgatcaacgtcaaggccgacaagaacgtggtggtgaagggacgcaagatcctccagaactga

SEQ ID NO: 355157 - DNA, 519 bp, Pseudomonas aeruginosa
gtgctgctgaccgcggcggtcctggcgctgggctacaacttccatctgagtgacatgcaggctcagctcgaacagcaggccgcggaagaggagacgctcaagcagcagttctccaccaaggccttccaggccgcgaacctggaagcctacaaggcacagatgaaggagatggaagagtcctttggcgccttgctgcggcagttgcccagcgacaccgaggtacccgggctgctcgaggacatcactcgtaccggcctgggcagcggcctggagttcgaggaaatcaagctgcttcccgaggttgcccagcagttctacatcgagctgccgatccagatcagcgtggtcggcggctaccacgacctggcgaccttcgtcagcggcgtgtccagcctgccgcggatcgtcaccctgcatgacttcgagatcaagccggtcgcgcccggcagcacgtccaagctgcgcatgagcatcctggccaagacctatcgctacaacgacaaggggctgaagaaatga

SEQ ID NO: 355158 - DNA, 624 bp, Pseudomonas aeruginosa
atgaatgacttcaagtctgccctggcgcccttcccgcccggctacccgagggtcttgccggacaaccggcggcaggtgccgatattgcatcgcgacgcggacttcctcctgcgcgcgctgcaacccgacgatttcgtccggaccagccgctacgagaacgccaaccgcgaacacctggcgccgtgggagccgctgcgcgacccggggtatttttccgtggacaacgcccgcgcccgcaccctgctacaggtggcgagcatggacgaaggcgaggcgcttctcctgctgttgctcgatcccgacgacggcgaggtgctggggcgctgcagctacaccaacatcgtccgcggggtattccaggcctgccacctgggcttttccctggccgctgcggcgcagggccgcggcctgatggcacgagccctgcgggtagccaaccggtattgcttcgagcagctcggcctgcaccggatcatggccagccacctgccgcgcaacgcacgcagcgagcgcctgctggaaagcctcggcttcgagaaggagggctacgcccgcgcctacctgaagatcgccggggtctgggaagaccatgtgctacgggcgctggtggacgctccgcgctga

SEQ ID NO: 355159 - DNA, 297 bp, Pseudomonas aeruginosa
atggcaaccgatctctacgcgctggccgaacaggtcgaggacgaagcgggtttcctgcacttcctcgccgcgctggcggcggactgggaggaagaccgccgcctcgccgccgccaacccgccgaagccgttcggccccagcccgctgggttgggagaacggcagcatcggtggcttcctcgatgccgccgcgacctggggcgaggactcccgcgacggcctgccgggctattccaggccggagaatgcctggcggcgcgcggcgcaactgatgctggcgggcaagttctatgaatga

SEQ ID NO: 355160 - DNA, 303 bp, Pseudomonas aeruginosa
atgccgcactcgctctgcgtcgttctggctaccgacgaagtagaggtcgaactccttttctgcatgctgcaggtctcggacccgctggatgcaggcggtgcaattgtcctggacgaacagggccaggcgcccgctgctctgcaacgctgggctcatgttcggggtgcccgacgggttggccgtgctgctttcggtgaggcggatcaccccctcgcctggataggcgcgggcgaaggcttcgtcgtatgcgcgctggtaggcgagttccttctcgacccggcgccgttcggcctggacctgtag

SEQ ID NO: 355161 - DNA, 570 bp, Pseudomonas aeruginosa
atggcattgctgggcttcgggccgaaactcgccggtcgtcgtccggcagcggtgacctccgaaaccgcgcaacgacgcgcctacctgaacaacaagttcggtcgttccggcaacctcgaccacgacatcaactaccgcgggaatcgtgaaaccgccgccaagttcttcaagtcgaaggacatcgatcctgccgatgccgagtcgtacatgaacggcctggacttcaaccatccggtccgtgtggaaaccctcgcgcccggcaagaacctgtggcagtaccagtcccccggagcgccgcagggcaactggtatacactcagcccgcgcgtgcagcccacggagctgggaatcaaccccatgggcaccaaccgggcggcgaacaccatcgaacccaaggtcctcaactcctacaggacgacccagaaggtcgaggtcctgcgcagcaccgctgcgccgaccgatgacttctggtcggtaaagggacagtcatatcccgccaaaggcggcgcgcaacaactgttctccaacgagaaaggctccttcggtctgcttccccgggagggatcatga

SEQ ID NO: 355162 - DNA, 237 bp, Pseudomonas aeruginosa
gtggaagacgtgcagcggcacctgtacgacatcgacatcgacgcgccccaggggccggtccgggtggagcgccagaacaaccacagccgcctgtcttcgcgcatcgcggaaatcgatgcgcgcggcgtgttccaggtccgctggcagtcgcccgaaccgattcgccccgatccttatgtcgtcgtgcataacctcgacgactggtccgccagcatgggcgggggagcgctcccatga

SEQ ID NO: 355163 - DNA, 234 bp, Pseudomonas aeruginosa; identical to SEQ ID NO: 325755

SEQ ID NO: 355164 - DNA, 219 bp, Pseudomonas aeruginosa; identical to SEQ ID NO: 323744

SEQ ID NO: 355165 - DNA, 216 bp, Pseudomonas aeruginosa
gtggagaccggccgctatcagaatcgcagcgaagtcatccgggcaggattgcgcctgctgctgcaacaggaagcccagaatagcgccaagctcgaagccctccgcaacgcaacatccagtgggctgatgcaactggagcgcggcgagtacgacgagatcaccagagacgacctggcccaatacctcgacgagctcggcaaccaagcgagccactga

SEQ ID NO: 355166 - DNA, 321 bp, Pseudomonas aeruginosa
gtgaagctgaagttcgacccgatgtccggtaccggcatcgattcgcacaacgaaagcctgctgaagcttggtaaagactccactgccactggcgtcggtattggcatctatggctccgatggcaagctgctgaacctgtcggcgaacgagaccattaatgctcccttgaattccaatattgaaaaagatggcgaaggcaatgacatcaccgtctacagcgccaatctgaatctgcgggctgcttacgtcaagtctggcgctgcggccgctacggcaggtattgccaacggctccttgccgttcaccctagaatacaactaa

SEQ ID NO: 355167 - DNA, 582 bp, Pseudomonas aeruginosa; identical to SEQ ID NO: 320944

SEQ ID NO: 355168 - DNA, 174 bp, Pseudomonas aeruginosa; identical to SEQ ID NO: 325756

SEQ ID NO: 355169 - DNA, 204 bp, Pseudomonas aeruginosa
atgcttcgctcgatcaagatcatatcgacctaccctgatctgcctgcgcggatccttgagcttcgctcactgacccttgacgatgagctggacacaacaatcaccctgaccaccgcacacaaggccaaggggctggaatgggatttcgtttgcctgtacgacgacttcaacgcggacccgctggcccccgacattgataggtga

SEQ ID NO: 355170 - DNA, 261 bp, Pseudomonas aeruginosa
gtgtatttcaccgacctgaagatgaccggcaagaacatcgccatcgccggcgcggccgagtccaacaaccgcgtttccaatctcatgcgcaacatggacgcgtccgagtggctgaccgccccgaccctgaacgaggtcaaggcggtgacccagggcgcggtggaccaggccaacgtgttccaactgaccgtgcagcagacgcagcccggcgaggaagacgccaaggcgaagcatggggttgcgcaaggagccaagaaatga

SEQ ID NO: 355171 - DNA, 228 bp, Pseudomonas aeruginosa
gtgccgcagcggctgctggccgacccgacacccggcctggcgcatctgcagctacgcgtaagcgaggccgccagcggccgcctgcggatcctggccgatggtcgcccggtgtgggagcgtgccctgtcctgtctgccggagcgccgcctgctggtgccgctggccgccctgcgcctgccgccggacacccggcgcctggaagtcgctttcctcacctccggccactga

SEQ ID NO: 355172 - DNA, 204 bp, Pseudomonas aeruginosa
atgcgtgtgttcgccaaaggcggcccagccgaggcacgcaactactgggtcaagaccatgcagggcatcaccaagcacgcccacgccatccgccgcatcaacgagggcatgttcgacccgcagatagtcgaggatttcattgggccactcgacttcgatgagcatctgctcgacgacagcttctactcgcagaaggcgtgctga

SEQ ID NO: 355173 - DNA, 186 bp, Pseudomonas aeruginosa
atgatcctcggcgaagcgccgcagcagggctgcgccgacgccgctgcgctgtgcgccgggcagcacggcgatttccgccagccagacgcggatcggtgtttcttcctcggcgcgcagcaggccgaccaggtggccgtcgcgttcggccagcagggaatagccggaatgctggtacagcgtgcgtag

SEQ ID NO: 355174 - DNA, 153 bp, Pseudomonas aeruginosa
atggtcgtggtgaaaatcccactggtcgaggccacgatcgacgagcaactgtggcaactgctcaacgcgaaacgccaggttgcccaggatctcatcgagcccgagcaggtcgacggaaaccgcgcgcttttagccgcaagcctaactggataa

SEQ ID NO: 355175 - DNA, 210 bp, Pseudomonas aeruginosa
gtgcgcggcaccttcgccaagcccgacgccggggtccacgccgggccgctggtggcgcgcggcgcgggaatgatcgccctcggcgtggcggtgggcccggcggccagcctgctggctctggtggcgccgagcaagagcgacgacaaccagtgcaccgccctgctgcaacgcatgcgccagccggccaaggcgccggccggcaagcgctga

SEQ ID NO: 355176 - DNA, 156 bp, Pseudomonas aeruginosa
gtggcggctcacgaaaaagccgtggaactgttcacccaggccgcggacaacctgaccgacccggaactgcaggcattcgccaagacccatctgccggccctgaagcatcacctggagatggcccgcgcgctggccaaggcgcacccatccaagtaa

SEQ ID NO: 355177 - DNA, 213 bp, Pseudomonas aeruginosa
atgcccttgggcttgcgcgatcagctaaagcaaaaagccgcgcataaccaccgctcggccaacagcgagatcgtctaccggctggagcgcagcaacgagctcgaagaagaactcgctcgagcgaaccgaatggtcgacgagctcttcgccaagaaccagcgtctgcaggcagagctggctgcggcgaacacgcctcaggtggcggaggcatga

SEQ ID NO: 355178 - DNA, 213 bp, Pseudomonas aeruginosa
atgcccttgggcttgcgcgatcagctaaagcaaaaagccgcggataaccaccgttcggccaacagcgagatcgtctaccgactggagcgcagcaacgcgctcgaagaagaactcgcgcgagcaaaccgaatggtcgacgaactcttcgccaagaaccagcgcctgcaggctgagctggcggcggcgaacacgcctcaggtggcggaggcatga

SEQ ID NO: 355179 - DNA, 180 bp, Pseudomonas aeruginosa
gtgaacggtttctacgacccgctgctgaccttcctcgaccacctggtcgacgaacgcttcgtccgcgccgaacaccgcggcatgctgcagcgcggtgccagtccggaggcgctgctcgatgccctcgccgcctggacgccaagcgtggcgccaaagtgggtcgaccgcaccccgcagtga

SEQ ID NO: 355180 - DNA, 141 bp, Pseudomonas aeruginosa
gtggtgctcgacgaacttcccgaaggcctgctgcccaccggtgccaaggccaccgtgcagctctatcccggcgacggcctgagccatctgctcggtcgcgcgcagatcgtcgccatcagcctgctgcactacgtctactga

SEQ ID NO: 355181 - DNA, 153 bp, Pseudomonas aeruginosa
atgactccccggcctctggccgacaacctttccccgccggaccccgcccgcctcgcccagtccatcaaggactggggccgcgagctggggttccagcaggtcggtatcagcgacgtcgagctgggcgagcacgaagcgcacctgcagcgctga

SEQ ID NO: 355182 - DNA, 561 bp, Pseudomonas aeruginosa
atgcaccatccggatagcggtttcaggcggcgcctcgtcgccctgacgcgcaaggaactccgccagttgctgcgcgacaggagcaacctggcgatcggcgtgatcctgcccatcgtgctgatcctgatcttcggctacgggctttctctggatatccgcaacacgcccctggcgatcgttctcgaggacagctcgccggctgcgagggacgtggctgcgaagctggcgggctcgagctacttctcgaccgtccaggtggcaagtatccgcgaggcggaagacctgatgcggcagcgtacggtagacggcatcctgcgcatcccggtggatttctcgcgacgcctggagcagggggacgggcgcatccagttactcctgcatggtgccgacgcgaacagcgcggccaccctcgggcgctacgtgaacggggcgctgcgggtctggcacgagcaacgcgtggaccgtctgggcggcgagcgggtgcagggggcgtgcggatcgtcgagcggatgtggttcaacgccgccaacagcagtacctggtacctggtaccggggctga

SEQ ID NO: 355183 - DNA, 489 bp, Pseudomonas aeruginosa
atgcaaacccgcaccctggaaatcggtgtcggcctgttcctcctggccggcctgctggccctgttgctgctggccctgttgctgctggccctgcgggtcagcggcctgagcgtgggcaacgccggcgatacctacaaggtctacgcctacttcgacaacatcgccggtgttaccgtgcgcggcaaggtcaccctggccggcgtgacgatcggcaaggtgacggcggtcgacctggatcgcgacagctacactggtcgcgtgaccatggagatcaaccagaacgtgaacaacctgccggtcgactccacggcgtcgatcctgaccgccggcctgctgggcgagaaatacatcggcatcagcgtcggcggcgacgaggatgttctgaaggacggcagcaccatccacgacacccagtcggcgctggtgctggaagacctgatcggcaagttcctgctgaactcggttaacaaagacgaagccaaaaagtga

SEQ ID NO: 355184 - DNA, 858 bp, Pseudomonas aeruginosa
gtggatgcggcgctgcgcttcatcgacctgccgcgggagaagatgcccgaggtgctttcgcgggaggtggacaagatcgcccagagcggcggcaccccgctgctggtggtagccaacggccggctgctcggcgccattcacctgaaggacgtggtcaagccgggcattcgcgagcgcttcgccgaactgcgccggctgggcatccgcaccgtgatggtgaccggcgacaacccgctgaccgccgctgccatcgccgccgaggctggggtcgacgacgtgatcgccgaggctaccccggagaagaaactggcgcggattcgccaggagcagggcgaaggtcgcctggtggcgatgtgcggcgacggtgccaacgacgccccggcgctggcccaggccgacgtcggcatggccatgaacgacggcacccaggccgcccgcgaggcggccaacctggtcgacctggacagcgacccgaccaagctgctcgacgtggtccaggtgggcaaggagttgctggtcacccgcggcgcgctgaccaccttctccatcgccaacgacgtggccaagtacttcgccatcctgccggcgctgttcgtcggcatctacccgcagctcgacgtgctcaacgtgatgcgcctgcaaagcccgcagagcgcgatcctgtcggccatcgtgttcaacgcgctgatcatcgtcgcgttgatcccattggccttgcgcggcgtgcgggttcaggcggcggacgcttcgcaactgctgcagcgcaacctgctgatctatggcgtcggcggcctggtggcgccgttcctcgggatcaaggcgatcgacctgctgctgaccgccgtcggcctggcatga

SEQ ID NO: 355185 - DNA, 1089 bp, Pseudomonas aeruginosa
atgcgcaggtattcgacgatcgacttgccttccggggtgtcgtcggccagcgaggccagcaacgcgccctcggccagttccttgccgctcacccccggcgcggcgtacagcgcgctgcagcggcggttgccgaaggtgatggtgccggtcttgtcgagcagcagcacgtggacgtcgccggccgcctccaccgcgcgaccggacttggcgatcacgttcaggcgcaccaggcggtccatgccggcgatgccgatggccgagagcaggccgccgatggtggtcgggatcagcgtcaccagcagcgccaccaggaacaccagcggcaggttgccgccggcgaacagggcgaacggcttgagggtcaccaccaccagcaggaagatcagggtcaggccgatcagcaggatgtccagcgctacttcgttgggggtcttctgccgcttggcgccttccaccagggcgatcatccggtccagggtcgactcgcccgggttggcgccgatccgcaccagcagccagtcggacaccacctgggtgttgccggtcaccgccgagcggtcgccgccggactcgcggatcaccggcgccgattcaccggtgatggcggcctcgttgaccgccgccacgccttcgatgacttcgccgtcgccgggaatcatctcgccggcctggacccgtaccacgtcgcccttgcgcaggctgctggcagcgacgctctcgaaactgccgtcggcgcgccgcttattggcggagaggccctggctgccggccttgagactgtccgcgcgggccttgccacgcccctcggctagcgcttcggcgaagttggcgaagagcacggtgaaccacagccagagggcgatctgcagcgccaccgaggtcggcaccgcctggtcggggacgaagcacagcaaggtggtgagcacggcggtcagttcgaccaccagcatcaccggcgagcgcagcaactggcgcgggtcgagcttgacgaaggcttgcagcagcgccggccgccacaaggcggcgaggctggtggacgcgttgtggcgacgttcgagcgatttgtgcaaggcgttcttggacgcctga

SEQ ID NO: 355186 - DNA, 1206 bp, Pseudomonas aeruginosa
atgaacttcccctggcgcgacggcaaccgcgtagaactgctgatcaacggcgaagagtactttccgcgcctgttccagtgcatcgccgaggcgcgccgggagatcctcctggaaaccttcatcatcttcgaggacgaggtcggccggcagttgcaggaagccctcagcgccgccgccgagcgcggtgtcgaggtacaggtcacggtggacggctacggcaccgcctcgctcagcccggactacctggccaggctgaccgccgccggggttcgcgtgcacctgttcgacccgcgcccgcgcctgctcggcatgcgtaccaacctgtttcgccggttgcaccgcaagctggtggtgatcgatcgccagcaggccttcgtcggcggcatcaactacggcgaggaccacctggtgcgtcgcggcaacatggccaagcaggactacgcggtgcgcgtcgagggtccggtggtgcgcgatatccgccaggcctgcctggcgttgctcgaaccggacgccgactacccgccgttgcggccgtcgggcgccgggcagccggcgcgggtgcgcctggtgatccgcgacaacgaccagtccagcgacgacatcgagcgcgagtacctgcaggcgatccgccaggcgcggcgacgcctgctgatcgccaacgcctatttcttccccggctaccgcctgcttcgcgagctgcgcgatgcggcgcgccgcggcgtgcgcgtcgacctggtactacagggcatgccggacatgccgctggtgcgcctgtgcagccggttgctctacgactacctgctgcgcgagggcgtgcgtatccacgaatactgccagcgtccgctgcacggcaaggtcgcggtgatcgacgacgactggtcgaccatcggttcgagcaatctcgatcccctcagcctgtcgctgaacctggaggccaacctggtgatccacgacgtcgccttcaacggccagctctaccagcacctgcgcgagctggcgcgccgccactgccggcgcatcagccgccgccacgcgaggcgcggctactggtggcgggcgccgctgatcttcctcggcttccacttttcccggcatttcccggccatcgccggttgggtacccgcccatctgccgcgcctgaaatcgctggagccgcgtccgtcgcggcgctggcaggaacgccagggccagcggggcaacccatga

SEQ ID NO: 355187 - DNA, 1302 bp, Pseudomonas aeruginosa
atgctgatcatcatccactccgagaccaacaagaccaccatccggcagaacctcgggcgcccggagtacagctattacttcgtcctcaaggaattccgtccgctgctggaagagatcggccaggtggtcgaagtcagcgatcccgacgaactggtggaccgcctctaccacgactgccgcaagcgcggcgaaccctgcgtcttcctctccttctcgccgccccatcgcacgccgatccaccatgcctgcccgaccatcccggtgttcgcctgggagttcagcaccctccccagcgaaacctggcacggcgaaccgcgccacgactggcgacatgtgctgcgccacagcggacgggccatcacccactccagcttcacggtcgacgtggtgcgcgccgccatgggtcgcgactacccggtactgagcgtgccggcgccggtctgggatcgcttcgccaaccgcgcctcgcagcaggcgggccgtcccgaagcccgggatgtgcgcctgcgcctggacggcctgctggtggacagccgccagctggacctggccgaccatgccgaccccgagccgtcggcggaggtcctggccctgccggaccgcgcggcgaaacaggtcgagctgagcctcgacggggtcatctacacctcggtgttcaacccctacgacgggcgcaagaactggcaggacatgatcagcgcgttctgcgccaccttccgcgacgagcccgacgccaccctggtgctgaaactgacccaccacaacgtcggcgaagcgctggccgacatgcttcaccacctgtacaagaaccagtcctaccgctgccgcatcgtgctgatccacggctacctcgccgacccggactacgagcggctggtcgaggccaccagctacgtggtgaacacctcctacggcgaaggccaatgcctgccgctgatggaattcatgtccagcggcaagccggccgtggctccgcgcaataccgcgatgatcgactacatcgacgccgacaacgccttcatcgtcgactcctcggaagaagccaccgcctggccccacgacccgcgcgcggcctaccgcacgctgcgctacatcaccgactgggagtcgctgtgccgggcctaccgggccagtttcgaggtcgctcgccaggagccggagcgctacgcacgcatgtccgcgcatgccagcgccagcctcgaacgcttctgcagccgcaagctggccgtggagcgcctgcgtcgcttcctcgacgaagcggcacaaggcgaccccgccgccttgcaaagcatcccggcatga

SEQ ID NO: 355188 - DNA, 792 bp, Pseudomonas aeruginosa
atgacctgggcacccaccctgccagagattgcaggactcccactcctcgcgacttgcagcaaagccttcgcgcgaatgcctatcgagataatcggccaactgccgattgagagcagaaagcagccgcgaacgatccaccagttcccccagcgcttcgcgcagggaggtccaaggctggccgatatcagtggcggtcttcatgttgacgttgatccctatgccgataacgacatgacacagatccgcggggtcgccactcagctccaggagaattccggcgatcttcttgcctccctgcagaaggtcgttcggccacttcaacccggcgtcccggacgcccaaagactccagggcccggagcaccgcgagaccgacaaccaggctcaacccttcgagctcccgagcgccccccctgacagtaatggccagagaataatagaggttctctccatagggactgacccaggctcggccgcgacgtccacgcccggcagtctgctgctcggcgacgataacgaaaggcgtcgaggctccagccgcgagcctgcgcatggcctcgctattggtcgaatcgacggtgggcatgatctcgaccggccagaggctgtcgatcttccgcggatccaggagactgaggggactcgccaggcggtaaccccggccacgcaccttgtggaactgcaggccatgttcagcctccaggtgctgcaagcgtttccagactgcactgcgactgatgcccagtactgcccccaactcctcaccggagtggaatcgcccgtcttgaagtag

SEQ ID NO: 355189 - DNA, 270 bp, Pseudomonas aeruginosa
atgggtgtagatgtttcaattttgatgccggtctataatgaagttttgcatcttgaagaggctctccaaagtatttctgagcagggtgaaaagctttctattgaggtcgtctgtgttgatgatttttctacggatgggacgtggcagttgatggagcagctgcggaataaatataattttctcaagtgctataagaatgaaaaaaaaggtaagaacaatgccttcaattttgcctatgagaggtctagcaggctggtgagaaacccttga

SEQ ID NO: 355190 - DNA, 1074 bp, Pseudomonas aeruginosa
atggaccatccggctgtcacggaagcgaacttcgtgcttggtcgggtgcacgttgacgtccaccaccgccggatcgacttcgaagaacagcacgaaggtcggatgccggccgttgtacagcacgtcgcgataagcctggcgcaccgcgtgggcgaccagcttgtcgcgcaccatgcgcccgttcacatagaagtactgcaggtccggctggctgcgggagaaggtcggcaagccgacccagccccacaggtgcaggccgttgcgctcgacctcgatcggcagcgcctgctcgaggaatgcctggccgcacaccgcgccgacccggcgcgcgcgggccagctcgtctcgcgcctcgtgcagggcgaagatggtcttgccgttgtggcgcaggtggaaagccacgtcgaagcgggccagcgccaggcgcttgatgacctcctgcagatggtcgaactcggtcttctcggcacgcaggaacttgcgccgcgccggggtgttgaagaacaggtcgcgaacctcgacgctggtccccaccgggtgcgccgccggctgtacccgcggctgcatgtcgcggccctcggtttccacctgccaggcttcgccggcgtcggcggtacgcgaggtcatggtcaggcgcgctaccgagctgatcgaggccagcgcctcgccacggaagccgaggctcatcacccgctccaggtcttccagctcgcggatcttgctggtggcgtggcgagccagggccagcggcaggtcgtcggcggggatgccgcgaccgtcgtcgcgcactcgcagcaacttgatgccgccctgctcgacctccacatcaatgcgccgggaaccggcgtcaaggctgttttccaggagttccttggccaccgaggcgggacgctcgaccacctcaccggcggcgatctggttcgccagccgcggactcagcagctggatacgcggtgcttcactcatcactgggccgccagggcggtgctcgggatggacagggcctggccgactttcaggttgtcgctggacaggctgttgctgctacgcagcgcggccatgctcacttcatag

SEQ ID NO: 355191 - DNA, 1314 bp, Pseudomonas aeruginosa
atgagccaatacctgttgagcttcgcaagggaaaatcttgacggtaagccggatgcgtacctggcgttgctgtggtgcatctacaaattcaatggttccagtggccggtattcagaccatatcaaatcgcacttgagtgccgcgtccgagcacttgctttccaccgactatcagaaactcgcccgtcggataaaaaccatccttgattcaaagcccgaattggattgggttgcgccttcgggccttacgcccttggctagcttgcaggtgaaaaatttcagagggtttggcgaccttgggcaggatgacaaagggacgttcctgcgatttagcaagagtaagaatatcttctatgccccgaatggcggaggtaaatcgtccctgtgcgaggctctggagtatggcacaacgggacatatcaaagaggcggatcgtcgaaagacgaagatacgtccatacgttgcgcggggctcggccaaatcgaccctaattttgatgagtacgaacaaggcgagtattgtaaaaagcatcacttggtcgagttgcttcattgatcgaaatcgcttacaagagttttccttgctgggctccaaggataccggtagcgcagaaagcgatgtccttgccactctgttcggactggaggagtttcaagaagtcatatctcgctttgttagacctgaaagcttcaaattaagtacatacctgcggcctgacaatacgatggctatggccactttgacgcagcgatggggtgcacttatcgagaaacgccgagagctattcgagacaatcgcggcgctcaattctagagtctgccaaacacttggtttggaaaacgagcaccagtacgcggttaaggccagatttacgcgcctcgaaatgcttagggagctgaaagtcaaagcggccgatcggctcaaaaattcggagtcacctgttctattctccttgaagcagttagcccgagcggcctccgtttcaatacgcttactggagcgcaaagccaacattgacttagcactccttcgggacgcctcagcactgaactatagggcggtgttcgaagctatccaggctatagaacaggccgatgctggagatgtctgccccgcctgcacgacaccattgcgcaatgttacagagaacccttttgaaaaggctcgacgagagcttcagtccctcaaaaatctaacgaggctacaatcgacagaatcaggatcgtatcgtccaactggcaaacaggatttctgccggcgtgctcggagtggattccaataccagacagggcgtgtcttgcacactctctcttga

SEQ ID NO: 355192 - DNA, 1245 bp, Pseudomonas aeruginosa
gtggttgcaggtgcgcggcggccaggtcaacgccagcacccggggcaggaccaccgactatttcttcgaggtgacggcggagcaccttggcgccggtctggcacggctgatcgacatgctcgcccgccccttgctggacatcgatgcgcaacggcgcgagcgcgaagtactcgaggccgaatacctggcgcgctcggccgacgagcagaccctgatcgacgcagcgctggccctcggcctgcccgccggacaccccctgcggcgtttcgctgccgggcgccgcgacagcctggccctggagaacgatgcgttccagcgggccctgcgcgaattccatgccgcccactatcacgccggcaattgccagctatggctgcaagggccgcaggcactggacgagctggagaggctggcgcagcgtgcctgcgccgacctgccggggcgcgcgccaggcgcgagtccgccgccgccgccgttgctgcccttcgccggcgaagcgctggcgctgcgcctgccgggaccgccgcggctggtgctgggctttgccctcgacgctttgcgggaggccgacgaacagaccctgcaggcgttcgccgaattgctcggcgatcgctcgccgggcgggttgctggcagcactcggcgaacagggcctgggcgaatcggcggcgctgcgggtggttcaccgggatgcgcggcaggcgctcctggcgttgaccttcgaactgttcgacggcagcgcggcggcggcgctggaggcggcctttttcgactggctgggcgccctgcgcgacgatgccgccagcctgctggcggcgcgccggccgttgctggcggagcccactgcaccgctggagcgactacgccagcgcgttcttggcctgccagcggagattcgcccggcctgcctggacgcgctgcgcgccgaccgttgcctgcggctgcacctggacagcgaactcgacggcgccgaagcgcgctggtcggcgggcttccgcctgagtgtggcgccggttgccgcagcgccgccgctgaccgcgcagcggcatgcctggcgcttcgaactgccgttgccgcccagtgccgccgccgagggcgcgctgttcctgcgctggcgctttcccggcgtgcccgtacggtcacgctttctggcgctgcgccaggcgttgcgtccgctgtgcggccaggcacgcctgggggggtgtggagatgggcctggaggcgctcggcgaggactggtcgctga

SEQ ID NO: 355193 - DNA, 249 bp, Pseudomonas aeruginosa
gtgatcctgccgagtgccttgccggaggtcctcaccggcctgcgcatcgccctcggcgtcggctggtcgaccctggtcgccgccgagctgatcgcggccaaccgaggcctcggcttcatggtccagtccgccgcgcaattcctcgccaccgacgtggtggtggtcggcatcctgctgatcgccgccatcgccctggccttcgaactggggctgcgctgggtccagcggcgcttcgccgcctggggttga

SEQ ID NO: 355194 - DNA, 2514 bp, Pseudomonas aeruginosa; identical to SEQ ID NO: 354917

SEQ ID NO: 355195 - DNA, 3516 bp, Pseudomonas aeruginosa; identical to SEQ ID NO: 354918

SEQ ID NO: 355196 - DNA, 633 bp, Pseudomonas aeruginosa
atgaagaggatcatcatcctcggcgccggtgggttggggcgtcaggtgctggcccagctgcaggtcgactacggtcacggcatcgactgggtgatcggcgggtttctcgacgagcgcggccccgacgcggtcgcggagtcgctctactacccgtggctcgggtatccggagagcttcgtcgcggagcctgaccaactgttcgtcgccgcggtcggcgatccgctcagtcgccagaagcaggtcgcatgcctgctggcgaagggcgccgagttcgtcgctatccgcacccgctgcacccttggcgtgcggaccagctacggcccgaccttcttcggctacgacgtgagcagcggcgtggactgccgtatcggcgcctacggtttcatcgaccagcaaaccatgctcggccacgacgtggtcatcggcgactatgtacacatcggcccgcgctgcctgctggccggctacgtgaaggtgggcgatcgtgcggtgatcaactccggggcgatgatcgcccgcgacgtcagtatcggcgaagacgccgtggtgggcatgggcgcggtggtgttcaaggacgtggcggccggacagaccgtggtcggcaatccggcccgggttattttcagcaagtga

SEQ ID NO: 355197 - DNA, 801 bp, Pseudomonas aeruginosa
gtggacaccctgaagatcgccaccttcaacgtcaacggcatccagacccggctggccgcgctgctggcctggctggagcgggaagcgccggacatcgtctgcctgcaggaactgaagacgcccgacgcgcgcttccccgccgcggcgctggagaaggccggatacggcgcgatctggcagggccagtcggcgtggaacggcgtcgccatcctcgcccgcgacagccagccgctggaggtacgccgcggcctgccgggcaacgccagcgatccccacagccgctacctcgaagcggccgtcgacggcctgctggtggccagcctgtacctgcccaatggcaatccccagccgggaccgaagttcgactacaagctggcctggttcgagcacctcatccgacacgccgccgagctgatggagagcggccatccggtggtgctggccggcgacttcaacgtggtgcccagcgacttcgatatctacgacacccgctcctggaaaaaggacgccctgctccagccggagtcccgcgagtgcttcgagcgcctcctgcggcagggctgggtggacgcgctacgccagcgtttccccgaccggcgcctctataccttctgggactacttccgccagcactggcaacgcgacgccgggctgcgcatcgaccacctgctgctcagcgccagcctggcggaccacctggaagacgccggggtggatcgctgggtgcgcggcgaggagcacgccagcgaccacgcgccggcctgggtaagcctgcggcgtccctcagagccccggcgctag

SEQ ID NO: 355198 - DNA, 765 bp, Pseudomonas aeruginosa
atgccgcttgaaccgacgaccttctaccgcacgcacctggccgaactgcaccggctgctgctggccagcccaatcgttcgcacctacctgacgggcacggggatacggttggatggcgtggatctggcacccgccgaccgtttcgagctgccgttcggcaccttctccacggtggagttcgcgcatctgttctcgatcttcgacggcagccgcgtccaccagcaggcagagaaatccccgtccctggacgaagcgccgccggggctgtatttcacgatcatcaatccccggctgatcgagagccagcacaagaaccggctgggcgtgttccagcgggccgatgccgccatcgacctgttcattgaggacatgcacatcgaccactactacctgaacgaacaccaggcaccgccgaccctgggcacgctggccttcgcgctgtgcgccatcacggcgcacctggccgggatgggccgcatcacgctggtggcggccgatggccgaggcaggagcgcccgctacatcggcgcgaaggtatggccgaagttcggcttcgacgcaccgctgctgcccggcgaaaccgcaaacaccgcgcacctggccgattgcacgaccgtgcaggaagtggttgccctggatgaagcgtggtgggcggcgcacggcacgcagcgcaggatggcgttcgacttgacgccgcatagcacatcctggcgaaaactgataccctatgcaggtaggaaagtctccaatgggagccagccatga

SEQ ID NO: 355199 - DNA, 867 bp, Pseudomonas aeruginosa
atgaccccactttcattacgtcatggacgcgacattgtgctcacggcgctggcccccgcgatttggggttctacctacatcgtggcatcggaaatactgcctccggatcgaccatttaccgctgccctgatccgggccttgcccgcaggtctattgctgcttctgttcactggccggatgcctaagcgtcgagattggtggcggttattggtacttagcgcactaaacattggcattttccaggctttgctgttcgtcgcggcctaccgcctgccgggagggttggcggcggtgttgggtgccatacagccgttgctggtcatggtgctggcatgggcggtagatgggcgttcgcctgcacgagccacgttatgggctgcggttgccggtgtgttgggtatggccgtgttgctggtgtcgcctcagactgtatttgagcctgtcggaatcattgcggcgctggcaggcgcggcctgcatggcctccggtgtctggctgacacgccggtggcaactggatatgcctgtgctcgcactgactgggtggcaattgctgcttggcggcttaatgcttgcccccgtggcatggctggccgatgcaccactgcctgcgctgacattttcgcaatggtcaggttacgtctatctgtgtctggcgggtgccttgctggcttatgccctgtggtttcgaggcattgcccgattaccgacagtggcagtggcttctcttggcttgcttagtccgctgacggcggttgtgctgggatgggcattgttgtcccagtccctgactggccttgcctttatcggtttattgacggtactggccagtgtctttgcggtgcagtggacggcagcaaaagcgtaa

SEQ ID NO: 355200 - DNA, 471 bp, Pseudomonas aeruginosa
atgcatgatctgaatccgcatctggcctatgtactcaacctgcgctgggatgtgctggcgttcaatgaccctgctgaccagatatttgctttcggctcgcacccacccgagcggcgcaatatgttgtggttgctctttactgaccccaccgtgcgtgaacgcgtcaatgattgggaagagcaagcgccgttgatgctatcgagttttcgccgtgactttgcccgcgcttcgcaggaaacagatattcaagaactggtaaacgagctggagcgcgtgtcgcccgagttcaagacatggtggcgcaaacacgacgtgcatgccgtgcatgcgccctgcgatggggtacgtaaactggtgattgacagcaaagccataccattcgactacacctcgctgaccgtggatgcagatcgacacctgcggctggtggtctatgctcggcaacaagatggcacggcacctaagcattga

SEQ ID NO: 355201 - DNA, 993 bp, Pseudomonas aeruginosa
atgcgccttcctaaggtcggttcatcatacgcacaagagcgattgggtattaatgcactgcaaaactacgcagcaaaaaatacgcaaatttggagagagactgcaactggtgatgttgggattgatggaaatttggagtttgtgaatcctgatggttttgcaacgggaaaggttattgcggtacaagtaaaatctggcccttcatacttcaagcatgaatcaataaatggttggaaattctaccccgaagaaaaacatcgagcttattgggaagcatttccactacctgtaatccttgtgttgcatgactcggaggcgaaccagtcttactgggccgacgtgaggcaagcccttagaactccggcaaaaactgagaaaagctttatcgaagttccacaatgcaacctattgcaagacactgcacccacccaacttttttctactgcaggagttcaggttgaaccatttatattcgacttggatgaagttttaaatgcactactaaacacctgctcaagagatgcgggatttccgctgagttattttgacctgtttactcatgggctgacaaatatttgtcgcagcatttattacggcatggatatggtttgcaatgcagttgaattcaatctggcatcaaaaagatcagaatttggaatggggatgggctatcaggagcatcatttcttatttaattacgtcaaatttcttcttgctcaaggattggctcaaattgatatttcagattgccttatcgattgggaggatcgagaaatgcaaccacacttcgttgcgccacttactgctcgcggaagagcgcttgtgaggttaattcaccaaaaagaagcagaacttgtcaccgcagggaagatgcctgaagcagatcgtctgcatgtcgctcaagaaggtttttttggcatgcagttcgagtcttattaccggaggtttcctcgtattgaacaatttcaaacggttatagcaacaaccagataa

SEQ ID NO: 355202 - DNA, 525 bp, Pseudomonas aeruginosa
atggctcccgattggccggattcacccgctgccgtggcattgcgcgaattgcagcagaggcttggcggcaaattgcccgaggacagcgccgacctgtttgctgcggtggtggcgatggaacaaggcgaactggtcaagttgctggccgtgtgtgtggccgctaccgtggatgttgtgacaccttgcgccaatacgctgcaagctggcaccgaactggcgcaagccgtggggctggatatggcggcatggtggcagccaagcgccgaaggctattttaaacacatttccaaagccgtgattttgcaggccgtaggcgagtatgcccccgagcatgtcagccgattggaaaaattgaagaaagccgatattgccagcgaagccgagcggttgattggtaattcaggctggatgcctgcggtattcaaaacagatgatacgcaagccgcaccggaggacgcgctagcgcaggatgcaccgattgacgacgacacagtggcgcaagcacccgaagccttggccgcttaa

SEQ ID NO: 355203 - DNA, 426 bp, Pseudomonas aeruginosa
atgaaaacttctcagttctacccggtcatcatgacttcaaaagtggcacaaactgcagcgttctacatgcgccacttcgagatggtggccctgttcgaaagcgattggtatgtgcatctgcagtcatcgcaggataccagcgtcaatgtagcggttctcgatggcagccacgaaagcattcccgaaaaaaaccggggccaacaagctagcggagtattactgaattttgaagtggacgatgtcgatgcagtgcatgcccagctactcgcgcaggggctgcctatgctgttgcctttgcgcagcgaggcatggggccaacgtcacttcattaccgaagaccccaacggcgtcatgattgacgtcatcatgccgattgccccaagcaaagaatttgcggcgcagtacgctgacggtgcaggcgcatag

SEQ ID NO: 355204 - DNA, 615 bp, Pseudomonas aeruginosa
atgcaagagaagaggacatcccgtagcaatcaagagcgcaccgagtccacacggtcggcgctgattgctgctgcgcgacggctgtttgtggaacggggttatgcggcgactggcacgcccgacatcgtgagcgcggccgctgtgacccggggagcgctctatcaccacttcgaagacaaagcagctcttttttttgcagtcacccagcaaatggcgcaggaggtggcgagcgccatagaggctggtagcagccaatcaggatcaccgctagatgcgctgatggacggctcgcatgcttactttcagtcgatggccgaatgcgggcgagcgcagctgctgctgcaggacgcgcctgcggtgctaaacgcgcaacagttggcccaactcagtgacatggctggtgcatacgagttggaacaagggcttggtgcactgctgatgggaaatgatgtcagcgcctccattgcacccgaagagctgcatgctctcacgcaattggtatcggcagccttcgaccggacagcgcaagctctcgctcagaagcaaagcattgcttttcatcaagcggctctgcacaagctcctgcagggcctgtgcaaggtgtatgcgaagtaa

SEQ ID NO: 355205 - DNA, 333 bp, Pseudomonas aeruginosa
  misc_feature (252)..(252): n is a, c, g, or t
atgggctgtcatcttggttttctaggggaaaccaagttggtggcagcaaaacactcattggcgacggcgatacggacggtcaggaaggcgcgcggcttgagccaggaagcgttctccgacgtgtctagccgtacctacatgagttcgctggagcgcgacttgaaaagcccgaccatgcacaagctgaccgagctgtgcgaggtcatggacgtgcatccgctcacgttgctgacgctggcctatgcaggcgangacatggacaaggtaaggcgcgtgcttaagcaagtagagcaagagctgctatctatcaagcaacgggatgttcatggataa

SEQ ID NO: 355206 - DNA, 1254 bp, Pseudomonas aeruginosa
atggataagaagacccaaggcgcgtggctgctgcaccacgcaagaaaacttcaagcaacaacgaaccaagatttcgactcgatcgccttcgctgggaagagtggcacgttgttatccgcaatctctgcggaaaggcaaagcgttgtcacgcaacaacgcctagaagcactcgcacgcgccaaccacatcagccccaaagctgaactccctgcaattgttgccgaactcgcgcggcaaagactaatcctgccgggcaacgggggggtggaagtcctcggcttgactggacatagcgtgcttgagcacacatccagaattttcgatgaaagcagccacgaggcacatgaagaagccgtaatcttcgtatcagagattgcctccgagacgcccacgacggacaaagctatcgctgaggtcgtttccgatcacttgaagctttcacgcaaggaggtcggtgatacgttggatcttgcgaccaatatcggcttctttgactctgagccgatctcggctcaggagaaactgcttttcaatggcaacctgttccggcgcgatgatgcgcggaaggtcaatgcaatcctatcaaccttgaaagcccctgaggctgcgcttctgaaagaagtgaatcagaagcttcaagaaacaggctgcctgccactggagacggtcaacaggattctagggcaggatcttttcgcacgtcttcactccattggtctattcgatgtcagcgtcgtaggcaatgatcagggcaagagccacttcgttacccgtccggctgcattctccaaattcagcaactccattgcggacgacgcgttggatttggccaaggcgctggtagcctcgctcacctacgggatgaccgtcagtagctattaccgtggccgtatccagatggtctcggcactgatgaataagctaatcgcaggccatagcgtcggtcccgccaccgccattggaagcgactatcaagcacttgagttgaaaggcgttgtcgctgtgacgcctgctgataacggcatgttcaccatgaggctcctgaagccggaagtagggcgacttgcacttgccgtaatcgaagatggcgacataacagccgagagcgtttcacatattcctggcgcacgtatcactgaatacgtcgcgccggaattgaatcgagaggtgcagcggaaaaatgccacagaggcagtgaaactgaaggcgcgcaacctactccaagaaattcgtaccggcgggctcaagcgatga

SEQ ID NO: 355207 - DNA, 1020 bp, Pseudomonas aeruginosa
atgaaaagccaaccactaaagggctctgtcgcagaggaagcactgcggaactatttcttaagcattggctactatgttgccagaggcatcaagtttacattccatcgattcgatgtaacggatgtcgatctgtggctgtacgcgcgcaattcgcctctcagcagggaacgcatctgtgtcgacatcaagaacaagaagacgccgcaggctctcgaacgcattttttgggcaaagggcctccagtcagttctgggtcttgactcgtgcattgtcgcgacaacggattctaggccggatgttcgcgagtttggtctccaacacaatgttcgggttttggacggaaagttcctttcgcggttaactaatagcgcacgcagccacaaggagcgcatcaccgaagaagactttcttgcggatcttgaatcgggctctctaggccgattgagtggtgactggcgtggcagatatgaggaaagcaaatctcgcctacttcactccttaaacttcgacggatgcaacgcttggcttgaagacattgaatatttattgacccaaatcgcctccggaaatcgagcatggagactcctgtatgcctcatgttcgcatttcatgatcgcgatggacttcatcctcagagaattcattgctgaggatcaagagcaacgccgccagatcatcgagcgtggaatacgctacggcgtatcagggcaggctttcacggagaaggtcggtcgcatggcggcagcattagtggaaggcgttgcggctcaacctggcctcgctgatacgctgcaacaggaacttcagcaacaggctagtaacgtcaaagccgatctgttggccgagttttttgccagaaacctaacgggctcagcggcgttcgatgtggcgcttgcgttagagtccgcagccttttctccccagactcctacgccatccacgctgccttcacaggcgcaggcagtggttggagtgatcgctgatttttgcggcgtagatcgaaagattgcgctcgcctaa

SEQ ID NO: 355208 - DNA, 1380 bp, Pseudomonas aeruginosa
atggacggctccgtcctgtacctcgccatgccgcgcgtcacgtcttcgatcctgccgacggccgatcaggcgctatggattctcgacatctacggcttcgtcgtggggtctctgctgatcaccttcggcaacatcggtgaccgctatgggcgattgaagctgatcatggtcggagccatcatcttcggcctgggatcgctgggggtggcgtattcgacgacgcccgaggccatgatcgcgttccgcgcgctcatgggcctgggcggcgccacgctgctgccttcggggctggccatcgtcagcgccttgtttcctgatccgcgccagcgcgcccaagccatcggcatcttcgcggcgacgttcgcggcgggcttcgccatcgggccgatcatcggcgggctgctgctccaacgcttcgattggggcgtggtgttcctgatcaacgtgccggtggtgctggccttcctgctggccgcgcctgttctgctccgcgaagtgcgtgcgacccgctatggccgcatcgacctgccgagcctgctgctgtccttcgccggtatcctgctgttcacctattcgatcaagagcgcggcagcggtcgggttcacggcgcagcagatcgcggcgggcatcgtcggcatcgctgcgctggcgctgttcatccgccgccagacgaagatcgtgttcccgctgctggatctcagcctgttcagggatcgcgtcttctcgatcgccatcctgaccggcctgctgtcgctggtggtctggtcagccgcgggatatttgtcgggcatctacctgcaatcggtgctgggcttcgaggtgttcacggcggcgctgctgaccttgccaggtgcagtggtgctcaccgccacctgcatcggcaccagccgcatcgtggagcgcctcggacgcaaggccgcgctggttgccacgcatctactgatcagcgcgggcgtgttcctgctgctgttcacgacgaccgagacgggggccatcgcgttcgtagcctcgacggtaatcgcgggcgtgggctacggcctgtccttcagcctcgtggccgagatcgcggtgtcggccgtgccacccgagcgcgcgggcgctgccggctccatcgcggaaaccagcaatgagatcggcaacgcgctcggcatcaccctgctggggtcgctggcggcgctggtgttccggctgtccgggccggacgtggcgggcaccttgaacgaaaccctcgaccacacgggtgtgactgcgcaggccgtgatacaggccaaggaagcattcctgtcggggctgcacctggccgtgagcgtcggcggtctgcttgccctgctggtcggcgtcgtggcctggttctggttgccacgcaagctgcccgaataa

SEQ ID NO: 355209 - DNA, 618 bp, Pseudomonas aeruginosa
atgtcaagccaaccgaaaacccctgctgccgttgcggattcgccgcgccgccgcctttcgcgcgacgagcgcctgcgccagttgctggacgtgtcatggcaactgatccgtatcgaaggcacggacgcgctgaccctgggccggctcgccgatgcggcaggtgtcaccaagccagtggtctatgaccacttcggcacgcgcaacgggctgctggcggcgctgtatcaggatttcgatgtgcgccagacggcggtgatcgacgccgccatcgccgctagcaagccctcgttgcaggacaaggcccgtgtcatcgccgccagctacgtcgaatgcgtgttgacccaggggcgcgagattccgggcgttctcgccgctcttggtggctcgccggaactggcagcggtcaagcggcagtaccagcgagccttcatagagaagtgccaaaccatcctcgcgcctttcgccggcccgcagggtgtatcgctggcgagcttgtgggcgatgctcggcgcggccgatgcgctgtcgcaagcggctgtggtgagggatatcggcgaagaagcagcgcggagcgagttgcaggaaaccatcttggcgatggtcaggcgcagcaagtaa

SEQ ID NO: 355210 - DNA, 369 bp, Pseudomonas aeruginosa
atgtttgccggaggggatgggcgctccaagctcgactatttgcgtgtattcaagggcaatgaagatctaaaggttgcacacgagaaattcgacaacctcagaaataagcagtatgcacataaggagctagagcacgatcgtcaccaggtctcctattttgtcgataataagggtgtcatcgctatcgacatagatggcgtacaacacacaaggcactaccatcttgccttgactatggatttgctccgatgccttgcagaggtttcctcatacctgaagcaagatattaaggagcgttgcgaaaacctcattgaaaaactgacagagacccaaaaactggttttgatcgaatatgcaaacccggcctga

SEQ ID NO: 355211 - DNA, 354 bp, Pseudomonas aeruginosa
atgcgcgcccgcggcgtgaactggatcgaacgtagtgcccgaatcctggcttgcgccagcctcgcattggcacccacgctgtccctggcggccagtgaagaagacccttgggaaagcatcaaccgtcccatcttcaccttcaacgacaccctggacacctatgcgctgaaaccgctggcccagggttaccagaaggtcaccccgaacttcgttcaggacggcgtgcacaacttcttcaacaacctcggcgacgtgaagaacctggccaacaacctgttgcaggccaagttccacaatgccggtgtggacaccagccgcctgctttcaacagcaccttcggtctggccggcttga

SEQ ID NO: 355212 - DNA, 405 bp, Pseudomonas aeruginosa
atggctgacagacaattgctacacacggcccatatcccggtgcgctggggcgacatggacagctacgggcacgtcaacaacaccctctatttccagtacctggaagaggcccgggtggcctggttcgaaaccctcggcgtcgacctggaaggcgctgccgaggggccggtggtgctgcaaagcctgcacacctacctgaagccggtggtgcatccggccaccgtggtggtggaactgtacgccggcaagctgggcaccagcagcctggtactggaacatcgcctgagcaccctggaagatccgcaaggcacctatggcgaaggccactgcaagctggtctgggtgcgccacgcggaaaaccgctcgacgcccgtgccggacagcatacgcgccgcgatcgcctga

SEQ ID NO: 355213 - DNA, 156 bp, Pseudomonas aeruginosa
atgctcaacgccagccgcccgaagctcaacgcgcaactgcaaatatggaaacgcgaagggctgatcagctgccacaacgaccggatcctgatcaacgacctcggtcgcctacgacgcaaggccgaactgccggccgcgcccctgtcacccaggtaa

SEQ ID NO: 355214 - DNA, 687 bp, Pseudomonas aeruginosa
atgagcacgatccatatcgggccattctcaatcactcaggctgcctgcggactgcattacggggggctgccgcatcaccgttggaccctctactacgggctccgggaaatggcgatgaagaccctgccggatagctatacctcagcagaggtgcgggatgaattctcaggcgtcatcgctgaattcgttgtcgactcccgtcgccgtttcgcgccggatgttctggagttggtgacagatgagggggaaacggtgctggcccgtctctctgtgaaccggttaccggagggtttttcagggtgcatgccggacgatcgattcccctactggctcttgaccgccagccgcccgcgcctcggcttccccgttacgttgagcgaatacacctcgctcgcggtcgaactcagcgcccctccacttgcgtggatcacagggctcctccctggcgaggtactgacacaagacgcagaggagtggcgaccgcctaccagttgggagctacgccacgttgtcggcgaggggtcgtttactggcgtaagcggtgccgctgcggccgctctgctcggaatgtccgcgacgaacttcagaaagtacacagccggggactctgccgcgaatcgtcagaaaatcagtttcgcagcctggcattatctgctcgaccggctcggcgtgaagcgggcgagctga

SEQ ID NO: 355215 - DNA, 1740 bp, Pseudomonas aeruginosa
atgatgatcaacaaggaatacacccacttcggtttctgctgcggctcgggctctggatccgctggcttcaacgacagcaagcaggtactcggcaatatccgtggttcctggcgctgcatcggcggggtggatgtcgaccccgacggcctcgaagacttccacatgatgaccggcgtgaagggcacgctgctggacctgttcacccgcgatcaatacatgcgcttccatggcaaagaaccgccgcgcgactggcgcgaagcgacgccggaagacattcgacgagcggccggcaacgagtttccctatgcggtgttcatcagctcgccatgcaagggtgccactggccttgtcgccgagtctatgagcatgactccgcgctaccaggccctcaacgagctaaccctacgctgcgtgtggttgatgttggaggcctggaaagatgacccggtctctatgatcgtcttcgagaacgtgccacgcctcgcatctcgcggtcgccacctgctcgatcagatcgtgaagctcctgaaccacttcggctatgcagtcgccgagaccgtccacaactgcggcgaaatcggcaacttggcgcaaagccgaccgcggttcctgctggtcgcccggcatgtcgaaaaagtcccggcgttcctgtaccaacctcagacgtaccgcctacgccctgttggcgatgtgcttggtcgcatgccgctcgccggcgacatagatctggccggaccgatgcaccgggtacccaattgccagtggaaaacctggttgcgcctggccttggtgaaagccggcagcgactggcggagcctgaacgactacgtgatcgaggacggctacctccgcgactacatcgttgtgccggaataccactccggcttcctcggcgtgcacggctgggaggacaccgttggaacggttgccggccggtccggacccaccaacggcgccttctccgttgcggacccgcgctacgagcagtccgctcgctggaaccacggccagcagttcggagtgctggagtggagcgataccgcagggacggtcaccgggcagaagtctcccggccagggcccgtacagcattgccgatcctcgccccaattgggcgcgtcacagcaacaacttcaaggtcgtgcgatgggaccgtcacgccggaaccatcaccggcggcggcaagggggtgcagggcggctggccctcgatcgctgatccgcgcccgggcaacgccaagcagaagggtgacgcctacttcaccaatggccactacggcgtagtcgactggaacggctccactggcgccgtctccgccagcgcttgccacgacaacggccgctggtctgtagctgatgcgcgcatgcctgcgccgaatgaccgaatgagctgcgtgattcggagcctcgacggcacatggcaccgccccttcaccacccttgagctggccgccctgcaatcgttcttcgaccctgaggacatctggcagaaggaccccgataccgggctgcttcagcggcacggcgagatattccagatgtacgggaacaacgacagcgcctggcgtgagcgtatcggcaacgcagtgccccgcaaggccggcaaggccattgcggacgtgatgctcaccaccctcatgctcgccgacgccggcgagaccttcacgctgaacgctttgcctgtgtgggtacgcccgctggccacggcgatcagtctttcccgtcaggaagtccagccatga

SEQ ID NO: 355216 - DNA, 207 bp, Pseudomonas aeruginosa
atgcaaaagttgaaaaagatgttcgttcgtggcggcgtggtcctgggctcggtcggcctgctggctggccaggccatggctgaagttccggctggtgccactactgcgttgaccgaagcgcagaaagatggtgtcgccattggcggaaccgtcctgggcgtgatcatcgccattgcggcgttcaagtatatccgccgcgctctctga

SEQ ID NO: 355217 - DNA, 366 bp, Pseudomonas aeruginosa
atgaagattctgaaagggtacgtcctgggcgtagtggacaagggggaaggggacaagcgttgggccatcgttggcatcaaggcgaccgacaaggaccgtgacggctttgacgtggacactacgtacaagcttcgtgtcttcggtgatgcggtgaagaacggcctgcataacgcctatcgcaacctcgctggtgtcgaggtctacgcgccctacaacgacgagttcgacgagaaatacaagcgcattagctactcgctggcaggcgcgcccttggccctgatggaaaagcccctggggaccgcccagccgaagccggctgctcccgcccagccgcaggcggcgcagcccgttaagcaggcttcgtga

SEQ ID NO: 355218 - DNA, 237 bp, Pseudomonas aeruginosa
atgagcgcctacagcctccagggcgtgtccctgtcgtccagcgagcgtcggtcgctccagcttcgccagcaggcccgcgccgctgtcgaccgcagcgtgttgcagcagaccgtcgctcaagcgctccaggcgctcgaaaagcataaggaggagggcggcaaggcctccaacccttggaccactgtcaccagcgaaaagggcacgccgtgggtcggcgacgtgttcgggtgggcgtga

SEQ ID NO: 355219 - DNA, 1170 bp, Pseudomonas aeruginosa
atgtcgcctctgatcaatccggtcccccggatgttctacgactacctcacggtagagcaggtattcccgtaccagctcccgcaggttggcgacactggcatctgctactacgaccggaagaccggcgagcaactgcgcgacacgtctcctagcttcaaggttgagggcagtcactcgacgtcgattcgggttcgggtcgatgggaacaagctccgggttgaagggaacccgagtgcagtcaaccgcttggacaaccttcatggattccagtccatcgctgagtgtgtcgcggtctataacgacatcctccatgagatcaaggacgacaagggcaaccgtctgccgccgttcacggcttgcactgattggggccacctccagaccgaggacggctcgaaaactcggatgatcggcaacggtgcgcgcctgcgccgggttgacttgacgacgaatcggacggtgggaaagggcaatgaactggcctacatccgcgccctgagtactcagcgtgtgggctacaagaatggccacctctacgaagatggttggacctgcgactggcaggcccgcgaccactactacaaggcctacggcaaggctcaggcaatccgcaagttcctgtttccgaagtgcaaacggaactttggcgaagactcccccgaattccgctacctgctcgatctggccgcgtactgcgatcagcagggcgtcgtgcgtatggagcaggaactcaagagtgagtatctggcccgagagcggctggagtggtgggggctttttgatgaaggccgctttgcggcgatccatggggagtttttgaggggattcgacaagctcgaggtgatggcgatggattacgagacgattgctgaacggctgctttctgaagaggttgtagccagtactcaggcggcgaatgcgaccgccaatattgcgatgaagtggatgcactgccctggtatcagcttcgactttacgaagtcgcaaatgaagacctaccgggcgcgcttgaaccggatcggcatcaacatcgcccagccctacgacgtgacccgtcactcggtcgtgatgatccgtcgtgctgaggaaatcgtcaccagcgacgtgctggagctgccggagttctatcggtatgcaccgcgcccgcgtcacttgcgtttggtggcctga

SEQ ID NO: 355220 - DNA, 180 bp, Pseudomonas aeruginosa; identical to SEQ ID NO: 334818

SEQ ID NO: 355221 - DNA, 861 bp, Pseudomonas aeruginosa
gtggtgggcctggatggtacgcgggatgtccgcggcggccaggttcaggttccagtcgatggcgtcggccaggccaagctcggcgatctgtgccttcaactggtcgaggtagttgccgccggcgccgaaggccatttccgcggcggtgccgccggccagggtcaggcgcacgcgctggcgcatctccggcgcgctggcgaacaggtcggcgagggcctcgagcaggtcctcgatgcctttgccgcgatagatgaatccgaagtacagcaggcgcagggtgtccagcgacggcagcggcaccgtggcgatctccaggttgccgtggttgatcacctcgacccgcccgggcggcaggcgcatccgccgggccaggcactcgccgcccaggccggtgagggtcaccaggcgcgtcaggccctgggccacggcacgttcttcgcgcagggtcagcgggtcggcgagcaccacggcggcctggggcaggggagagggcaggcgttccagcaggttcagcggccagggcaggcgctcgcggcgccagaccatgcgctccggatcgtgtaccgtggcgctcagcggcaggcgcgggaagcgcttgcgcagctcgcgcagggcgatgaactcgcccaggcggccgccgccgagttcggcatggaccaggtcgaaggcgttccagtcgacgctgtccagccggctggcgatattcgcgctgtcggccgccacgccggcgagcggcgtggctacttcgatgccgagaccctgcagggcgttgcggaaatgactggcgtagtcggcgatgccattcttttccggcggcaggggcgcgaggagggcgatccgcatcagaacgcgctccggtag

SEQ ID NO: 355222 - DNA, 123 bp, Pseudomonas aeruginosa
atgagttcgttcatggtaaaggccaggacggcgtgggcgctcggtgcccccaatctgctgcgggtgttggcttatcgcatgggggtgatgacagggctcaatcccgtccggcgtttgcagtag

SEQ ID NO: 355223 - DNA, 234 bp, Pseudomonas aeruginosa; identical to SEQ ID NO: 334916

SEQ ID NO: 355224 - DNA, 1923 bp, Pseudomonas aeruginosa
atgctctcagatctcatggttcgccaggccaagacgaccggcaaaacctacaccctggccgattccgatggcctctccctcttcgtcgccgcccacggcgccaaggcctggcacttccgcttcacctggggcggcaagcgcgatcgcatgtccttcggcagctacccggcgctctccctgaaggaggcgcgcgagcttcgcgatgaagcccgcaacctgctcgccaagggcgtcaatccgcacacggaacgcaagcgcaagcgccacgccatcgtgctggcgggcgaacacacgttccaggcggtctacgaccagtggctgacacatcgcaagctgtcgttggaggaaggtcggcagaccagcctggagcagatcgcccgcgtgttcaagaaagacgtgttcccggtgctgcgtcacctgaccatctacgacatcacgcgcgcgcatctgctggacatcatcggcaaggtggaaaagcgcggctcgctgtcagtggccgagaagctcaggacatggttcactcaactgttcacctatgccacggtggcgatcccgaacatgcacgacaacccgtccaaggacttggaggtcgtcgcgttgccgctgccgccagttgatcacaacccgttcctgcgcatgcccgagctgccgatcatgctgcagacgctgcgcaagtatcgcggccgcctgaacacgcagttgggcctgcggctgctgatgctcaccggggtgcgcaccggcgagctgcgtttcgccacgcccgaccagttcgacctcgaacaaggcctgtggatcatcccggtggccaggctcaagcagcgtgcgttgctcaccaagaagaagcgcaagcgcctggtggatatcccgccgtacatcgtgccgctgtcggtgcaggcccaggagatcgttcggcacctgctggaccagtgcaagccagctcaggtctacctcatcccgggcgactggtgcctcaagcatcccgtcagcgaaaacacgttcaacggcgcgctcaagcgcatgggctatgaggaccagctcacgggtcacggcatccgcgcgacgatttcgacggcgctcaacgaactcggctatccgaagaagtgggtggatgcccagctctcgcatgccgatccggacaagatcagcgcgacctacaaccatgccgagtacgtcgagcagcgccgcgtgatgatgcaggattgggccgatcggctcgacctgttcgagcagaaccaagtcgaggtcgccagccggcatctgaccatcacgctgcaaggcctgccgaccatcgctggccaggcggccgcgcagccgccagtggtcgacctcacggcaccgcagttgatcgtgaccgcgccgacgcccgacatgcccgcagcgccggcatcggtgcagcgactgtcggccgtgcgcatgcccgagtacgcgcggcctcggctgtcggaggtgcagcgcgaacgcctgcaggtgctggagaccttcgaggccccccacaacctctcggtggcggactacgccaagctcgcgggcaagtcgcgccgctggattacctacgaaatccaggccggcaacctgctgtcgatccacatgggccaccgcgggcagcgggtgccggactggcagctcgatccgctcaagcgcaggctcgtgcaatccgtgctgaaacaggtgccgcgggggcttgatacctgggccatctaccacgcgctcctgcagccctatgacgcgctcggcgggcgcgccgccatcgaggcggtcaacccgaagaacctgcacctggccgcgcgtctgaccgcggcgcagagcatcgcggcggacgatcccgacgactccgacattccggtgcaggtacggcgcagcgtgcagcgcctggtgcaggacgccatcacggccgataccgccgaagacctgatggaaccttga

SEQ ID NO: 355225 - DNA, 621 bp, Pseudomonas aeruginosa
gtgacatcgatcgatgcctccaccgcgatccgcgtggccgtgctcggtgagtgggtgccttcacaacttgccgacgtgctggcactgcagcgcgccgaagagccggaaacctctgctgcattggtcagatgcgctgcggccgggccggcgagcaagtcgctggacgatggcttcgatttcgcgctgtcgtccacggacctggaatggcctggctgggtgtgcgagccgttgtggcatgacatgctcgccgtagccgtggccaagcgttcacacatgctgatccatcgcgaagtgccgtgccatgaactgcagaagcagcctctcatctgtgcgcaatctacctgcgacgaaccgtggcaggccctagtgcatcggctgatcggcgacgcgccgcacgagcaggtcgtgagcaccttcgacatggcgatgacgctggtcgctgcgggatacggcattgccatcgcacctgccacgcggctggcgggataccagtgccgaggcatcgcggtgcgaccgctggccggcgcgccgcccatcgtgatggcctacctgctgcacacgtgtgcggccctgaccgaaccgcaggagcgattcgcgcgccgcgtccgctccgtttcttga

SEQ ID NO: 355226 - DNA, 1893 bp, Pseudomonas aeruginosa
atgctctcgctgttccagcgcaaacgggtgccacccaccgccggcacaccgcccacctccgccatcgaaactccgaaagggttgatgcggccggagtcggccgcatcgctgctggccacgccgcgtcggcagaagctgctggaacacatctggcagcgcacatcgctctcgcgccgacagttcgccacgctctacctcgccccactggagcgctacgccgagctggtccagcagttcccggcctccgagaaccaccaccacgcctatccgggcggcatgctggaccacggcctggagatcgtcgcctatgcgttgaaactgcggcagtcatacctgctgcctgcgggcgtcacgccggaggcacaggcggtccaggccgaagcctggaccgcaggcacggcctacgcggccctgctgcacgacatcggcaagattgccgtcgatctgcacgtcgaacatgccgacggcagcgtctggcatccctggcacggcccgctgcgaaagccctaccgcttccgttaccgaaaggagcgcgagtaccgcctgcacagcgccgccaccgggctgctctacgcgcgccttctcgatcgggacatcttcgactggctcagcggctatcccgacctctgggccgcgctgctgtacgtgctggccggccagtacgagcacgccggcacgctcggcgagctggtcgtgcaggccgaccaggcatcggtcgcccaggaactcggcggcgatcccagcaaggcgctggtggcgcccaagcatgctctgcaacgcaaattgctcgacggcctgcgtttcctgctacgcgaggaattcaagctgaaccagccgcaggcttcggacggttggctgacccaggatgcgctgtggctggtgagcaaaaccgtctcggacaaactgcgcgcgcacctgctgcagcaaggtatcgacggcattccggcgagcaacacggcggtgttcaacgtgctgcaggatcacggcatcgtgcagccaacgccggatggcaaggcgatctggaaggcttctgtcaccagcgacgccggctggtcgcacgccttcaccttcctgaaactctcgccggcgatgatctgggatgccgccgaccggccggcgccgttcgccgggcaggtgcaggtcgagcaggagccagaagacgcggcgcagcaggttcccgcagcgcctggtgcggcacgcgcgggaccagagcctgcactgtccggcgcgccgccggtcgcacctgtgatgatggccgcggctgcggacaacggcgtcggtgcgctgctcgatctgctggacatggcacctgccacgccggcgtcgaacctgatcccgcccgaagccgccaccggcgcgcaggccggcgccgaaggtgatcctcggggcagcatgccggcagcgatgccgacagcgccgccagccgcaacgccccggccacaggccgagccctccggcaaagacttcatgggctggctgacccagggcgtgcggtcgcgaaagctcatcatcaacgacgccaaagccttggtacataccgtcgccggcacggcctacctggtcagccctggcgtcttccagcggtacgcgcaagagcatccgcaggtcgcggccattgccaggcaagagaagctggaagcatggcagtgggtgcagaagcgcttcgagaagttgggcgcacatcgcaagcagcccagcggcctgaacatctggacctgcgacgtcaccggcccacgcaaatcgcggcggctgcacggctacctgctggcgcggcccgaggcgctattcggggaagtgccgcccgataacccctacctgcgtctcgccaacgaggccccaacgcgcgaaaatcccgcagttcaaaacgataacgataacgacgagcaggaatag

SEQ ID NO: 355227 - DNA, 903 bp, Pseudomonas aeruginosa
atgtcccgtaaaacccgagtccttttcgccgcagcgacagcggtctgcatgcaaatggccgttgcggccggaccgacggtagataccgcagcgatcgagtccgtgacgggactcaagggcgactacaacaaggccgagaacgtcttcaagatcagcaagccgcgcgatgacgtgacgatcagcgtggatcgctggacgatgccccccttcatgggcctgacttcgtgggccgcgttcactccgatggctggcagcacgatgatgatgggcgacacggtgctgttcgaggacgaggtcaatccggccatgagcgccgctcttgaggccggcctggaagtgacggcgctgcataaccacttcttcttcgaccgacccaaggtctacttcatgcacatcggcgggatgggcgatgcgcgtcatctcgccactggggtcaaggctgtgtatgaccgggtcgcgcaggtgcgcgccagccaacccaaacccgcagatgcctttggcggcaccattgccacacccagcagcctcaccgcggcgcgcatcgaggaagtcctcggcgccaaggcgcaggtgaaggacggcatggtcaaggtgagcttcgggcgcgaggcgaagatgcatggcacgcccgtcggcaatgccatgggcgtcaacacctgggctgcgtttgcagggaccgacgagcaggccgtggtggacggcgacttcgcgatgcgtgaggacgaactccagacggtgctcaaggtgctgcggcgagaaggcatcaacatcgtggcgatccacaaccacatgacgcacgaggagccgcgctacgtctttctgcacttctggggcaaaggcaaagcagcggcgctggcgcagtcgttgaaaaggactttggacgcgcagaaagccgtgaaatga

SEQ ID NO: 355228 - DNA, 264 bp, Pseudomonas aeruginosa
atgactaccaaacgcaaagtcgaggtgttcagcgccggctgcccggcctgcaccgatgttgaaacccttgtaaagagcctggcctgcccgtcgtgcgaagtcgatatgctcgacatgcgtgacatcgccgtggcacagcgcgcgaagacgctcggcgtgcgctcggtgccggcagtggcgatcgacggccggcttgccgactgctgcgccggtcgcggcatcgatgaagccagcctgcgcgccgccggccttggccagccgtga

SEQ ID NO: 355229 - DNA, 420 bp, Pseudomonas aeruginosa
atgttgaccatcggcaagctcgccaaggcgggtgacatcagccccgacgcgctgcgctattacgagcgcgaggggctgctcgccccggcaagcaagaccgatagcggctatcgcctctatggcgaggatgcggtgcgccgggtgcgcttcatccagcacgcccaggcttgcggcttcacgctcgcagagattcgcgacctgctgcatctgcgccaggccgacggcgcttgctgcgacgacgtgaagagccgcgccatcgaaaagaaactccagctcgccgccaagattcgcgccatccagaagatgtccgccgcgctcgacgtgctgatcgccgagtgcgctggcggttcgctgccggtcgatgactgcccgatcctggcggcactggaagcggtcagctttgaggcggagcgcacatga

SEQ ID NO: 355230 - DNA, 267 bp, Pseudomonas aeruginosa
atgaagatcgagctgttctttactccaggttgtgccaagtgcgcgggggcgacgacggcgctcaaggcggcggctgaaacgatgcccggtatcgagtggcgcgaggtcaatgtcctcgatgacctcgaccgcgcggtcgatctgggtgtactgacgctgcccgcgctcgccgtggacggcgaattggtgttcaccacgctgccgaccgtcgaacagcttgtggcagaactgcgtcggcgcgatggggagcgtggcgatggagcttga

SEQ ID NO: 355231 - DNA, 696 bp, Pseudomonas aeruginosa
atggagcttgagaccctacgccaactgtcctcccaaggcgtgtgggccgccagcggcatcagcctgctggctgggctgctcttcagcctgagcccgctggcgattgccgcgctgccggtgccgctcgcctacgtgacgcgggcgcgcgagccacgggaggccatccgttacggactggctttcatcgcgggtctgatcactgcgcatgccttgctgggaacggtggcaggactcggcggccaaggggtgcaggcgctggccgggcgctggtgggggctgctgcttggcccctggctgatcattctgggtctgctgtggaccgggtggatcaagttgccgttgccggcgctcggcttcaaggccaagcgtgtcgccagcggctggggtgcgttcgcgctcggcatcccgttctcggtcgccgtctgcccctcctgcgccccggcgctcgtcgtgctgctgggcgtggcggcgggtagcggctcgccgctgttcggcgcggcgatgttgaccagtttcgccatcggacgcgcgattcccctggctctggcggcggccgcgctggagcggatcgagcatatgaaaccgctcggacgctaccaaaggactttcgaactggccggcagcatcctgctgatgctcaccggcctgtatctgctcaatggctggttcgcctttttcccctggctcacctggtag

SEQ ID NO: 355232 - DNA, 399 bp, Pseudomonas aeruginosa
atgaagaccgacccctcgctgcttcggcaaaacacggtcagttggctgacgctgttcgccgcaagcggcacgctgatctgctgcgccctgccgatcctgttcgtcacgctgggcctgggtgccgccgtggcggccgtcaccagcgccgtgccgttcctggtcacgctggccctgcacaagacttgggcgttcgcgggctctgggctgatgctgctggcctccggctggctgctctaccggccgggtcgcgcctgcccgagcgatcccgagctggggcgcttgtgcgagcgcgcccagcgctggaaccggcggattcatggtgtctcggccgccatctggggcatcggcttcttcgccgcctatctggcgctgccgatccgtatctggctcggggtctga

SEQ ID NO: 355233 - DNA, 315 bp, Pseudomonas aeruginosa
atgcaaagaccctatctgaaacacctggcagcagccttggcgctttgcctgcaactcatggccttcggcgcggagcgccaggtggtggacattgccgtcaagggcatgacctgcccgttctgcgcctatgggttggagaagagcctccgcaaggcggacgaagtcgatcacgcggctgcgagcctgaaagaccagaacgtgcgtattgaactcaagccgggcacgcagcccgacatcgcccgctacaagcagcttatccatgacgccggctttacgcccggcgaggcgaaggtatccagggaagaaaccaaatga

SEQ ID NO: 355234 - DNA, 900 bp, Pseudomonas aeruginosa
atgaagccccggcccggatgcatcgcgacggcggcgctgctgtgcgctgcggcgggggccgccaacgcagcgccgctgaccttcaacacagccttgcccatctccaaggacgagtggattctgcgcgagcagttcgtctacatgaagagcaccgacgatccatcaccgatgaaccgccgcatggaggtttccggtctgatgtccgtgctgggctacggcgtcacccgcgactttgccgtgttcgcggtgctgccttatgcagacaagcggctgtcgatgaacgtgggcggggcggacgcgacgcgcagccagtcgggctttggcgatgcgatgttcatgggccgctacacggcctttgaagccaacgcgacggggcataccttccgcatcgcgccgtttctcggcgtcaaggcgccgaccggggatgaccacgcttccgaccgccttggacggctgccgccgatgctccagccgggttctggctcttgggactggcaaggcggcgcggtggcgtcgttccaatccctggattggggctgggacgtccagctcgcccatcagcgcaacggcgaggccaacagcttccgcgccggcgcggtcagccgcctcgatctgtcggtccagcgccggctgtggcccggcacgttgggcgaaggcgtccccagctttctctacggcgggctggaggccaacctgattcatgtcgccaaggatcgggtcaatggggctgacgatccgaactcgggcggcacgacgctgttcctgacgccgaccgtgcagtatgtgacccgcaaatgggtgctcgaagcgggcattcagataccggtctcgcagcacctgaacggcagcgcgctgcgaaacgactacatcctgaccaccggcttccgtctcaatttctag

SEQ ID NO: 355235 - DNA, 279 bp, Pseudomonas aeruginosa
atgaagaaacttgccgcactcgtggccctggccgccacccttgccacgcccgcctgggccgccgtccagaccgtcacgctgtccgtgcccggcatgacctgcgccgcctgcccgatcacggtgaagaaggcgctcaccaaggtcgggggcgtcagccaggttgacgtgagtttcgacaaacgcgaggccgtcgtcaccttcgacgacgccaagacttccatccagaagctgaccgaggccaccaccaacgccggctatccgtccagcgtcaagcgttga

SEQ ID NO: 355236 - DNA, 408 bp, Pseudomonas aeruginosa
atgaacaccgaaccggatagcctgaccatcggcgccttcgccaaggcggccggggtcaatgtcgagacaatccgcttctatcagctcaaggggctactggcgacaccggaccggccttacggcagcattcgccgctacagcggcgctgatgtggcgcgggtgaagttcgtgaaagcggcgcagcggctgggcttcaacctggacgagatcgggcagcttctgaaactggaggatggcacccattgcagcgaggcggcggaactggctgccttacggctggacgacgtgcgcgccaagctgtccgacctgagccggatcgaggcagccttatccaagctggtcggtgagtgccatgcgcaccaaggcaatgtgtcctgtccgctgatcgccgccctgcattgccgatag

SEQ ID NO: 355237 - DNA, 831 bp, Pseudomonas aeruginosa
atgagtaccgtcacgatctaccacaacccggactgcggcacgtcgcgcaacacgctggcgctgatccgcgccagcggcatcgagcccacggtcatcgagtacctgacgacgccgcccgaccgcgagaccttgaaggcgctgatcgcgcggatgggcatgggcgtgcgggatgtgttgcgcatcaagggcacgccctacaaggaactgggcctggatgccgcgcattggagcgacgaccagttgatcgatcagatgctggcgtacccgatcctcatcaatcggcccatcgtggtgtcgcgctcgggcgtgcgcctgtgccgcccctcggacatggtgatcgacctgctgccgcaacgaccggcgggcgagaaccgcaaggaggatggcacgccgctgctggtggatacgccgatcgccggcagcgacccggacctcgccctggctttgcaagaggccgtgcttcccacggacgacctggccgaaccagggcgcagcttcttcgcctatgccacggtgtccggcgagcgcgtgggctacggcggcttcgagcgcctgggccgagacgtgctcgtgcgctccctggtggtgctgccacacgcacgccatcgcggcatcggcggcggaatgttcgcactgctgctgcgccgtgccttcgacgagggcgggcgcgacgcctggttgctgaccacgacggctgcgccgttcttcgagcgcgcgggcttcaagccaatcgagcgcagcgccgcaccggcggccatccttgccacacggcaggccgcaagcctttgtccttcgagcgccgtgctgcttggacgtcgaatgtcactgtga

SEQ ID NO: 355238 - DNA, 1680 bp, Pseudomonas aeruginosa
gtggctgacctgacccagcaagacatggccgccaaactgctggcctccggcttcgagcgcaccagcccaacggctgcggccctgaccgatcccatcgccgacacgccgatggtcgtgacgctggaccagttgcgcccgtatgaccacgacccgcgcgtgacgcgcaacccagcctacgaggacatcaaagcttcgatccgcgagcgcggattggacgcaccgcccgcgatcacacgccggcccggtgagccgcactacatcatccgcaacggcggtaatacccgcctggcgatcctgcgtgagctgtggagcgaaaccaaggacgaacgcttcttccgcatcccctgcctgttccgcccgtggccgcagcgcggcgaggtggtgatgctcaccggccacctggccgagaacgagctgcgcggcgggctgagcttcatcgagcgggccttgggcgtggagaaggcgcgcgagttctacgagcaggagaacggccaggcgctgtcgcagagcgagctggcgcgacgcctcacggccgatgggtttccgctgccgcagtcgcacatcagccgcatgcaggacgccgtgcactacctgctgccggcgatcccgaacctgctgtacggcgggctcggccgccaccaggtcgaacggctcgcggtgctgcgcaaggcctgcgagcgcacctgggagcggcgtgcgctgagccgcaacctgtcggtggacttcgccacgctgttccaggacgtgctcgcgcagttcgacacgcagcccgacaacttctcgccgcagcgggtgcaggacgagctggtcggccagatggccgagctgctggaagcggactacgacacgctggctctggagatcgacgacacggagagccgacagcgtgcgctgaccagcgacccggcaccgccagcggcgagacctgcaccatcagccgcatcggccgcacctgcgcccgagccgcagcggtcttcgtcgccgccatcgtcgccggctaccccttcggtgcaggcgtcggagtccggttcgtccgcgccgacgggcgcaggcgcgactgcatcgagggttgacgccgaaggcgatcagcgggacggctgccagcgcggtgaacgcctacagggccacatcgtgtcgccggcgccgaccaccgagcgcctgcaatccatccagcgcatggtcgccgaccagatgggcgacaagctgcccgacttcgaggccgacgcgctgcgcgccattcccgtgcaggcgggcgggctctaccccatctcggatgtctggtacatcgagcccggcctggacgtaccggatcggctgcgcgtacacatcgcgcagttcgcgcgcgaggtcgccgaggaagccggcgtggccgatcaggtcgagcctagcgacggcggcatcggcttcgcctgcgtcgcgccgccggccgcgcgcgccatgccgccattcgctcgcgcggtgctgacgctgctgcaggcgctgtgcgccgcgcgtgccgcagccgggctcgatcgcgcccggctagccgatgacctggcgcccttgctgtatggcggcggtgcctacccgcgcctgagcgatgccgggctggtcaaactgttccggctgctgcgcctggcgcgtcggcttctggatctggagaccggcgcggcctccagcgaccccggccgcggcgcctga

SEQ ID NO: 355239 - DNA, 267 bp, Pseudomonas aeruginosa
atggcgaacgcgcatgaactggcgagaggccgcaaacgcctgcgcgccctcatcgagttcgcgctaggtgaaggctggcacgtggtgcgcacgcccggcggacacctcaagttcacgaagtcgggctgcgcttcgatctacaccaggtcaaccgcgagcgatcaccgagccggcctcaacgcgcgcgcgcagcttcgacgcgccgaccggcaagctcgggacggcattgccgacgagccgatgcctggggaggacggccgtggctga

SEQ ID NO: 355240 - DNA, 879 bp, Pseudomonas aeruginosa
atgcaggtggtttcgatcatttcgaccaagggtggcgtgggcaagaccacgacggccgccaatctaggcggcttcgccgccgacgccgggctgcgcgtgctgctgctagacctagacgtgcagcccacactgtcgagctacttcacactggccgttcgtgcacccgccggcatctacgagatgctgacggtcaacgagcaccgcgccgagcaactggtgtcccataccgccattgcgcgcctgcatctggtgctctccaatgacgaccgcggcgagctgaacacgctgctgctgcatgcgcccgatggccgcttgcgattgcgccatctgctgcctgcgctggcgccgagctacgacctggtgctgatcgacacgcagggcgcgcgcagtgtgctcctggagatggcagtgctggcctcggatatggcgctgtcgccggtcacgccggaaatcctcgcagcgcgcgaactgcgccgcggcaccttgcagctcatcgaggacatcgcgccgtaccggcacctcggtatcgagccaccgccattgaatctgctcatcaaccgcgtgcatccggtgtcgtcgaacgcgcggctgattcaacaggcgctgcggcaggtgttccagggccaggccggcgtgcgcgtcctcgacaccgacgtgccggcgattgaagcctatccacgcgccgcgaccagaggcttgccggtgcatcgagtggagtaccgacagcccacgggccgtaacgcccctgcggcgctggccactatgcgcgcgctggccggcgaactgttcccgcagtggcaggaccgcttcgcccaagtcagcggtcgcgccgacgcggcaggcacagcagggagcgcgggcgatggcgaacgcgcatga

SEQ ID NO: 355241 - DNA, 759 bp, Pseudomonas aeruginosa
atgccgaaatcgagctgccttgcatttggcaccaagacgtattaccgaccgatcgaggtggcgatccgttgggcgggcctcttgcgttttgagttgcggatcctggaagcgctaggctcgcgcgctattcccgatatgagcgacttcccgcgctggccgatgctgcggctgttcgcggagcgcatcttcgatgcgctggcgcacgatgaactgcccttcggcaaggctggcatcgcacatgaatcgcagcgactggcactcgatgaccctgacttgatcgtgcgtcacgtcgatctgagggcatggatgtcgtactactaccccggcgagcggccgcagttcctgttcgacgagatcgagcgcgagctgcatccggcggtgaacctggcaacgctgaacgtgctgctggccgatcgcgaagcgtccaaagtgcagctcgcagaactcgtacaactgcatgcggcattgcgggctcagtatgaagcgttggcgaaggagcacgccgtccgcatagccgagagcggcggcgaacgtgagcttggactgcgcagcgaatcaacatatctgaacatcatcggcggtctgctgactttgctgttaggcaagtcacccgcgggcaagtcctattcatccttccagaacatggacgccgtggtcagtgcgttgttggcccaccatgaaggacggcccggcatcagcgagcgcacgctgtggagcaagctcgcccaggctcgccgccacttggaggcatcgcgctaa

SEQ ID NO: 355242 - DNA, 1242 bp, Pseudomonas aeruginosa
atgaagtcttggatcatgatgaccttggggtgggcgctggtgctgccgctgcaggtggttgcgcagcccgccactccgtccgacctacctcctgccgaacttgcacgtgcggccatcgagcaggagccttccgtggtgaaagcccggtatgcgctggaagcagcaggccatgcggggcgcaggatcgctgcatcaccctacgagtggtctgtaggagtcgacggccagagacgccgctacgacacaggtggcaattccaacgaatggaccgccaggatcgagcggccgatccgaattggcggcaaagccgaactcgaccaaggcctgggcgacgctaccgagcggatagctcgtgtcgagttggcgcaagcgcggcatgaagcggcgcgtgcattggctgacttgtggatcgactggctggcaactatccaagcgcgagaactggccaaagagcaactcggcttcgccgaatcgagcgcgtcagcagtcgccgggcgccgcaaggccggcgatgcgtcgcttctggatctcaacgctgcgcaagcggacgcagccgaagcgcgccgacagttcgatgccgtgcaggcacaggaggccaaggcgatccttcgcctgcgcgcacgttttccgtccctggtgatggagccgcggtccttaagcgagcccgtggaactagacatggaggaggtgcagtggcgcgaacgggtcctggccgagagcgaaacgctgcggatcatgcaggaatcgctgaagcgggccgaactgacggccgatcgggcacgggccgatcggattcctgatcccacggttggcatttacacggcctcggaggctcgtcgcagtgaacgcatcgtcggtgtcagcgtgagcatcccgctcggagggacctatcgcagggagaccatgcaagaggcgctcaagcaggtagacgtgacgcgggctgaactggagcgccagcgcaaggaagtcgacctggcgattgcggaaaccatcaacgatgcccgcactgcactgcggcgatggaggttggccgagcagtccgcacagatggcccgcgagaacgccaggctcggccagcgtggctatgccctcggcgagggggatctgcaatcgctgctgctgctacgtcggcaatccgttgatgctgtcggcgcatcgctttcatcccgcatcgaagcgttgaaggcgcgcaatcgactgctggtcgatgcccatttgatttgggggttagccgatgagtaa

SEQ ID NO: 355243 - DNA, 303 bp, Pseudomonas aeruginosa
atgcctaagtcctgcttgaccttgattcttgatccgcagattgaggagaagctgctcgacctgctgctcgaagtcgcaggtgatgaactcttcgtcagcacgccggcgttcagccacggcacaacccacgggcggctgtcggaagaggaaaaagtgatggggcgcagccacgcggtccgggtgcagatcctggtcaccgaggaacggcaggagcaactcctgcaactgctgcgagaacgttttgccggcaccggattgcgttactgggcaacaccgttgtcgatcgatggagagattgcatga

SEQ ID NO: 355244 - DNA, 1125 bp, Pseudomonas aeruginosa
atgtcttaccaatcttcactttggacgcgcacgctctgcgcttccgcaatcgcgttctctctctcgtcgacggccttggctgccgacgagttcgccgtttccaccgcgcagatgcaggccctgggcgtacagctacagcgcctggacaagcctgcatccattccgggcatgacctatccagcccgcgtcgtgctgcctccctcgcaggaatacgtcgtcagcgcgccgctggccggcgtggtcgatcaattgctgatcggtcagaacgaagccgtcaagccggggcaggccttgctccgcttggccagcccggaattgggcgagcagcagctcaagctgatggaagcggcctcacgcaaccgcttggcgcaacgaaccctgcaacgagagaagcaactggcatccgaaggtatcgtgcccgagcgccgggcgcaggacgcacagaacgccgccgccgaggagcaagcccgcgtgcgacaggctgaggccgccttgcggctggccggattggatgccgcatccatacgccgcgttgctgaaggcagcgccatgcaggatgcgctagtcatccgggcacgcgccgggggcatcgtgaccgagctgagcatcaagcccggccagcgcgtagcaccctccgatcccttggtgcgggttgccgacaccggcaagctgtggctcgacattcaattgccggtggagcgtcagtcgcaggtgacggcacgcggcggtcaagtgggcatcgtaggtcgggatgcgagcgccgtcaccgcaagcctgggcagcacggtcagcgacaaccagaccatcgtgctgcgcgcgcaggtcacgcgcggggcggcgttgctgcggccgggcgagttcgtgcaggcccaagtggcctttgccggtggcggcgaaggctggccggtgccggtcgccgccgtggcgcgacaggacggcaaagcctatgtctttgtgcgcaccgacaagggcttcgtggccacgccggtggaggtactggacagcgccggccaggccctgcgcataaagggcgcgctgcgccccggccaggagatcgccatcacgtccgtgatcggcctgaaagcagcctggctcggcaagggcggcggcgagaagggtgaatga

SEQ ID NO: 355245 - DNA, 363 bp, Pseudomonas aeruginosa
atggccgccgccgattcccgaacaatcctcgatatgccgagcgtctacggtgtgcccgtcatgcacctcggcgttgtgcgcatgcacgtcggcgagggccagaccatcgacaccgaagtcatggtgatgcgcatgcaacggtgctcctacctgatcgaccaccagcagcaacaccaggaccagtcgcgccatccatgcgaatgtgcgcacgacagcgttcgctggcgtagcgtgcaccgtggctgtcggggatggaggctgctggattgtcatcgtcacgtaccagcgatcttcacccgcaacagcttcacggaattcaggaacaccaggacgtcagggccgaggtggatgaaggcggcctga

SEQ ID NO: 355246 - DNA, 1872 bp, Pseudomonas aeruginosa
atgaaccacctagctgatacatctaagagtagcgtcctcgggctcatgacgcgggagcgctggatcgaggtcgggcgcatcgtgttgacgggagccgtcgcactgctctattggcggcagcttgtcccgctctacgtcctgtgggcagcggtcggcatcggcctttacccgctagtcaagaccgggctgattgatctgttcaccgaacgaaaaatcggtaccgaaatcttcgtcacgattgcaacgctcgtcgcggtgttcggcggcgaaacggttgccggcgctgtgttgatggtcatcatcctcattgccgagttcatcgccgagttgaacactgatcgcgcgcgggcatccatcaaggaactgatcggcgctgtgccgcagacggcactggtccgcgaggatggcacggagcgcacagtgcccatcaccgcggtcaaggccgggcaagtcgttctcgtgcgtaccggcgagaagattccggttgacggcgtggtggtcggcggcagcgctgcagtgaatcaggcgccgatcactggcgaaagcgtgccccaggacaaaaccgagggcacgcaagtcttcgccggaacaatcgtcgaatccggtgcgatcgacgtgcgcacggatagggtcggcggcgacacgatcttttcccgcatcattgccttggtcgagagcgccgagtccgaaagagcaccagtacagaagctggcggacaaggtggcgagctggctgatcccggtcgttctgatctttctggtcggcgtattcctcgtcacgcgcgatgtctcgaaggtggtgacgctgttgatcttcacatcgccggcagagcttggcttggcgacaccgctcgtcatgattgccgcaatcgcccgcgccgcgcggagcggcattctgatcaagggcggcctctatctggagctgctggcgaaggccgacgcggtggtctttgataagaccggcacgctgaccgcgaataagccggaggtcgtacaggttcagtcctttgacccgaccctcaatgaggacgatcttctgcgccttgcggctgcggcagaccgacgctctgcgcatccgctggccaaagctgttttcgagggtgcgacgcgccgaagcattcaggtaccggagccacagacttttgaacagttgcaggcacgcggcgtcaaggcgaccgtcgacggcaagatcgtactggtgggcaatccggcgctgctgcttgaagccggggtgacgatcgaccaacctgtcgcagagtccggccgcaccccggtgcatgtggcggtagacggcaagcttgtcggtgtcatcttcattgcggacacgttgaggcagggagcgcgtgcggcgattgcctcgctcaaggaaagcggcgtcaagcgtgtcgtcatgttgacaggagacaacgccgcaacggccaacgcgatcgcgggcgaactcggagtagatgacgttaaagccgacctgatgccggagggcaaggtcgtcgcgatctcagaacttcagaagcaagggctcaaggtcgccatggtcggcgatggcgtcaacgacgcgcccgcactggcgagcgcagatgtcggcatcgccatgggcggcggcggtgcccaagcagcccttgaggccgcagacatcgcgttgatgaccgacgacctgagcaagatcgtggctgcacgcagcattgcacgccgctcctaccgcaccatccaggagaacctgtgggttggtgtcggtgtcgtgcatgtgctgggaatcaccgccgcgttgctgggatggatcggaccgattcaggccgccttcatccacctcggccctgacgtcctggtgttcctgaattccgtgaagctgttgcgggtgaagatcgctggtacgtga

SEQ ID NO: 355247 - DNA, 1326 bp, Pseudomonas aeruginosa
atgctgcagattcttgccaaccgcacgtaccgacacctgtttctcgcacaggtgatcgcgctcgtcggtacgggattggcgacggtggcgctcgggctgctggcataccagttggccggcgcggatgcgggaacggtgctcggcaccgcattcgcgatcaagatggtggcctacgtcggtgtggcgccggtcgcaactgcgctggctgaccgattccctcgccgcacgatgctggtctgtctggatctggtacgtgctgccgttgcgctactgctgcctttcgtttcgcaggcgtggcaggtctatgtcctgatcttcgtactgcaagcggcgtcggcggccttcacgcccaccttccaggcgacgatccccgacgtactgcccgatgagaaggaatacacccaggcgctctcgctttcgcgcttggcctacgacctggaaagcctcgtgagcccgatgctggcggcggcgcttctaacggtcgtcagctttcacaacttgttcgccggcacagtcgtcggctttcttgcgtccgccgcgcttgtggtttcagtcgtgctgccgagccccaaggcgagcgagcatcgcggcatctacgaccgcacgacgcgcggcctgcgcatctacctcgcgactccccggttgcggggactatgggccgtgcaggccggcgtagcagcggccggtgccatggtcttcgtgaacaccgtggtgctggtgcagtccgcttggagcttgagccaaacccaggtcgcattggccttggcgacattcggtgcagggtccatggtggcagcgctggccttgccccgggcactggagcgcttacccgatcggccagtgatgctcgcaggtttagccgtgctggtgctgggcctggcccttgggtcgatcgttcagggaatgaatggcctgctgccgttgtggttcgtgctcggccttggatactccgctgctcagacgccttcgggtcggttgctgcgccgctctgcgcatccagaagatagaccgtcggtgtacgcggcgcagttcgcgctatcacatgcctgctggctggtgttctatccattggccgggtggcttggggcaagagcggggcttccctgggccttcgcagtgcactgtgcggcagcgatcgtcgcgcttgtactgaccctcaagctatggccggccgatgacccggaagtgcttgagcatgagcaccatgacctaccgccaggtcacgcgcacgcggatggcaccgagccaaggaccgcaggactgcgccatacccacccctatgtggtggacgacttgcacccacgctggccgggcttagaacgatga

SEQ ID NO: 355248 - DNA, 285 bp, Pseudomonas aeruginosa
atgcacacacatcactccgatacacatcagtcacatcccgcgatcgttaagcggctgcgccgcgccggaggtcatctgaacagcatcgtggaaatgatcgagcaaggccgctcctgcctcgacatcgcacagcagctacaggcggtggagaaggcgattcagcaggcgaagaagacgctcattcaggaccaccttgatcactgcctggaggatgtggttggccccttggcgcgcgatcaacgcgagtccatggccgagttcaaagagatcacccgatacctgtga

SEQ ID NO: 355249 - DNA, 1302 bp, Pseudomonas aeruginosa
gtgctggaagtcttcgagttcgaggtcacggcttcggcgtcgaattcgacgcttgcgcgcatcatccatgctgtcgaggaagcgcaggcgacgcgcgcgccgacgcagggcttcgtcgaccgcttcgcggcggtctacacgccggcgatcttcatgatcgcgctgacggttgcgctgctcggcccgtggctgctcggctggagcttgatgcaggccatctacaaggcgctggtgctgctggtcatcgcctgcccctgcgcgctggtgatctcgacgccggtgaccatcgtcagcggcctggcggcggccgcccgtcgcggcatcctggtcaagggcggcatctacctcgaagaggcgcgcaagctgaaggcgatcgcgcttgacaagacgggcacgatcaccgagggcaagccgcggctggtggattgggccgtcgtcgatctggaaaccgaggcggcgcaggccgaacacgtcgccgtggtgctggccagccactccgaccatccggtctcgcgcgcgattgctgccggcctgaagcccaacggtgtcgaggcgcgggacttcagggcgctggccgggcgtggtgtgcaggccgaggtcggtggcgtgacctatgtgctcggcaaccaccgcctgatcgaagaacgtgggcagtgctcgccggcgctggagcagcggctgaagcagcacgaggagatgggccgcaccgtcacgctgctggccaggccggagagggtcctcgcgctgttcgcagtcgccgacaccatcaagccctcctcgcgcgaggccgtcgcgtcgctccaggcgctgggcatcaccccggtcatgctgaccggcgacaaccaggccaccgccacggctgtcgcgctggaggccggcatcgcgcaggcacgcggcgacttgttgcccgagcacaagctcgaagcgatcaagacgttgcagcgcgatctaggaccaaccgcgatgaccggggacggcatcaacgacgcgcccgctctcgcgcaagccgacatcggcgtggcaatgggcgcggccggcaccgataccgcgatggaagcagccgatgtcgtcgtgatgaacgatgatctgcggcgcatcgccgaaacggtaaaactgtcgcgttcgacccatgcagtgctgtggcagaacatcacgctggcactcggcatcaaggccgtcttccttgtgctcgccgtctttggaaacgcaacgatgtggatggcggtcttcgccgacatgggggccagcctgttggtggtgctcaacggactgcggttgctgggcaaagcgcagaaagcctga

SEQ ID NO: 355250 - DNA, 279 bp, Pseudomonas aeruginosa
atgaatcacacagtcagggagaagccaaagctcctcgctcgtgtgcgtcgcatccgcggacagctagaggggatcgagcgtgctctggaagccgaaaagagatctgccgaggtcctgcatcagatcgttgcggcacgcggcgcgctgacgggcttgatgcgcgaagtcatggaggggcacatcaactcgcacatcgccaatccgcaggaccccggagacggtacgcgcgagcaaggcgctgcggaactgatcgcaattctgcgcagctatatgaagtga

SEQ ID NO: 355251 - DNA, 909 bp, Pseudomonas aeruginosa
atggagttcaggttgttgcgctacttcatcgccgtagcggaggagttgcacttggcccgagcggccgaacgtttaggcatcgagcagtcgccggtgtcgcgtgcgatgcgcgacctcgaacgtttgcttgacgtgcagttgttcgaccgcagcacgcgccaaacgcgcctgacctgggctggcaaagtgctgttgggcgaagcccggcgcgtgctcgcaacggtcgatcatgcggtacaggcgaccaagagcgcggcccaaggctatcagggcacattgcgcatcggcatctgcgacagcctggcccagccgcgcatcgcgttgctgttggcccgtagccgcgaggaagagccagagttgggcatccgcgtctttgagttgccgttctcgcagcagctcaaaggcctgcacaacgacctgctcgacatcggctttgcgctatcggatggagtcaacgacgggctggtggccgagccggcttggagcgatccgctgtcggtgattgtgccggcgcgccatccgctgcttgctcatgtccaagtcaagttgcaggatgccttgaagttcccgttggtgctgtgccacccggatgcaggttcgggctgtcacagccaaatccaggcggtgctggatggagcagccgtaacacccaaggtagccgaccacgtgacgagcctgggcgtgatgttgacactggtgggcgcaggctatggcattggtttcgcgatcggttcgcaggtgcagacttggcagcgcccggacatcgcaatccggccgctggccggcacggcgccgacgctgaccacgttcctgctgcgccgccagggagagccgtccgagccgatgaagcgcttcatcagtcgcgtgaaggcgattggcggggcaccaggcggtgagactggcgcttga

SEQ ID NO: 355252 - DNA, 297 bp, Pseudomonas aeruginosa
gtgcagcagtccgccgagctggcgccgcacttcgagaagggcctgcacggcctgcaaggcgcgaagaacgtcatcgacatccgcaactgcggcctggccggcgcgatccagatcgccccgcgcgacggcgatccgaccgtacgtccgttcgaggccggcatgaagctctggcaacagggtttctacgtgcgcttcggcggcgataccctgcaattcggcccgaccttcaacgccaggccggaagagctggaccgcctgttcgacgcggtcggcgaagcgctcaacggcatcgcctga

SEQ ID NO: 355253 - DNA, 1407 bp, Pseudomonas aeruginosa
atgcatagcgaagaccaacgccccaacgacctcatctacggcctcgacgaccggccgcgcccgcttcccgccttccttgccgcgctacagcacgtgctggccagcttcgtcggcatcgtcactccgccgctggtgatcggctcgctgctcggcctcggcgagcacctgccatacctgatcagcatggcgctgatggtttccggcgccggcaccctgatccaggcgcgccggccgttcggcatcggcgccgggatgatctgcctgcaaggcaccagcttcgccttcctcggcgccgtgctggccgccgggatgctggtgaagcagcgcggcggcggtcccgaggagatcctcgcgatgatcttcggcgtgtgcttcttcggcgccttcgtgcagatcgtcctcagtcgtttcctcggccatcttcgccgggtgatcacgccgctggtcaccggcatcgtcatcaccctgatcggcgtcagcctgatcaaggtcggcatcaccgacctcggcggcggagccggggccacggacttcggcgcaccggccaatctcgcgctgggcgcgctggtgctgctgagcatcgtcctgctgaaccgctcgcgcctgccctggctgcgcctggccgccatcgtcatcggcctggcgctgggtaccctggcggcctgggcgaccggcctgttcgttccgcgggcgttgcccgagctgccgctggtcagcctgccgcagccgttccgcttcggcttcgccttcgactggatggccttcctgccggtggcgctgatctacctgatcagcagcatcgagacagtcggcgatctgaccgccaactgcatgctctcgcggcagcccctggagggaccggcgtacctgcagcggttgcgcggcggggtgctcggcgacggcgtcagttgcctgctggcagccaccttcagcgccttcccgaacaccaccttcgcgcagaacaacggggtgatccagctcaccggggtggccagccggcacgtcgggatctatatcggcggcgtgttgctggcgctcggcctgttcccctgggtcggcgcgatcctccagcagatccccaagccggtgctcggtggcgccaccctggtgatgttcggcagcgtcgccgccgccggcatccgcattctcggccagaccgcaatggaccgccgcagcgtgctgatcatcgccgcctcgttcggcgtcggcctcggcgtggccgcgcagccgaccctgctcgaccagatgccggcggtggtgaagaccctgttcgactcggcgatcaccagcggcggcatcaccgccatcctgctcaacctgctgctgcccgaggagcgcgttgccgaagcggcgcaggccagcgcgaagggcggcgccctggcgcgctggcgcaagccgctgggttga

SEQ ID NO: 355254 - DNA, 639 bp, Pseudomonas aeruginosa
atgaaggcagcagcagcaggtgccgccaatgcaattttcttcaaccagggccaagtatgttgcgccggttcaaggctatatgtgcaacgcaaacatttcgataatgtcgtagccgatatcgccgatatcgccaatgccatgaaactgggtaacggactggatacatccgtcgagatgggcccattaatttctgcacgccagcaagatctagtttacgggtacatcgaaaagggccgcgaaagcggtgcaacgattgcctgcggcggcgagcaatacgggcctggttatttcgtcaaacccacggtaatcgttgatgtcgatcagaagcattcgctggtacaagaagaaatttttggccccgtgctggtggcgattccgttcgatgatgaagccgatgcattgcgcatggccaatgacagcccatatggattgggtgcaagcatttggtcgaatgatctggcagcggtacaccggatgatcccacggattaaatcgggctcggtgtgggttaactgccacagcgcgctggatccggctctgccatttggtgggtacaagatgtccggggtcggacgtgaaatgggatttgcggcgattgaacactacaccgagctgaaatcggtattgatcaaattataa

SEQ ID NO: 355255 - DNA, 264 bp, Pseudomonas aeruginosa
atgctcatgccgatcatcgccatcgccttggtccggtgctgctcgcgggtgaggtcggagagcagcgccatcaccgccgccgagatcgccccggcgccctgcaggacgcggccggcgatcaccccccagatggagtcggcattggccgcgagggccgcgccggcggcgaagatcagcagcccgacgacgatcaccgggcgccggccgatgcggtcggaaatggtcccgaagggaatctgcaggatcgcctgggtcaggccatag

SEQ ID NO: 355256 - DNA, 606 bp, Pseudomonas aeruginosa
atgcaccagcgcccctttggccaaacgacgtgcacgcccgatatcagcaacctcatcctcatagtgaagatcgaggcgcggacgcagcgagatgtgatgcagatgcccttgcttcaccacatccagaagccgctcctcaaagggctgcagatggctcttggcatcgatgatggaagctggcatcaaaggagacatcaaaggcgcctgcagtgcctcggcatcaatcgtcgcaatgaccttgctcagcaattccgttgccgccgccagacttttttgcggcggcgtaaaagtgcaagcctcatcacccaactggcagcgctgatcaccatcactcaccagcacccccgtaaataccggtgtatggccattgaatgcaggcccgtcattcacagactgatagcggccgggctgaatgagtgccggcaactgccggcactgctcacccgtaaaacgatcaaaccacatcagctacggccatccaggcgacgaatatcagcctccaacagctccatagacttgcgcggatcacccgccagatcagcgctgatccagaagtcctccagagcgcctttcagattgcgcagcgtctcggcagaaacgttgtag

SEQ ID NO: 355257 - DNA, 234 bp, Pseudomonas aeruginosa; identical to SEQ ID NO: 341518

SEQ ID NO: 355258 - DNA, 663 bp, Pseudomonas aeruginosa
atgaagcggctgacggactatttgcgcgcgctggccacgatgtacggggcggaaagcgcggtccactttgagcgggtgaaagagggatctgctcagttagtcgcctatgtagaagacgatcaataccctgttgtactcaatcaggttagagaagtgtccggcgggctgggccccaaaaaggctcaggcggcattccaaaagctctcagaactgatgtccgaggacaggacgggagcttcgctgcgtacgttaggcggggctcagatatttcagtttcctaaaccccaggaaactgaagatgctcttcgcgtggttaaaccatcatctgtccaaggccgcctctacagcgttggaggcaaagatgaaacggtaccagtgcgattggaaggcgccaatggcgagacactctactgcgaagccgacatagaggtcgccgaaaacctcgccaaagtgatcttcaagactgtacgcctggagggtaccggcgagtgggtcagactcgacagcgggcagtggcgactagtcaagctgaaagtgaagacgttcacactgcttgaggacatcagtttcaaagaagcggttgcaaggcttaaagctgctggaggggtgaaatggagcgcttcacctgacgcgcattctgagattcttgggagtaggggctag

SEQ ID NO: 355259 - DNA, 252 bp, Pseudomonas aeruginosa
atggcccctgctatccgaagcggctgggcggtctggtgtgagccgaaccatgcactcattcccggcgaatacgtaatggttcgccgcgttaatggcgaatgcatggtcaaggaactcctgtacgagaacccgactgaagtcagcctcatggccgttaacgacggctatggccgcctgaccattcccagggaagagatcgagcaaattcactacgttggcggcatagtgccccctagcagaatcagatactga

SEQ ID NO: 355260 - DNA, 228 bp, Pseudomonas aeruginosa
atgaaactgatcgactacatcaagcccatgaccaaggaggagctagacgccttcgcggctcgttgcggctcgacggtcgggcaactcaggcaggtcgcttatggacggcgagcaagtgctgatctagcgatccgtatcgatatagctagcgatggtgtcgtcaattgcgaagacatccgtgacgacatcaattgggcctatctccgtgggaggcagcgagccgcatga

SEQ ID NO: 355261 - DNA, 261 bp, Pseudomonas aeruginosa
atgagggtggtgctgatgctggtgatggttgcgctggcgggatgcgccggccggcaggaagccgagccgcgcacggtgcgcgtagaggtgccggtggcggtgccatgccgggtgccggcggtggaggtgcctgcatgggccacgtctgggctgaggaaaagcgatgacctgcaaacgaaggtgcgaacgttgttggccgagcgccggcagcggatcggttacgaaaagaagctggaagcggcagtgcaagcgtgtaggtag

SEQ ID NO: 355262 - DNA, 438 bp, Pseudomonas aeruginosa
atgaaactttaccccatacagctcgccaacatctttgtcgatgaagttcacgctgtcgtccatgaccgcgttgcgttcgaggacaaagactaccctcgcgacttcgagtacagcctgtacagctctgaatacaacgaagagaaatcgactatctccgttaaggtggaattcgaaatcaagccttcaactgacgaagtcgaccgtcctttcagcatgaaaattgttgttaccggtcagttcaaggtggatgccaaagtattcccaatgaagttcctcgacgactgggcaacaaataacgcgccggtggtactgattccctatattcgtgaaaatgcttacacgctgtctcatcgaattgggttcgaaccgatcatgctgcccatgattgaggttcccaccgtcaagattgtcgctccgcaacaatccgagtcagattaa

SEQ ID NO: 355263 - DNA, 315 bp, Pseudomonas aeruginosa
atgtctttcgatcaactgctggaacgaagcctagccaatcaggacagcaccactgtggagttcctgtcagcttgtagccaacttgacaccctgattcattctcatgaattggaggaagctcctgctgaacgttctctgcttaaacagcagtatacgatcagcttcaagttcgactatcacgttgactaccacagggaagtttccggagcgatggagggcggcattcatgccgccctttccgcatgcggtaaggcgctccgcaagctcaccgagacgccggagccgtgcccgccctcctacgcgtatgctgcctga

SEQ ID NO: 355264 - DNA, 363 bp, Pseudomonas aeruginosa
gtgcaggtgaatgtggaggtggaggatgaagagattctcaatctcgacgatccggagcaccacctcaacctgcgccaagaactcgtccagttcgcggtgaagtattttgatctggacgacatcttcaagctgacgaaaggtcagtttgataagattgaaaaactgctgtatgggatcgtagacgaatacatacagctatatgaagcagctctggagggtatcaaggtgaagctggtatttaagaaccagcaccctccagtgagggacaagcttgccgctatcgtgggcaatgcgagttgcttctcggttagggatacgacatgcattcttgatatgcgcgtcgtcccaatagatggggtatga

SEQ ID NO: 355265 - DNA, 924 bp, Pseudomonas aeruginosa
atgctaacgatggacaacgaattgatgaatcaagctgtggtcactcagcccccggtcgagcaggagcacgactctgtaaccacactgacgcaagcgaggttcgagaggctgctggcagctcttggcgagcctcagtatcgaggcgaccgctatgcgatctacaagggggactgccgcgacctgctgacccagcttccgcacggatcaatcgacctgacttttacgtcaccgccgtacaacatcggaaaggagtacgaaaaggtacgtccgatggaggaattcatcgattggtgcgctgactggattgaaaagatccatcacgccacggcggctaacggcgcgctgctactcaacgtgggctacgtggcgttggctgatcgtgccaagtccattccgattccgtacttgttgtggaaccgtgtgcccttcttcttgcagcaagaaatcgtctggaactatggtgctggcgttgcagcgaagaagtttctttctcctcgaaacgagaagctgctttggtacgtcaaggacgctgaaagctattgcttcaatctcgacgatatccgcgacccggacgtcgcgtacccgaaccagaagaagaaagggaaactgcgctgcaacacgattggcaagaacccttccgacgtgtggcaaattgccaaggtgacctctggcgaaggccgagcatcgaaagaacgcactccacatcccgcgcagttcccgcttgatctttgcgagcgcgtcataaaagggttttctcccgtggatggcatcgtacttgaccccttcctcggttctggctcaacaattgacgcatgcctaagatggggacgctactcaatcggctttgagttgcgtgacgactactgcgccatagcagcagagcggattgaagattcccttcgacaatccgcgtcgctgttctag

SEQ ID NO: 355266 - DNA, 753 bp, Pseudomonas aeruginosa
atggcatctccttaccttggagcccctgtggatcagtgggccaacatcacacgacagcttgttcaacagcaccccctcacgcctgcattgatccatgacgcagcgatgatttcctgggatcgcctttggaacacatgggttggcgataggaatgtgggcttccctattgccgaaatcgaccctcctgcaacagtcatcggctatatgttcgagaagctgttcgccaaagaactagctgtacgcttgccgggagcatggcgcggtggcgtgggatcagagaaagacctgcactgcctccagaacgagtcgctctcggtggagatgaaagcatctgggcagttgggatatcggatttacggcaatcgcagctacgggcaggtgcttgagaacgctgacgcagcgaagaaagacaagtctggcttctacatcactgtcaatttctacggacagacgctgacgctactgagattcggctggattgactctaccgactggcaggcccagaagtcacctacagggcagatggctggattgccgccagaggtctatcaacacaagctattgcagatcgatgggccgtacatactcaatggccctgtgcaactggttgaaggtgtcggggcgaaggctgctgaagaattggccgctggcggtgtcagcacgatcggcgacttgattcgagctacgaatctgccccccaggtaccaaaaacatcaagtcgctgcccgccagcagtatcagggcctgtactag

SEQ ID NO: 355267 - DNA, 243 bp, Pseudomonas aeruginosa
atgaagccgaacttccaagggttcattgagccgcgcatgtggccgcaggacggtggcacgcggcgcgaacccgtgatggacatggacgccaagccaccccgcgccgttcgctatgtcggctggcggcgctgcatgcgctgtggtcagctcttttggtcggaggacgtgttgcgcttgcgtctctgcacgccgcaaccgaatcggcaaggatgcaggagcaggcaagacgacgacggcatctga

SEQ ID NO: 355268 - DNA, 180 bp, Pseudomonas aeruginosa
atgaagaacgacaacctcgaccacgagaaccgcccggtcaagtacggcatcacgcccgacgagttgcgtctgattcaacagcgccgcatcgaggcgcacgcagaccgcgagactaacgaagcgctgaacctgctccgcgcggtcaagctgggcgaggcgctgcgcgaggcacgggagtaa

SEQ ID NO: 355269 - DNA, 993 bp, Pseudomonas aeruginosa
atggccgtcacgcgacaccagaatggagcggttgccaccttcgaagcccttggccttcgccaccttatcccggctgaactccgcctgcgtcggtttgagggtatctgcgggaactgtctcttcctgatgctgcacgccacgagcgctcaggaagttcaccatcgcgccgcggtgctcggccttgatctgcggcatgtcggcgcgagggatacccgcggtgcccgattccttgctgaactccgcccagccttcgccgatgtccttgccttcgatgctcggggccttctgcgcggcctgctcggacggcatcaccagcgtgccgccgaactgcgccatgtccgcgtcggtgcgggtcttgctcttctggaaccacgcaccgcgcccgatccattcattggtgccggtcttttcccagtacaggcccttctccggcgcgtgctcactcgggcggcggcgggtgccgatggcctcaccggacagttcctgctcgagcttcgccttggatgcctgctggccaagatccaaggtgcgcttggtttcgcgcgcctggagctggcgcatttcggtgtccagcgggcgcatggcattggtcaagcgctccacttcggaagtgttgccgccctcgcgcgccgccttcaactgcggaaccatggcattgaactgctgcgccaggtcggcgtagcgtgcttgatcggcggcgggtgcggcggtctgctggaccggctcggccttcggcgcttgcgccttgtcctggcgcaccttggcgatggcgtctttcaggttggacggcttcgcggcctctatcgcaggcgcagacgcggccggtacggattccgctgccggcgccggcgatgcaaccggttgtgcggcttgcgcctgctgcgtgtcagccttgccttgggcctgctggatgtcgtcctgcacaccgattggcgtcggggcttgctgctgcgccgcctggtccagggcgaagccgcgagcacgggcggctag

SEQ ID NO: 355270 - DNA, 687 bp, Pseudomonas aeruginosa
atgagtgaagccaagctcaagccctgtccactctgcggcagcacgaacattcgaatgctggaacccgagctgctcgacaccgatgcctggaactgtgccattgaatgcctggactgccgggttcacatcgggccgtcctactgcgagccagacccgttaacagcaaggtattcagcacaggtcgactggaacaggcgcccaagcgcaaaagcccccgcggacgagcgtgagcagttcttgatggccaacctgctcgccgccctggaggtcgcactgggcaacgtagcagccctggctattgtcgaccgggtacggcaggtcgcagaccgaatttacccaacttcaaacctctcccctgttccgcaggcctggctcgatgtacaggccgagcgccggcgccagatcgccgtcgaaggcttcgataccagcaacgacgacgctagcgctggccagatcgccctggcagccggctgctacgcgctccatgccggcggcatcggcaccgactggccgggcggcattcggaatggctctgcactgttctggccctgggacgaagagtggtggaagcctaagtcggcgcgcgaaaacctggtacgcgccggcgctctggtgctagccgagatcgagcgcctggaccgctccgccaccgagcagggctcaacctgctgcaaggggagcgcgtaa

SEQ ID NO: 355271 - DNA, 234 bp, Pseudomonas aeruginosa
gtgaacttgccgctttccttgcgggccgagagcatcatcgacttctgcgccggcgacagctcgcggaacctggagatcttctctacctcgtcggggggcatgttcaggcacaaccaccactcgatcatgttcagcatcggcgccccggaggctgggatgtcatcgatgttctgggtggcgagccagaaccaggcacccagtttccgccacatcttggtgatcttcatggcgtag

SEQ ID NO: 355272 - DNA, 324 bp, Pseudomonas aeruginosa
atggccggcctggccggcgatcgccaagccgtccaggtgcgcctcgatgcgctgatcgagctcggcgagctcctccaggtcgtaatggggcgcacgcacggcgtagtcgcggagcagggcaaggaaggcggcttcctcggcgtgctggtcgacgatcgctgcgatgctcaatctatgcgcgtccattgctggccgtcgaagctgaagatgtctttcgcggcgatgctccacaacacgccgtcggcagcgctaaggtggaagcagcgttggggttgctcatcaccgaagtccacctccttgagatggccaccgaccagcgtatag

SEQ ID NO: 355273 - DNA, 906 bp, Pseudomonas aeruginosa
atggccagccgttataccgtgcgcaatcaaccgctgaccttcgtcgaagcatgcctggaagacgacgattacctgccgttgctcgaacgggcactcaaccataccagcgcgacgattcgccagttggcccaatccatcctcgacgaggccttgcgtcagcctgatgcgctggagaggttgcctgctgcagcgagggaacgcatcgaacagctgcggggcaatgacgatgaccatgatccaggtggcccaagtgggtcaacgccacccgatgatcgcggttccatcacgaacaggtctgtcgacgccacggacggcattccgaagtccgcaccagcatccactgcaacagtacgtactgtagaaaaagaagtattaaaagaagtacatacgtacccgtcacaatccgaagtgcaagtatccgggtcagctttgccgatccgcttccggcaactgccgcaggatcagcagcaaatcctcatggcgcgtctcaggggcttggcgctggaacaacgccaggctgtgttggcagaatgggacgcgcgctgcgcttcgggtggtgtgcataacgccattgcctatctgtacgggctgatcaagaaggcggtgaacgggatgttcaagctgtgggctgcgcgcaagcctgctccgcagcaaacgccagcaacagcagccagcggattgcgggtttcgacgcctgcagcctctgcgtttcctgatgtcccagccgtcaaatcggcctcgcgcgacgtggtggagcagtccttggcgcagatccggcaaatcctgcagacgcccgcaaaatcggttggacagatcattgagggcatggctggcagtggcgcgctgcctactcggttcaagggcacgcacgttgcaggaatgcctggatcgcttggcgcaacgtaa

SEQ ID NO: 355274 - DNA, 1131 bp, Pseudomonas aeruginosa
ttgaacgagcagtacaagaccggcatgaccgaggcgaagaacagcctgagccaggaagaaaccatcctccgttcggttggcaacgtcctccagcgcatccgtgagatcgccggccaggccggcgacggcgcactggactccaacgacaagaagtcgctggccagcgagttgcgccagcgcgaggacgagttgctgaacctgctcaacagccgcgacgcgagtggcaaatacctgttttccgggtcccagggctcggtgcagccgttcgtgcgcaacgaggacggcacctacagctacatgggcgacgagagccagcgcgaggtgcagatcgccagcagcacgcggattccggtcagcgacagcggcaaggtactgttcgaggacatcgtcaatgccgctcgtctcgataccaaggcggcggctggcaataccggcgacggtcgcatctcggtcggcctggtcgaggacgagctggccttcgacagccagttcccggcgagcaatccgcctgcggcaaccgacggcttcaacatccacttcgtcagcgacaaggagtatgtggtctacgatccgaagagcctgcctccgggctatgactggaccacctacgatccgaattcgccgccggcctggcaattgtccaagggcgccatcgacgacgacccgaagaccatcgacaaggtgctctacgccggcgtcagcgtgacgatcgacggcacgccgaaggcgggcgacgagttcaacgtcaactacaagccgggcagcgagaagcgcagcctgctgaacgtggtgtcggacctgcgcaaggccctggaaagctccaccgacaaccaggccggcaacgacgccatccgcgatgcgacggcggtggccctgaccaacctctccgccgtggctgccgccgtggatggcggccagggcaagatcggcgcgcgcctgaataccgtggaaagcaccgagaccttcatcgacgatgtgaagctggtgaatgcgtcggtgatgtcgcagatccaggacctggactacgccgaggcgttgtcgcggctgtcgttgcagtccaccatcatggatgccgcgcagcagagctacgtgaagatccaggggttgagcctgttcaactacctgaagtga

SEQ ID NO: 355275 - DNA, 321 bp, Pseudomonas aeruginosa
  misc_feature (251)..(260): n is a, c, g, or t
atgagtttcagaaaacacaccgcgcaacagcaggcacacatcaacacgttccggttcatcaccggcttcttgtgcatggtcatcgtggtgctggcctactgcgtctgggaagcccgcaaggacctctggatccacattccgcccgacctgcgctcagggagcacccggttgtggtgggacattccgccggagagtgtctatgcgttcggcctctacatcttccagcaggtacagcgttggcccaaggacgnnnnnnnnnncgcgagcgcaccacctcggaaatccccggtcgaggcattggcgagagcaatggccgcgtga

SEQ ID NO: 355276 - DNA, 237 bp, Pseudomonas aeruginosa
gtgatccagcactcgatcaatgactggaccgtcaacctggacatggacagcacggagtattacgccggcgaaaagatcaagcgcgcgctggcccgctacccgttgcacgtcatccgcgccgacgtcgacccggagaccaatcccttcggcctgcagtgggactgctactccgatacgcctcaacgtatcgaactcgaggagccggtcgcccccatcaagcgggagggaggtctatga

SEQ ID NO: 355277 - DNA, 666 bp, Pseudomonas aeruginosa
atgccactggcgcgcaaggtgcagtggcaaacgcaggaattgccgcgtgacagcctgggcaccagcacaaagaacagtctgggctcgaccttgaccctgttcgaggtgccgtccaacgcggctgccgaagtgctggcggcgctcaagggtaagccggctccagtcgtggaagatgaagccgaggaagttatcgccgatccactggctgacatcgagtcccaggcgctggagcgcatcaaggatcgggtcaacgaactcgactgggacgacatgcagcagttggtcgccggcatcctgcgcgccatgggctacaagacccaagtttcaccacctggatcagaccggggcaaagacatcgttgcatcacccgacggcttcggcttcgaacacccccgcatcgtcgtggaggtcaagcatcgcaaggggcagatgggcagtcaggaaatccgtagtttcctcggcggccgccacaaggatgatcgcggactgtatgtcagcactggcggcttcaccaaggacgcccagtacgaggccgaccgagcctccatcccgctggccatgtggacgctggatcatgtggtgcgcgcgctaatcgagcactacgacgccactgatgccgaaaccaaacgaatcgtgccgctgaagcggctgtactggcctgcctga

SEQ ID NO: 355278 - DNA, 366 bp, Pseudomonas aeruginosa
atgccgaagccgatccgcttctacgcgggcgacaccatcaagtattgcgccgactacaactcggaagccgagtcgagcgccgtggtgccggatagcttcggcaatcagtacgcggtggaccgcgccctgctgctgggcggtcaggccctggcgcaagcctgggcggcttccgagcactccggcatgccgttcttctggtccgagaaggacatggaccacggcgacaagctggaactgctgatcggcgcgatcctcggctgctccaagattcgtttcgccgtcgaggcgaccaacggcctggagtacaccgaccacggcgtgatggcgatcgacaccgcggtcaagatcatcggcccccgcaagtaa

SEQ ID NO: 355279 - DNA, 423 bp, Pseudomonas aeruginosa
  misc_feature (358)..(367): n is a, c, g, or t
atgtcgcagattcgcaacccctacgacctgcgccgcctcggccgtccgaaggcgaagtggttcatggacgcctacctggaccagtccatgctggttcacctggccggcgcccgtggtaaccactacaacaaggagtggtgcctcccgctggagacgcacccgaagctggctgacatgctggtcaaccgcgtcaaggcgccgaccaagaaccgtcacttcgtggccagcgccgatgccatcactggcgttgcgccgaatgcgggggagtacaacatcaccaccgccgacgtgctggatgtggatgtggtcgactccatcgccacctacatggaccagatcgagctgccgccgccgcccnnnnnnnnnnctgctgtgctcgccggcccagtacaacagcttcgccaagcaggagaagttccgtag

SEQ ID NO: 355280 - DNA, 720 bp, Pseudomonas aeruginosa
atgttctggtgcatgttctcggtcaactgctcgagggccaggccctgctgcacggcgaagcgcaggttctcgatttcccaggtggccgcttgcaccaggatgtcgcggttcagttcggccgccttcagccggccttgctcgcgcaccacatctacctgcctggcgagcatccccggcggcatggagaaattgcgggcggcccaagtatcgaccgcctcctgcacggcgcgggtggtttcgccactgtcgcgttcgcgggcacgggcgaacagtgcctgttcgatgggcgccggcagtccggtgccgcccgccatcagttccttgatcttcgcttgcaactcgtccagcacctcggactggtactccggctccagccagttgatgaagacgttgggcaccgtgatcccgctcgcgtccggcggcgtggcgtcgaacgtaggcaactcggggaactcgaattccggcagtcggatctgttccagcgcttccatgtccggcatggcgatctgcggcgcatcgggaatctccaccgttgtgtcgatgtccgggcgttccggcaccgggatggccgtcatgctcggcgcgtccgggatgttgatcggaatcattgtcggcgcgtcgggtaggtcgtccatgtcgcccacatccaggtcggccagcaggtcgtcgatattcaggcccccaggggcttccggcttgaccagcggcgacgggttatag

SEQ ID NO: 355281 - DNA, 165 bp, Pseudomonas aeruginosa
gtgaaggtgggcgatcgtgcggtgatcaactccggggcgatgatcgcccgcgacgtcagtatcggcgaagacgccgtggtgggcatgggcgcggtggtgttcaaggacgtggtggccggacagaccgtggtcggcaatccggcccgggttattttcagcaagtga

SEQ ID NO: 355282 - DNA, 345 bp, Pseudomonas aeruginosa
ttgcgcaagccgatccgcgcccgctcctcggcgctgaactggtacagactggagttcggaatgccctgtagctgcccctcggcgccgaacgaccaggcatggtacgggcagaccagcggtcgctggccggtgcattcggtctggatcgccgacagacgatgcggacactggttgagaaaggcccgaatgccggactcggtacgctgcaccacgaccggcacgccggcgatcttgcgggtgaagaactggttgcgctcgcgcaccatcgaactgaagccgacgaagatccagagcctgccgaacagcctttcgcgctccagcgcgagcgtctgcggctcggtgtag

SEQ ID NO: 355283 - DNA, 744 bp, Pseudomonas aeruginosa
atgatcagcatcaagccggaagggttccagcagcagctcgccgacctgaccgagcttgagcagcggcagattccttacgcgacagccacagcccttacgcggaccgcgcaagggctgatggatcgcttgcgcgatgagatgcgtgtcgtgttcgaccgcccgaccccgtacaccctgaacagcctccgcatggtgccggccaggaaagaccggctggaagcgcgtgtttggttcaaggacgaagcggacggtgcgcagcctgcatcggtgtggattgcccccgaagtctacggtgggccgcgtcggaacaagccggccgagcttcagctcagggccaaggggatactgcccgaaggtaagtacgtggtgcctggtgccggcgcggacctggatcgctacgggaacatcaggcgcggccaggtcaccaaggcattgagcggcatccgcggcttcagccaggccgggtacaacgcgaacgctaccgatagcagacggagccgagcgaagggtaatgctcgccgctacttcgtcatgacccgtaagggccagcccataggcattgctgagcgcacaggccgaggccgggatgctgtctcggtcatcatggccttcgtgtctcgcccttcgtaccgccgccgactgagcttcttcgagatcgcgcagcagtacgccgacgagaacctgccgcgcgatttcgaggtggcgatgcgcggcgttgctgctcggttcgctgcgaggcgctga

SEQ ID NO: 355284 - DNA, 204 bp, Pseudomonas aeruginosa
atggtcagagcaaaccctcaggactggccaggctatgaagtgcgggagctggcagttattccagcgggccatgtggtggtcagcgaggggctgttgcggcggatcgtaactccggcacttaccagttcggatgcgcaggaccgcattggcgcacttgaagagttgcgcgccctgctgagcgagcaggatggagggaagccatga

SEQ ID NO: 355285 - DNA, 420 bp, Pseudomonas aeruginosa
atgctccagggcaccaccttcctgctgaacatggcggtcatgctcaacgccggcatacgcccttacgacagcctggccagcatgatcaagatctccccgccctggctgaagcagcgcttggaagctgcccgctacggcgtgggcctgggccagaatctgggagtcgcccttcgcagcgccggtcacgatttccccgaccgacaggccatccagtacctgtgcatcctcgccaaccggggaggcttctccgaagcgctggtcaagttcagccgccgctggcaggagaccagcctcaagcagatcgagctggccgccgggctggtgaagaacttcgccctgatcttcatcggcgcgctgatgatcctggtcctgctcggcgcctaccaggcacagcagctcatccaatccatgaaccactga

SEQ ID NO: 355286 - DNA, 207 bp, Pseudomonas aeruginosa
atgctgttgctgtcgctgctgcaggcctgggtcgccgctgcggtggtcacttcaccagtgatcgcggatccgctgttgatcttggtctgttcgaatgtgttcttcgcgatcttggtggccagcgtgatacaggcgtcctggggcaacttgctggtggtgatcgagaagcccatgccggtggacgagacagtgaccgatccgccgtag

SEQ ID NO: 355287 - DNA, 258 bp, Pseudomonas aeruginosa
gtggcacccggcgagaccgactaccacctgtggatgatgactgcccggcgcaaggatccgaagaccgatttcagcgctttgctgagcaccctgattcgcggcgagcgtaacgtgatcggcgaggacaccctggttctggaacgcctccaggaggggctgggcgcacattcgccgccgttcatgcacggcgactacgaggtgcagctggtgcgccagcacctgtggtatcgcgcgcaggtactgggggagagggcatga

SEQ ID NO: 355288 - DNA, 249 bp, Pseudomonas aeruginosa
atgctcaagcatcaagaacaaaccgaagttctcgccggcctgctctcccagaccgccctcgcccgcatggcgttcgctcagcggatcatggctcctgcggtcacggaaccctaccaagttgttcctcaggggcgcggattcttccacatcatcgagaccgccactggcgcggtgcgcggattccgccggagccacaacgaggcatgcgcatacgcagagcacttgaagcgccagcaggccgccaagtga

SEQ ID NO: 355289 - DNA, 123 bp, Pseudomonas aeruginosa
atgcgtagagcgctgaccgccctcggcatcatcgctgccctcggcctggccgtggtagggctggtggagatattcccgattatccgcacgctggcggcctggcaggcggggtgcttcggatag

SEQ ID NO: 355290 - DNA, 2301 bp, Pseudomonas aeruginosa
atgggctgggccaatgataaagcttttgaagctgaagtactgaggattgctcgggccaaatggcctaagagcgccatgtctggttctacaaagctagaaggaagggagcgagacggagttttcgagagcgacgaaaccattcacttcatcgaggcaaccacctctcgccaagcagagaaagcgcggcaagatacaaagaaaatgcactctgcaatcgttacatcagtacagagcaaccctatcaaaggcgcccgcggatggtttgtaaccgctgaggagccaactgccgatcagagagatgcagttaaaaagttcggaaaaggccaagtagtggcggtatcgttcgcacagttccaacagagcatcgtcgacgtcggtcagtacctcgaagccagggcacaccatttattcggcagtgtcctcgaccctgaaacaaaacagcacaacccaaaacttgaatatatacctattaatttttcaagctccgacgaggagcaatcgtggaatatccggaccatctcaagcggcttactcaatggtgaccgcttcattctaactggcgaatttggcgccggtaagagcatgagcctcaggcaaatattttttcaattacgagacgaatacttacaagctcgcacttccattttccccatctatataaaccttcgggagcacaccgggcaaagcgaagcggttgaagtaatcgaacgccatgcgcgcaaaattggctttgatagtccatcgagcttggtgaaagcatggagagcgaaatttgtaacattaattcttgacggctttgatgaactgacatcactaggcgtccaacgtgcttcatataacaacctaaaaattatccgtagacgggccttggaggcagtgcgtcaaatcatcaccgaaaccccagaaggcgtcggaattattactgctggtcgtgatcacttctttgcgaccgacaacgaaatggctagtgcattagggttagaaaattacaagcttataaaaaccacagacttcacaaaagaacaaatcatccaatttctcaaacgccaaggggccagcgaaaaaaatgtcatgctcccttcatggttacctaccaagcccctcctcatcagctacctcgcatccagcggccttctcagcgaagtgtctacgaacccggagctccacacaaattattctagttgggattatctaatcgaccgaatttgtgaacgagaggcccgaatagacaaccgctatctggacggccccactctcagaaaaatcttgtcccgcctgtccacctatgcgcgcgtctctgatgacggtctcggacctctggcaccgcagcaactcagtaaggctttccaagaaatctgcggtttcgaggcagatgatcaagcttggattgctctacagcgccttccaggtttagcaacatatgaagttgaagctgacacaaagaaatttattgatgacgaaatggttcaagtatatcgctcgggcgacattatggactttattcaagacccatacacagcccttacccaacaggagttcacttcagctttttcgcagataggctccacggctggtgattacgcgattgatgtgtgcataaaaaaatgtccaccacaaaccgtcagctctatacatgcaattatgcaattattacaaggtcacccttcactaaatagccttaaagcggacattgccacactttccatacacgcctccttgccaataaagtacacctgcgaaatcgaaggagtcttcttcagtgacgtaaccttaaaccttgagaacaccattgatctttcgggactcactttctccaactgttacttctcaatagtcgaagtagataacaacccaccagagaacctacccactttcaaagactgtataatcaccgaaatctctggatacaccaacagcgatgatttacccaaaatcaagttcttaaaaaccgaaatccaagaatactccaatcaaccacaaaccaatgcagccattagaaacgaatcaatatccactggcgaaaaagttttgctgattatccttagaaaaattttcctgcaaagtttgggcggtcgctccgagtctgcgctatatagaggtctaagcacatccgagaaacaactagttgacccactagttaattatctacaccaagagggctacttggttcccattactaggggaggcacttccatctgggtcccggtacggaaacatcttcataatatcagaagaattattggcagagtcgagagcgaaaccccagagcttctcgattatgcccgtcgcctgtccggctga

SEQ ID NO: 355291 - DNA, 330 bp, Pseudomonas aeruginosa
atgacaacccctatcgtgcaatcgatcagtgatgagcaattggcggaactggatgaactgacagccaagttaacgggagattggtgggtcgattgggacagttcttatgccgtaacggcaagcccatcgaatatccagagcctgatcgtgcgcctgcgcgctgctgaggctgatgctaagcggtatcggtggctgtgcgcatccgcatggtatgtcggaccggagccatgcggcgacacagaagccgttagctggcatgaccacaacgaaaccaaggatggcgtaaccgaagccatagacaaggcaatcgccatggagcgcacgccatga

SEQ ID NO: 355292 - DNA, 366 bp, Pseudomonas aeruginosa
gtgcctgacgaaatcatgaactacgacccgaacctgaccaacagcgggaacatagcagtccagacagtgcgcctgaccttcggaatgtgggactaccgcgcaactatggaaatacaggttggcggtaactgtcgtgggctgaccgtcatcgactgtgccgtcgagaacgcctacgagaagctggagcagcgcggaatctatggctccgatgacacctacgcagtgatcaacatgccgaagatcggtaatcccgaggagattctggagtgcggtgacgatgagggcgatggcgaggattggctgaaagacatgctagtcagcgcggagatcacctccattgtttcgcgggaggacgaccgtgcctga

SEQ ID NO: 355293 - DNA, 273 bp, Pseudomonas aeruginosa
gtgcctgacgttcgagaagagtttgaagcttgggtatccggcaggaaagtatgcacgcgatatggcgcaaagctgaccaccaatcctgatggcatgtacagcgactataggatcaacgacaggtggatggcctggcaagccagccgcgcgactctgaaggtggagctgccgtttcccgtaatcgtcgatgaaggcgccgaattcgcgttccatgcctatgacaaggacgagatggacaaagccctccagcaagccggaattgaggtgaagtga

SEQ ID NO: 355294 - DNA, 468 bp, Pseudomonas aeruginosa
ttggcctatgactggttgttcgtgaagaccgggatggtcgactggatgaccaacatgactaccatcgcgcaggccgggccacggagcccgctggacgttcgctatctcaccgcccagggtgtctccacgctgcagaactacggcctggccgcgctgtacacggtgctgacattcgtcgtgcgcctggtgatcctggtcatgacgatcccgttattcgtgatggccgcgttcaccggcctggtggacggcctggtgcgccgggacctgcgcaagttcggcgccggccgggagtccagctacctctaccacaaggcgcgcggcagcatcattccgctagcggtcgtcccttggacgctctacctggcaattcccatcaacatcaatcccctgctcatcctgttgccctgcgccgcactgctcggcgtagcggtgtgcatcacagcatccaccttcaaaaagtacctatag

SEQ ID NO: 355295 - DNA, 567 bp, Pseudomonas aeruginosa
atgtccaagcaatccaccagcttcgaaatcggctttgccctcggcagtgttgtgcgtgagttccgcagagcgctcaggcgccctccggtcgtagtgcaagcacaagcgccggttgcgttgagcgtccagcgcatcgatcctgccttcctggccggcccgaccgctggcgagctagaacacatcagcgacatcccagccatcgtccggctgaagaatgtcaacctgaatgactggtatctagccaatacgcgcgaggtgcaaaagcccaagcgcgcacgcaaacccaagccggccaaggcgaccgccaaagctgaaacgccagtcaggaaggagctcaagatgggttccctcgaccatttgattgcacccaactccgaaagcgaaatggggaggccccctctccagttagagtccctgaacgatcatgagattgctcttttgccagcacctcctggtagcgcagtctcttgggaactccatcggcgtactcaggagcaataccaacaacgctggcaggactacttgtccaccatgacggatgaacaagtagctgctctcggccgctaa

SEQ ID NO: 355296 - DNA, 135 bp, Pseudomonas aeruginosa; identical to SEQ ID NO: 324426

SEQ ID NO: 355297 - DNA, 258 bp, Pseudomonas aeruginosa; identical to SEQ ID NO: 323739

SEQ ID NO: 355298 - DNA, 867 bp, Pseudomonas aeruginosa; identical to SEQ ID NO: 334524

SEQ ID NO: 355299 - DNA, 738 bp, Pseudomonas aeruginosa
atggcgaagcctcctatcacccaggcccgcgacgtcgacgcggaacttgtgctgcaactgaacaagttcggcagcgccgccgaccttcggagccaacaggccaagttgaccggcgctgcgcgagaaatacgcaagctgactggtggcggtaccgacctgttcgggaagctgggttgctacttgagcttcgagcaaaagcagctcctacaagacgctgcgcgcttgctcgactcggtgaaccagcaggtcgagcatgcgaaggaaaagcgtgatcgcgacgagaaacaggccaagaagcggcgtgagctgcgcgggcgcctggccaagcaactggtcgcctcgaactacccgcttccgggaaatacgctcgaagagcggctggaaatcctgcagatcgcgttgatctacaaccgggccaaggtgttcgatcccctgtacaccacgcaccagctccactcaaaactcaaacgctggctggagcgtcccaagcagctcatcgggtggcacagtgaagccgagtatttcgctagtcaggtggggagcctgcgatgtgacttcattagccacctgactcacgaaatcgcctacgacgatggcagtgaagtcgaggagcgcctgcgcgtcatcaagcagaaggtcgctgactgcaccgcacagatcgctctgaccagcgaggagcaggaaacccttcagctctggacagacgctctgcaatcggctccggagggcctcatatga

SEQ ID NO: 355300 - DNA, 351 bp, Pseudomonas aeruginosa
atgacctctctcaacaaccactccagcgcaggccacactgctgcgtacctcaaactcccgatcgttctcaccaacgcggcctggctgcgcctggtctatctcgccaaccctgccagggtcgacgagatgggcacccggctggccagtgtcgttcaaaccgcctggcaggagctttcgctccagccgaccgcgaagcacatccaattccacctgtaccacaaggaggaagaggggcaggaccgcgcgctcgcgctgctggttctctcgatagtcgagccgtccgatgagccttcctacctgcgcatcgagttgcaggaagagtgcctcgccgaacacccggttaccgagtag

SEQ ID NO: 355301 - DNA, 360 bp, Pseudomonas aeruginosa; identical to SEQ ID NO: 347369

SEQ ID NO: 355302 - DNA, 225 bp, Pseudomonas aeruginosa; identical to SEQ ID NO: 348679

SEQ ID NO: 355303 - DNA, 576 bp, Pseudomonas aeruginosa
atggagaaaatcctggccacagccgagcgctctcagcaagaggagctgcaaattgagcgtgctctcaaactcggggctaccaccacgatgattcagagcttcttcggtctgtcgccggaagacactgcgatcaagcggctgatcatggagatacacccccgacggggccgctggcggcagctcgatgaacagatcgagcgccagatatggttccgctgggagcacctgatgcaggaaaaccaggtccgccttgaggacagcatggagttgctggatatcgcgatgatcctcaccgaggaaatcaacgccggaatcgaacaagacagcccagagttcatcagcctcgccattgtttggtctctcatccagagctggctgaaagacgggctctatccgtctggcaaatcgagccagagccaggcgggcctgcaaaagtcccaatccactctttacctcgctagcgtcagctcacacctgccccactctgccccatccgcaacaacgcaggtgaacgctgagacagaacgtcaacaactactgaacctggttcagtcggaaggcgacacagcaccatga

SEQ ID NO: 355304 - DNA, 240 bp, Pseudomonas aeruginosa; identical to SEQ ID NO: 325476

SEQ ID NO: 355305 - DNA, 225 bp, Pseudomonas aeruginosa
gtggaaaccggtcaactcaacccagcgcctttgctgaaccgccatctggcgggagattgggggacgctggaccaggaagactggaacaccaaccagagagccctgaagttcggcgataggctgctgtcgtcctacgacatcgatgccggcggcgaatccaggctctggatcatcaccgaggcagaccgcagctcaaccacgcttttgctccctagcgactactga

SEQ ID NO: 355306 - DNA, 225 bp, Pseudomonas aeruginosa
gtggaaaccggtcaactcaacccagcgcctttgctgaaacgccatctggcgggagattggggaacgctggaccaggaagactggaacaccaaccagagagccctgaagttcggcgatcggctgctgtcgtcctacgacatcgacgccggcgacgaatccaggctctggatcatcactgaggcagaccgcagctcaaccacgcttttgctccctagcgattactga

SEQ ID NO: 355307 - DNA, 171 bp, Pseudomonas aeruginosa
atgtgtggcaggctttcgcagtacacgggacttcacgagttcgtcgacgcgctgtcgatgcgggccaagctagtcggcgagccgaccaaggcgtttggagaaaagaacaacctcgctttaaacaagtatttctcggcagagcactcccgtcagtctcgaaagctattgtag

SEQ ID NO: 355308 - DNA, 528 bp, Pseudomonas aeruginosa
atggccaactcacgcaagcatctgatctacctggtctacgggcgacagacctaccaccaggaagccctgttcagcatcgccagcgccttcgcccacctccgcgacggggcggcgcatggcctgacggtcagggtctataccgacgaccccagtccctacgccggcctgccggtgcaggtccgcgaagtgacggccgaggagttggtcgcctggtgccaaccgcacggctatcacttccgcgccaagcacgtggccctgcgcgacgccctggaagacgccgaccaggcattgctgatcgacaccgataccttcttccacagttcgcccctgcgcctgttcgaccgcatccagcccggcagcctgctgtgcaacgcgatcggcgcgcgctatggcgaacaccgtaacgcgacctctcgccctacctgttcgagcgcggctgggccgacgacgagatgcaccagctcaactccggcgtcatcggcctgcctcgggaagaggcgaaaatactcgaccgttcgttggaattaa

SEQ ID NO: 355309 - DNA, 186 bp, Pseudomonas aeruginosa; identical to SEQ ID NO: 322823

SEQ ID NO: 355310 - DNA, 729 bp, Pseudomonas aeruginosa
gtgcccgccagcaacaggacgccccgcgcgaacagcgcctggcgcgcatcgaccggcacatcgccgaactgcaactgctgcaaggcgaggccagcgcccaagcgttcctcgagcgactggcacgcgccgaagccgaacagcgcccggagcgccgcaacctgctgctcgacagcctggtcctcgacctcgcccaggccgcccgcgaacaccagcagcaacgccagcgcctggaacacctgcaagacctcgccagcgaagtcgccgccctgggcgccgccgaacacgccgaactgctccagcgcgccgccgcctgccagcccgacagcgatccgcagcaactcgccgaactcaccgagcgatgcaacgccatcctcaccgcccacctccagcaacaggccgccctcgcccgccgccaggccgtgctccagggcctcgccagcctcggctacgaagtccgcgaaggcatggccaccgcctgggcgcagaccggcagggtcgtcctgcgcaaacccgccacccccggctacggcctggaagtcggcggcaaggccgacaacggccgcctgcaactgcgcgccgtcgccctcaacgccaaccgcgacagccagcgcgaccgcgacatcgaaaccctctggtgcggcgaattccaacgcctccaggccctgctcgccgcccagggcggcgaactcagcgtggaacgcgcgctgggggtgggggaagtggcgttga

SEQ ID NO: 355311 - DNA, 1956 bp, Pseudomonas aeruginosa
atggaagacatttacaagatgacggtcgacctgaacgtgcttgaccacctcggtatcaacctctatagcaacatcgcggccgttctgacggaggctgtcgccaacgcatgggatgcggatgccgaaaccgtcgagatcagaatcgaccctaacggtcagtggatcgagattgaggatgatgggataggcctctcgattgacgacatgaacgccaagtacctgcgtgtgggctatcgccggcgtgacgaagacccggagcatggtcgggtgaccgcaaaaggtcggcccgtcatgggccggaaaggactgggcaagctttccttgttttcggttgcgagagttatcgaagtgcaatccgcaaaggatggggcggcccacggactgagaatgtcggtggagggcatcgaagcatcggtgcagaggaaggagctctactacagtcctacccccctgacggaagacgcgatcaccgtcacgaaggggacgcgaatcgttcttcgcgaaatcaatcgccagcgcctcggcaagagcgtcactgccctgcgcaaacgcctggctcgacgcttttcggtcattggagaagctcaccgcttcaagattcttgtcgatgagcatcccatctcgacggatgaacgcggggacctaccggtggtgcagttcctttggagcctgggcgactccgaaatcgaactgggctccgcgaaggggctggtcgagcgagagagtctctctgaccacttggatgcctgggatgcggactggcgagtgtccggctggatcggaaccgccggccagcccaagcaactggatagtgaggatgcgggtaacctcaatggaatcgtcgtgttcgctcgcggacgcctgttccacgagaacattctcgacaagctgaacgatgggcgcctgtataccaagtacctcacaggccagatcgaagcggactttctcgatgccgatgatcagcccgatatcgcgaccagcgaccgccaacgcgtccaggaggatgatctccgctatatccagctcatcgccttcttgaaatcacggctggcgcaggtcgagaagcgctggagcgaatggcgccgcaagcacgaggtcgagaaagccaaggagacctcgcccaaactggctaagtggctcgatggactcaaccctggcctcaagaaaagcgccgaaaccctcatttcgaaactcagtgcactgccggtcgacgacgaagaagaccggaaggttctctaccgtcacggcatcctggctttcgagcggatgcaactgcgtggctcgacggaggagctggctcggcatatcgatagcgtcgagaagctcctgaccatcctcgccgatcgagactctctggaggcttccttgtatcgcgacatcgtcaagtccagactcgaggcgatcaccgaattccagagcctggtcgacgaggatgccaaggagagggtgctccagaaatatctgttcgatcatctctggctgctggatccaggctgggaacgtgctacggacagccccatcatggagtctcgcctcatcgaggaagggatcttcaccgatgacatgaccaagaaagaagagcttggccgggtcgacatcgcctatcgcacgaacgctggcaagcacatcatcgtcgagctcaagaaggctggccggaagatgaggctgctggagttgcaggagcaggggcagacctacgtcgacaagttgcgcaagatcctggcgcagatgggcaacacctcccctgatatcgaagtggtgttcgtcttgggcaaaaccgtggatgaagagatctcgaacccggagcggctgaagtcatcgatggccgcgatctctcctggtagccgcatcagacattacgacgagctgatccagggggctcaggaggcttactccgcgtacatcgagaaaaccaagaagctcgacaagctggaagatatcgtcaacgggatttga

SEQ ID NO: 355312 - DNA, 2133 bp, Pseudomonas aeruginosa
atgactgctctctctgccgaccgtcccagttcaaatccgcaggacgacctgttcgggcatgccccgtttgccagaagccttgccaatagcatttttcgctaccctggaaacgatggcttggtgctggcactctacggcccgtggggctctggaaagtcgacggtattgagctatgtgcggcacttcctggaacagcgcccggaagccgaacaacctgtcatcgtgaccttcaatccatggtggttctccggccaggaaaacctcgcccgtgcttttcttggccagttgcaagccgtgctgcccaccaagagcgagaagttcaaaaaactgggcgatctgctgggcgactttgcggagggcgttggtggactgattgacctgagtggcatgaccggcggcgcaggcagcaagattggcaacctgattggattgatgaccaagcggaagcccaaagatgttcccgcacttaagatagaaattagcaagatattgcgagaggctgaaaagcgaatcttggtcgtcgtcgacgatattgaccgcctcacgccggaagagacccgtcagctattcaccgtcatcaaggcattggctgactttcccaacgtcgtctatctgctcgccttcgaccgcgatgtcgccgcgcaggccatcgaacagcagagcggcctgcctggcgtacgctatctggagaagatcatccaggtgccgttcgagttgccgcctgtcgatcgtgtggctttgcgggctgcgctattcaaacgtcttgacgagatattgggtgacataccagaaggatcgttcgatcagtcttactggacgaacgtgtatcacgacggaatcgacgcgctgattcaggtgccccgtgatgtgattcgattcacgaacaccttggcagtcacctatccagcggtccgcggcgaagtgaatgccgtggatttcattgcgctcgaagcacttcgggtgttcttgcccagcctgtatgacgtgattcgtaccaacccggacagattctcgggccacagccgcgattcccgctacgactccgatgagcgaaccaaggaagcctttcacactggatgggcacaggccctgccagaccagttgcaagagaatgccaaggcaatgatcgaacgtatctttccgaaaactggacgcatgggctacggctcggactggttggtggaatggcggagaaacctgcgggcctgccacccagatatatttccgatctatttccggctcaccgctcctcccggaggcatacgccgtagcgaggtgatggcgctgctgaatctggccgcatcaccatcggattttggcaatgcactcgtacaagcgaaggaggaacggcggcccgatggcatgtcaaaggcgcgggcactgcttgagcgactgatggaccatgtcgaaaaggacatcccagatgcgcatatcccagcgattatccaagcgcttttcgacgcaggcgacgtgttgatcgatcctgccgacgaacgtggcatgttcgatttcggcaacgtctcgcgcgcttctcgtcccgtctatcaccttctgaagcggctgtcggccgatcaacgcgctgacgtcctggagccggcgatgcgggctggtagcgctgtcgctgtccagttgtggcttttgaaggcattgggggaagaagtctcgaaggcgcaagaagccacgctgctgacggctgatgaagtcacacgactgaagtccgtatggctggaacgagtacggactctttcaaatgagtccagcttcatgaaccacccggaattgccgagactactcgccacttggaaaagttgggcagacactaccgaagtacgcgcatggtgcgaccgcgttaccacgtccgatgaggggctgctgagtctggtgacaaagtttctgcaccacgcgagatcccaaacgatgggcgattgggcggtccgtctccagcctcgcctcaatccgagctggctggagagctacatcgacaccgttgccactgcgggccgactttctggattacagcgggatggcaaggtgcctgacggcgcgcgggaagccgtatcgcagtacctcacagagttcgaaatgctccagtctggcaggaatccagacggcatcgacgcgtttgacgactaa

SEQ ID NO: 355313 - DNA, 4071 bp, Pseudomonas aeruginosa
atgaaaccccgtgatatccacgatgaatggctgtcgctgattgaggtctccggccccttcctagctacgcccgtgctcgagcgggtgttctccaccggcctgccggcggtcgaaccgcgcatccgccagtacctgcgccaggcgcatgacgaatggtgcgaggccggagataacgaggacccacgcttcgccgaactgcatcgcgcctggatccacgaagtgctcgcgcgcggcctggaatacgacgaggacgatagcggcgaattgctgcggcgaggcgagcgactgcccgattccgtgcgcgtcaccctgcccgaacatggcgtcatgctggcgcccgactacgcgctggtatccaacgacaagccgctgctgctcgtgcagggctacccggccggaaccgatctcaccgcaaccatgaagatcgatggctggatcgccagccccgctgaacgtatggagcgcctgtgtcgggctagcggctgccgcctcggactgataaccgatggcgagcgctggatgctggtcgatgcgcccgtgggcgcggtggtgacctacgccagttggtacgcccgcctgtggagccaggagcgccagaccctgcaagccttcatcgcgctgctgggcatcgcccgcttcttcggcgccgaggacgaaacgctgccggcgctgctcgacgaatccctgcaacaccaggaagcggtgaccgacgccttgggcgagcaggtgcgccgggctgtggaagtgctgatccaggcactggacaaggaagatcgcgaccgctcccgtaccttgctgcaaggcgtcgagccggccgagctctacgaggcgggcctgacgatcatgatgcgtctggtgttcctgctctcggccgaggagcgcggcctgctgctgatgggtgatgagacctacgagagcgactacgccatctccaccctgcgcatgcagttgcgccaggagaccgaggaggtgttggagcaccggcacgatgcctgggctcgcctgctggctaccttccgcgcggtctacggcggtatcgaacatgaggcgctgcgcctgcctgctctgggtggctcgctgttcgacccggatcggttccccttcctggagggccgtgccaagggctccgactgggaggtcgatgtcgctcgaccgctgcctatcgacaaccgcactgtgcttcttctgctggaagccatccagcagtaccaaggcaggaccctgtcctaccgtgcgctggacgtggagcagatcggctacgtctacgagggcctgctggagcgtaccgtcgcccgtaccacgcgggtgaccgtggagcttagcgccggcaagggcgcgaagaagaccctgtatggcctggacgacctcgaagcgctgcaccgccgcagtgtcgatgccttggctgatgaactctccggtgccgacgccatcaagcgtagtgccagtgccattcgccgggatctcgagcgtgccgtcgatgcagaggaggccaatcgtctgctgaccgcctgcggtggggacgaacatctccgcgagcgtgtgctgccgttcttccatctgctgcgcaccgatccctggggctatcctctggtctacccggagggtgctttcatcgtaaccacgggcagcgaccgccgtgaaacggggacccactacacgccgaaatcgctcaccgagaccatcgtcaccgagacgctcacaccgatcgtctacgtcggccctgccgaaggactgccgcgtgcagagtggacgctcaagtcgcccgccgaactgctcgacctgaagatctgcgatccggccatgggctcgggagccttcctcgtgcaaacctgccgctggctggccgagcggttggtggaggcatggacgctggccgaggatcgaggcgagacgatcgacgccgatggccaggtggcggacgctggtgcctgtcaggaaccgctggcaagcgatatcgaggcacgcaccaccatcgcacgccgcctcatcgccgaacgctgcctctacggcgtcgacctgaatccactggcggtcgaactggccaagctctccatctggctagtgacgctggccaaggggcgccccttcggcttccttgaccacaacctgcgctgtggagacagcctgctcggcattcatcgattggatcagctcaccgaactaagcatgacccccgagaggaagggtgagcgaagtgggcatctgttcggccaggacatacagaaagcggtacttgaggcaatcgaactgcgtcaacgtttgcgcgagatgccaatacgtgacattcatgacgtagagaccatggcgcgattggatgcggatgcccgccaccttcttgatgctccagagcggatcgccgatgccttcatagggcaagtgtatacagccaacggaaataaaacactcctcaaagctgcactttcctcgctagctatccaagctgggcaggccatcaatggacaagcggacgcactaatcgccataaatgatcaagcatcaacaacgctagcgattgagctgccatcaggaaaaacagttcgacggccttttcattggccattagagtttcccgaagtctttcagcgcaatggctgcggatttgatgccttagtagggaatcccccatttgttacgggaaagagaatatctacctatcttggcgaagccttgcaggcatttatcaagaacacggttgaggacagcaaaggagctgcggatctttgcgtctacttcatgcgtcgtggcttttcacttactcgacttggtggtttggtcgggatggttgccacaaaatcaattgctgaaggcgactctcgtacagttggaactgcttggctgaggacaaaaagcgcgaaattcatctgggcagttcacgaactaccttggccaggacaagctagcgtaaccgtaagcctacttgtgatgattcgcggagactggaaaggtgcttacacccttaatggaaaacgggctattgggataaatagcaggctcgccgaccatgacggggaggacgtacctgaaccaaaagcgcttctgtctaatagggggaagtgcacccgtggaatcgtcgtactgggcagtggattcttaatttccgaagaggaaagacaggaatacctcagtaacgatcctcgcaataatgaggtcataaagccatatctgacaggcatggacattgtgcagggggtcggctcgaaaccaacagggtggatcatctcttttgggctaatgccctatgacaaggcatcaaaatttagcaagccctttcaacgaattgaagaattggtgaagccataccgtgatggattgacagggcaaatacatgaggctgacttttggaagttctgggacaaacgcgaagatttctttgcatcaatgcagggaaaatccagaatcttggcatgctcaagaactgcaaaatatcttgccatggtcttcattgatgagggctggattccatcagatggtgttggcctattctcatttagcgacttcagctcattcgcgatcatgcagtcgtctatacacgagacttgggcgcgacaacagagtggaaagcttgaacagcgcctcacttacaacttctcaaagacattctcaacttttccgtggcctaaaacccactccatcgacgaggtgggtgaaagtttttacagcgttagatcaaaatactgtgagaaccacgcctgctgcattaccgatatgtataacgcatttcatgatgaaggcagggcagatgccgacttggctgaggctcgggctcactttgtaaatttggatagagaagttttgcgcgcctatgggtgggatgacattgatcttgatcatggctttcgggatgtgacttaccttgcaaagactgattgtagaagattcacaatctctgaaatcgctcgccttgaaatactacgccgcgtttcagatctgaatctccatcgtcacaatgaggaatctgagcaaagtcaaaaaaagaaaccgaaatcgtcaaaaccaactagaggtggacgcagcacaaaaggtgcgtcgaaagaaatcctgagtgatttgtttgatgaagagaatgcatga

SEQ ID NO: 355314 - DNA, 3663 bp, Pseudomonas aeruginosa
atgggcgcagaaaaccagcacctgaccggccgcaagggcggcagtagcaagccgaaacagccggtcgaggcacccgacagcctgcgctcggtcgcgatggccaagatcctgcttgccgtgggcgaaggcgagttcgccggcgttccgagcgagcgcgatatctacctcgacaacaccccgctgatggacccgagcggtaacctgaacttcccgaacgttaagtgggagtggcgcgcggggtcggtggaccaggactacatccctggcattcctgcggttgagaacgagacgtctgtcaacgtcgagttgcgcagcgatacgccctgggtgcgctcgctgagcaatacccagctttccgcagtgcgcctgcgcttcgcctggccagcgctccagcagcaggacaccaacggcaacatcggcgggtaccggatcgaatatgccgtagatatggcaaccgacggcggcgcctatcaggaggtgctgcgcgaggccgtcgatggcaagaccaccacccgctacgagcgctcccgccggatcgacctgccggcggccaccaatggctggcaggtgcgcgtccgccgcctgacgccgaaccagaacaacaaccgcatcgccgacaccatgctggtcgccggctacaccgaggtgatcgacgcgaagctgcgctacccgaacacggctctgctgtacgtcgagttcagcgcagagcagttcagcaacattccggctgtcacagtcgactgccgcgggcggaaggtccaagtgccgagcaattacgatccggagacccgggcctacctcggcatctgggacggcacgatgaaacaggcctggaccgacaacccggtctggcacacctacgacatcgtgaccaacgatcgcttcggtgtgggtaaacgcatcaaggcctggatggtcgatcgctgggaaatgtaccggatttcccagtactgcgaccagttggtgccggatgggaagggtggccaggagccgcgacacacctgcaacctgaacctgcaaagccgcgccggggcctgggagctgctgcgcgacctcaccgctatctaccgcggcatggcgtactgggcccagggccaactgaagatccaggcggatattccgcgcgccaccgacgtcgatttcgcctacacccgggccaatgtcatcgacggccgcttcagctacggctcggccagtgagcgcactcgctacagccgtgccttggtcagctacgacaatccggcgaacaactacgacaccgacgtggctgtggccaccgataagcgcctgcagcggcgttacggcgacaacccggtcgaggtggcagccattggctgcacccgcgagagtgaggcccagcggcgcggaaaatgggcgatcctaaccaacagccaggatcgcacggtaacgttccgtaccggtatggacggggcgattccgctgccgggatgggtgattccggtggctgacgcgcttttggctggacgggagatcggcgggaggatctcggcggttgctggccgagtgatcaccttggatcgcgatactcaggcgaaggctggcgaccggctgctcctgaacctgcccagcggtaaggctgaggcgcgaaccgtgcagtcggtcgcagggcgcgcggtgaccgtgacgacagcctacagcgagaccccgctaccggaactggtctggaccctcgatgccgacgacctggcggtgccgctctaccgtgtgatgaaagtcagccagccggagcggggtgtcttcgagatcactgcgctgcagtacgagcccgggaagttctcagcgatcgacaccggcgccaagctggagagccgcccgatcagcgtcatcccgatcaccacagtacctccgccggcgagcgtcacgctgacctcgcactaccagttcgatcaggggttggcggtcagcacgatgaccatcgcctggccccccgtggaaggggctgtcgcctacgacgtcgaatggaagaaggacagcggcaactggatccgcctgccgcgtgccggcaccaccagcgtcgatgtgaccggcatctacgcaggtggatacctggcgcgagtgcgtgcggtatcggcgttcgacatcacgtcggtctggaagagctcgatcctgaccctgctcagcggtaagaccggcgcgccgccggcgctggcgttcctgcgtaccaccagcggaccgtggaagatcggcctggagtggggattcccggccagtggtgcggcggacaccgcctacaccgagatccagcagtcggtcaccccgggcggcagcgagcagaacgcaactgccctgggcttgttcgcgtacccgaccgacacccacacgctgacctcgctggcggccggcgctcgcctggccttccgcgggcggctgatcgaccggaccggcaacgtcggcccctggtcggcctgggtcgacggtataagctcgacggatgcgagcgagtacaacgaactgatcaccaaggagtacgtcgagtccgccctgggcgagcagttcttcgccgacatcgatcagatgcaggtcgatatcagtggcctgcaggaccagatcgacaatctgaccgatgtgctggcctacgacccgacgaagacctacgcgcagaacgatatcgtgcgggtcggcaaccggctgtatcaagcgaagcaggcggtgccgctcaacgcctcgccgccgaacgcgacctactgggccgacatcggacagtcgatcgagacggccaacggcctggcccagcaggtggccaccaacaccgcggatatcaccgagctcgacggtaaggtcgaagcggcggcttcgagcctggatgttctgcaggctgccgcccgccgggagccggcgaccggagagaaggccgatgcgctgaagggctgggacaccattgctcgagccgccaccgaagtcaccgtgcgggcgaacgaggacgaagcgcaggcgaagcggacgagcttgcttgaagcgcgcaccgggaccgcggagggcaggatcgccaccgtcgagtcggtcgttgcgtcgaacaatgctgtaaccgtccagcgattggatcagctcaccggccaggttgcgagcaacgcctcggcgatcagcaccgaacagaccgtccgcgccaacgcggacagcgcactggggcagcgggtggataccgtcagcgcgcgcaccgataccaacgaggcgaacatccaaaccacatctcaagcggttacctcgctggatggcaacgtcaaggcgctctacagcgtgaagctccaggcgcatgccaacgggcagaagtacgccgctggctggcaactgggcttcgacagcggtacgagcgtgacgaccatggcgttccaggctgatcggttcctctggttcaacagttccagcgggcagaccgtggcgccggtctcgatcgtcggcgggcagatgttcatcaacaacgcgatgatccaggacggttcgatcaccaacgcgaagataggcaacgtgattcagtcgaccgccctcggtgccaacggcgagccgctctggaagctcgacaagagcggggctcttacacagaacagcgctacgggcgggggcttcatgaggcagacagcggaggccaccaaggtctacgacgcgaatcttgtggtgcgggtacagatcgggaatctcgacgtatga

SEQ ID NO: 355315 - DNA, 585 bp, Pseudomonas aeruginosa
atgccgcgacaacttgccggcctgctgtgcgtcctcttcggactcgccggcgcccctgccctcgcctgcccgttccgggccacggacgccgagacaccggcagcctctgccggcgccgcgcaggtcctggccctgggcggcgccggcaggctgcaactcgacctgcaacgggcccccgccaccctgctgcacagcggcgacctgctgatcgcccgttacgccgagggtcactacctcgcccaccgcctgctcgaaggcaacgagatgggcgcggacgagggcgaacggctcgaccttccgcgacaggttcgcctgctcttcggagccctgccgctggatggcctgcccgacgccgagcgcgagcgtctcgaggcgcagcgccaggccctcggcctgtgcgaccggcgcgccagcgccagccgctatcgactggccggtaccgaagtctaccgcctgcgcggcagccaggccggcaagccctaccatgcgctctacctgctcgacggtccccaggtgcactacctcgacagctccggcagcgacgccttcgtcgaacaactgctcgccagcctgcgacgccgctga

SEQ ID NO: 355316 - DNA, 267 bp, Pseudomonas aeruginosa
atgaaaaagatgtcattactgctggctgcattgctgctcagcgcatgtgacaagccgatgccgtttgagtcggctgaagcgcttgcagagaatccgaaccggctcaaggaactgcgactgcagtgccgggacaatcgagcagagttgggggaggcccagtgcaacgcagtcagcgatgcccagcgcatacgttttatgggcaaaggcaccacctacactccccaccccgtccagttcttccactcggacagtgacaatggacgctag

SEQ ID NO: 355317 - DNA, 408 bp, Pseudomonas aeruginosa
atgacagctgccaccatccaagctcaggacttctcgaaaacccagtgcgcagccggcctgcgcgccgcgctgaacatcctggacaagtggaaggccacctgcgagcaggtttgccgggtgctgcggatttcccgcagcacctacacccgagccagtcagaaggattcggcatgggcggtaagcctggactccgatcagatgcaacgcatcagtcttgtgctgaacatccacgcagcgctgcgcgttgtgttcgacaaccccgagaacgtctacggcttccccacgatggagaaccacaatgagttcttcaacggccgcaagccgctcgacatcatggcgcagggcgacatgatctcgctgtacgagacattccgacggatcgacgcgctacgaggtgcccagtggtaa

SEQ ID NO: 355318 - DNA, 678 bp, Pseudomonas aeruginosa
  misc_feature (439)..(439): n is a, c, g, or t
gtgctggaaggtgaaagtctgcaagcataccgtttggtcaactccaagtttccgcccattgccctgttcgatgatgtcgccgacgccgaggacttcgaagctctttatcagatccaggcgctaaccaatccacggctgcagaacgagattggtcgcctggagctgattccgcgcgaccagattccgttcggcattcctggttgctcgtatgcgacagcacccttcacccacgtcaatccagcaggctcgcgcttcagcaatggcaacttcggcgtgctctacctggccgacaggatggataccgcgattgcagaggtgcgtcatcaccaggagcgctactggtcgaatgtgccggagctcaactatgagcgtttcgtcttcagagggctgaccgccagcttcagcgacagcgggatgagagacgccaccgcaatgccgntttcagaccccatctatgcgccggacgactacgcacattcgaatcgattgggaagcgaagtgaaacgagcgggatacccaggcctgcgctacaactcggttcgcgctccgagcaacatctgctgggcgctgatgacgccgcaacctgttacctcgatcatccaggctgctcatttcgagatgatttggtgtgggcaaatcatcagcgtcagccgcattacaaccatagttgtcgagtaa

SEQ ID NO: 355319 - DNA, 675 bp, Pseudomonas aeruginosa
atgttcaacagcaagatcccaaccctcaacgaactgccgagcagccagcaactgctgcgctcgaccgtgattgcactgatcgccgccattgtcctgctcgtcaccgtggtcatgccctcggaatacgccatcgatcccactggcgccggtcgcatgctggggctgacccagatgggcgaggtcaaacagcaactggccgcagaagctgcagccgatgctgcgacgcctgtagttgcggctccggcggcgccccagccggtacctcaagcggccccgcaacctgccgtcagcactgccgccgaggcgacggccccagccgtggcagcgcctgcggtagtcgaggccgaggggcagcagcatgaaatgagcattgccctggctcccggccaaggcgccgagatcaagctggagatgctcaagggcagcaaggtgaactacttctggacggccaacggcggcctggtgaactacgacacccacggcgacccctacaacgcgccgcgcgagttctaccacggttacggcaaggggcgcgccacgccagaggatcagggcgtcctggaggccgccttcgacggcaagcacggctggttctggcgcaaccgcaccagcaaaccggtcaccgtcacgctgcgtaccgagggtaattacattgccatcaagcgggtgatctga

SEQ ID NO: 355320 - DNA, 360 bp, Pseudomonas aeruginosa
atgctcagcaaacccatcagcgccaaggtgatcttcgccctcgctctcgccatcctgatggcctgggccgggcatgcgtctgcgctgttcgtgggggcgagccagccaacttggagcgacaaccagcatgtgcatgcgcacagccatggcgacggtgcgtttgcctgtgcggtctgtgcggatcattaccactcgccgctgacggctgaccacgtgcatgaaacaccgcacctgagcactgggctgagcatcgcctcgcagccggagcgtaggctgctgctggaaagacccggctactcgattcccgccagcccgatctacctgatcgaacggccaccacgtcctggtttggtgttctga

SEQ ID NO: 355321 - DNA, 1104 bp, Pseudomonas aeruginosa
atgtcgaccttcgccgagttgttgcagcaaggggccgcacaggcctggctgtatgtccccaccgccatcttgctcggggccctgcatggcctggagcccgggcactcgaagaccatgatggcggccttcatcgtggccattcgcggcacggtgcgtcaggccgtcctgcttggcctggcggccactgcctcgcacaccgccgtggtctggctggtggcgatcggcggcatgtacctggggcagcacctcgacgcccagaccaccgaaccctacttccaactcgcctcggccgtgctcatcgtcgccatcgctctgtggatgctctggcgcacctggcgtggcgagcaaatgtggcgcttcgaggaagagcagcaccatcacgacgaacgccagcacatcgataccggacacggcctcgtcgaactgtcgatccacgagcaggacgcgccgccgcgctggcgtctgcgcgcgctgagcgggcatgcctggcctgccggggacgttagtttgctcaccacccgcagcgacggacagatgcaggagttccgcttcgtcacccaggacggctatctgcagtcgctggatgcaattcccgagccgcatgagttcaccgcgcgcctgcgcctcggccacgccggacacgcccacgagtacgacctggagttccatgagcacgaccatgcccattcgcagctggagagcctggagctgtcgctggaggggtaccaggatgctcacgagcgggcccacgccaacgacattcgccgtcgtttcgccagccgcaacgtcagcaccggccaggtgatcctgttcggcctgaccggcgggctgattccctgccctgcggccatcaccgtgctgctgctctgcctgcaggtcaaggaggtgacgctgggtgcggttctggtactcaacttcagcgtcggcctggcgctgaccctggtcgcggtcggcgtcgccgccgccgtcggcacgcgacacgcgtccaaccgctggccctggttgggtgtgatggcgcgccgcgcgccctacctgtccggcctgctgatcatcgccgtgggcatctatgtcggcctgcatggctgggccggactgagcgcctga

SEQ ID NO: 355322 - DNA, 597 bp, Pseudomonas aeruginosa
gtgaagaccctacccgagacaattcttgaacaaagccggcagctccctgaaggcggtgtgcttgcgcccaagaatttcgttcacctgggcagccgtgcggcagtagaccaagccttatctcgcctggccaaggccgggaagctggtacgtgtggctcgcggcacctatgccgctcctgtcaccagtcgtttcggcacgcgcccgcctgctccggataaagtgatccgggcaatcgcagaacaacgtggtgaaactctggtgccgcatggggcgcgagccgccaacgccctcggactcacccagcaggtccccatcaaggaagcgttcctgaccacaggacgatcccgcacgatgaagttcggcaagactgaagtgctcgtgcaacacgctcctcgctggatgctcgcgctcgggtcaactctggctggtgaagcagtccgcgcccttgcctggatcggccagacacacgtcagcgaggcggtaggcaagcttcatggcacgctcccggagtcagaatggaactcgctgctcgcgagccgcaccatcctgcctacctggatggcgcaggccatcggtcgagagaacgcgcatgcctga

SEQ ID NO: 355323 - DNA, 1002 bp, Pseudomonas aeruginosa
atgcctgaacagttcttcgatctttcgaaacaggatcagcttgaagcacttcagttcgccgcggcccaaactgggcgtcctgctcacctgctggaaaaggacttgtgggtagtctggacgctgcgggcattgttctcagcaaatatcggacagagcttgaccttcaagggtggcacctcgttgtcgaaggcgtacaaagtcattgacaggttttcggaagacatcgacctgacgtacgacatccgtgagctgatccccgagttcacagggcactcggatcttccctcctctaggagcgaagcacggcgctggagcagcaaggttcgtgagcgcttaccgggttggatccaacagacaatccaccccgtcctgcaatccacgctcgaacaggagcaactggatgctgagttggaggtcacgggcgagaagcttttcctccgctaccctgcaatggccagcggaaccggttatatccctcccgtagtcactttagagttcggagcccgctccactggcgaaccccacgcacctcagcatgtgctgtgcgacatggccggcgcagttgagggggtgactttccccgaagcagatcccattgtcatggatatcgcccgaacattctgggagaaagccaccgccactcatgtctactgcgcacaacagcagatcagaagcgaacgattcgccaggcactggcacgatcttgccgcaatagcacgcaccgaatacttcgacatgatcgctgctgatcgacaggtcgccgatatggttgcgaatcacaaaagttggttcttccaagaaaagtctatagacggcaccgtagttgattaccatgctgctgcaagagggcacatccaaatcgtccctgatggcgcagctcgagaagcgctggagcaagattatgcgatgatgctcgacgacggcgtgatgattggaaacgcacgaacatttgatgacctaatgcaagagtgcacagagatccaaattcggcttaatgcgtag

SEQ ID NO: 355324 - DNA, 360 bp, Pseudomonas aeruginosa
atgtcgaagcttgccgaatttcgcgcccttgaacagcaattggccgctcaactggcagagttggaagctctcaagaaagacgatggcctgaaaaaggaaatggagtttgaggaaaagctccgcgccctgatgtccaaatacgacaaaggcctgcgcgacatcatcgccatccttgatccgcaaaccaaagtcggcaagctcagcaaacaggattccggggcgcgccgtcctcgccaagtaaaatgctacaagaaccccaagaccggcgaggttgttgaaaccaaaggtggcaatcacaaagtcttgaaagcttggaaagaagagttcggcgccgacgtcgtcgaaagctggctgcagtaa

SEQ ID NO: 355325 - DNA, 204 bp, Pseudomonas aeruginosa
atgaacagctcttgccgatgggtcctagtcaagcgatttgccgaagtcaccggctattccgagaatgccgtccgccacaaggtcaagaatgggatttgggtacaggggcgcatctggcgcaaggccccggatggccgcgtgttcgtaaaccttgttgaattcgaacgctgggtagaaagcgagcgctatccaacttcacactga

SEQ ID NO: 355326 - DNA, 1242 bp, Pseudomonas aeruginosa
atggcgggcaaagaaagcaggaagacgggttatacgggcatcgaaatccacggaaactcgatccgcgtctatttcatgtacaagggcgtccgacatcggcacaccctgggcatcgaaccaacgaaggccaacctcaagcacgcggcaggcttgcgcagcgcagccctgttcgcactgagatctggtaactacaacgaagccgatttcttcccgcattcccgtccggcagagacgcttgccgttgccggcaagcgcttggacgatctctgtgatcgctacaaaccgctcaaggcagtggatctcacgccggagacagagtcgcggtacgagattgcgctgaatacttgcctagagctcatcggccgcaaccgccaagtcaacaccctactgcccgaggacatacaaaagctaagagtggacctgatcgccacgcgcgcggtttcgacggtcaaccactacctcgccacttttgccggtttcctctactggtgcgagaacaacggctactgcggcgaactcggcaaacattgcacccgctttaccaagagcaacaaggagcccgatccgctcactctcgaagagttcaatgccctcatcgagaaaggttgtctgcacccgatcgacaaggcggccgtcacgctcgccgtctacaccggcctacggcctggcgagttgcttgcattggccgttgaagatgtggctccagatttcagcaagatcaaagtgcggcgttcgattacgcaatcggccacattcaaggtgcccaagaccaagaaggatcgcaccgtgctgttgtatccaccggcgcgcgaggccctgaagatcctcgtcgccgatgccgaacaacgcaatgcggcagagctgcgggtctggctcaaccgtcacgaatcccgcaccgaccgagtgcgggttctgctatcaccgaaaacccaggcacgcaaaaaggacgtgaacgattatttcgtaccaagcgcctggaacagcaagtgggccaacctgatccggcgatcaggcatccggccacgcccgccctaccaaacccggcacacctatgcctgctggaacctgactgcacgtggaaacttggcgttcatcgccaaccagatgggccacagcgactactccatgcttgtgaaggtgtacgctcgctggattgactcggagtcccccagggagttggagcgtatatgggaaggcatgctgagcatggctaggaatactcctgagaagctggcagcttga

SEQ ID NO: 355327 - DNA, 483 bp, Pseudomonas aeruginosa; identical to SEQ ID NO: 352462

SEQ ID NO: 355328 - DNA, 132 bp, Pseudomonas aeruginosa
atgagtagtgagcacgatggccaggaccaggacgacctgttctccccgttgccttacctgctggtttccggcgctgtcgtgctcatgaccctgctgctgcgctgcctgttctgcccgggcgagcagttctga

SEQ ID NO: 355329 - DNA, 1125 bp, Pseudomonas aeruginosa
gtgttcttccgcctggaagacctgccggaatcctgccgggtccccggcgaggcgcgcgatcggctgttcatgcgggtgatcggcagccccgacccctatgccgcgcacatcgacgggatgggcggcgccacctccagcaccagcaagtgcgtgatcctctcgaagagcagccagccgggccatgacgtcgactacctctacggccaggtctccatcgacaagcccttcgtcgactggagcggcaactgcggcaacctctccaccggggccggcgccttcgccctgcacgccgggctggtggatccggcgcggataccggaagacggcatctgcgaggtgcgcatctggcaggccaatatcggcaagaccatcatcgcccacgtgccggtgagcggcggccaagtccaggaaaccggcgacttcgagctggacggagtgaccttcccggcggccgagatcgtgctggagttcctcgacccgtccgacgacggcgaggacggcggcgccatgttccccaccggcaacctggtggacgatctggaggtgccgggggtcggtaccttcaaggcgaccatgatcaacgccgggattcccacggtgttcgtcaatgccgaggagatcggctaccgcggcaccgagctgcgcgaagagatcaacggagacccgcagcaactggcgcgcttcgaacggatccgcgtcgccggcgccctgcgcatgggcctgatcaagacccccgaggaagccgcgacccgccagcacacgccgaagatcgccttcgtcgccccgccccgcgactaccgcaccgccagcggcaagctggtggcggccggcgatatcgacctgctggtccgcgcgctgtccatgggcaagctgcaccacgcgatgatgggtaccgcggcggtggccatcggcaccgccgcagccattcccggcaccctggtgaacctcgccgccggcggcggcgaacgcagcgcggtacgcttcggccatccctccggcaccctgcgagtgggcgccgaggccagccaggcgaacggcgaatggacggtgaccaaggcgatcatgagccgcagcgcgcgaatcctcatggaaggctgggtgcgcgtacccggcgacgccttctga

SEQ ID NO: 355330 - DNA, 1929 bp, Pseudomonas aeruginosa
atgcacggtacgaaattggtttaccggcccgacattgacgggttgcgggcgatagctgtaattctcgttttgctcttccattttaatctcggcgtgccaggcggattcattggagttgatgtcttcttcgtcatatccggatacctgattacagaggtaatcaaagttggctgctcatctggaaagttctcgtttgtcgagttctatgctcgacgtctgattcggctgcatcccgcgctgataaccaccgtcaccatatgtatgggcgctggttatattataatggacccagcatcgctctcgtcgctggcttcttctgcccaatacgcagtattcgcctcttcaaacgtcttcttctggcttaattctgggtacttcgacgcatcagcacatacacaacctctacttcatacttggtcactagcagccgaatggcagttctacctggtatggcctttcgttgtatgggcatcgctcaaggtttcagaacgattcctggcttttctcttggccgtcattgccatcacttccctggctgcatcccaatacatgctgacagtggacgcgacggcatcctacttcctgatgccgttccgggtatttgagctggcgtccggtgcattaatggtctatgccacaagggtcagggttggagaaaaactagagtcgctgctacttgccatcggcatagtgcttattgctgcatctgcttttatgcttgactctgcatcgccatttccaggcttagcagccttgcccccttgcatcggtactaccctctgcatttatgccgggcgctcgacgctcggaggggtattgcgcacaggtccaatggtgtggataggcgtgatttcctactcgctgtatcttgttcactggccaatcttggtattttataaatactttgtattcagagaaataacgttagcggaaagcattggactgcttatcgcatcaattgctgccggctgggccatgtacgcgctgattgaacgtcgactcatgcctggcaaagttaagagtaacgcagcccgctatacagcatccgtggcgatgacggctgccgtgttcgcagtctcttggtccatcgttgccagcggcgggtatagccagcgcatcaatgcagaatatgcggaagctgtgagcaatcccgctgatttcagaacaaagaattatggcgggtacgggttcaaatcggatggggttatcggaaagaaagaaggagttgatgcatacctgcttggggatagtttctctctccagtatgcgtctgggttggacaaagccctggcgttgagcgggattgcccttcagacattgagcagcaatggatgcttcatttccagcacctacaccaggctacaagataatcggccaagaccagactgcctggatcgctacgcgagatcaatgcgcctgatggcgaatgacaggaagcccctgttattcgcgcttcactggactggctatcgcgacaaaactgcaagagcatcgggggagctaataaacttgcaagacgacgataaattcgctgaatttctggctgaaaatttgcagacgctacgcaaggatgttggtgatcgcccgctcataatcatcggcagccaacccttcctatcctcgatcaagtcaatttccgaatgcctgcttaggcctaatttcatccatcagccatgcatagactcgatgcgatacaaggtcagccaggctgaggcgttcaaaacaaacgaggcgctcaagaaagtcgtttctgggatgccgaacacgttctttttggacccctcagtctcattatgcaaagaaggtttctgtggacctaccatagaaggtaagcttatatattcggacaacacccatctctccctagatgggtcagaaatagcagcaagacaaatagccaagctgcttgactcgatcataaaaggatga

SEQ ID NO: 355331 - DNA, 369 bp, Pseudomonas aeruginosa
gtgatctccgcccgtgttgtctcgatcgtgttgggctgcatgctgctgatcggcctcggcgccgccggcggtgtctggctcggcgcgcgacactaccggccgcagttggatgccgcgagcgcggatctggctgcctgccgtgcctcccggggagagttggagtccgcagtggcggagcaggtccggcaggttgtcgcgctgcgcctggccggcgagcagcgcgcccgggatgcagcccaggcgctggagcagggacggctgcaggccgcagagcggtatgccgcggcacagcgcctgttgcgtgagcgctccgctggtgatcagtgtctggcagccgaagtggtcatcgacaaggagctggggctatga

SEQ ID NO: 355332 - DNA, 1413 bp, Pseudomonas aeruginosa
atgagcatgccgctgccgatgaagctccggacccggttgttcctcagcatttccgcgctgatcaccgtctcgctgttcggcctgttgctcgggttgttcagcgtgatgcagctcggccgcgctcaggagcaacggatgtcgcaccaccacgcgaccatcgaggtgagccagcagttgcgccagctgctcggcgaccagttggtcatactgctccgcgaaaaacccgacgggcaggccctggagcgctcgcagaacgatttccgacgggtcctggaacagggtcgggcgaataccgtcgacggcgccgagcaggccgccctggatggcgttcgcgacgcctacctgcaactgcaggcgcacaccccggcgctgctcaaggcgcccatggccgacaacgacggcttcagcgaagccttcaataccctgcgcctacgcctgcaggacctgcagcaactggcgctggccggcatcagcgacgccgagaccagcgcccgccaccgagcctacctggtcgccggcctgcttggcctggtgggcgtcgccatcctgctgatcggtttcgtcaccgcccacagcatcgcccggcgcttcggcgcaccgatcgaaaccctggcgcgggcggcggacaggatcggcgaaggcgatttcgacgtgaccctgccgatgaccaacgtcgccgaggtcggccagttgacccggcgtttcggcctgatggccgaggccctgcggcagtatcgcaagaccagcgtcgaagaggtgctttccggcgagcggcgcctgcaggcggtactcgacagcatcgacgacggcctggtgatcttcgacaaccagggacgcatcgaacacgccaacccggtcgcgatccgccagctgttcgtctccaacgacccccatggcaagcggatcgacgaaatactcagcgatgtcgatgtccaggaggcggtggaaaaggccctgctcggcgaagtccaggacgaggcgatgcccgacctggtggtggacgtcgccggcgagtcgcgcctgctggcctggtcgctgtatccggtcacccatcccggcgggcatagcgtcggcgcggtgctggtggtccgcgacgtgaccgagcagcgcgccttcgaacgggtccgcagcgaattcgtcctgcgcgcctcccacgaactgcgtacgccggtgaccggcatgcagatggccttcagcctgctccgcgaacgcctggacttccccgcggagtcacgggaagcggacctgatccagacggtggacgaagagatgtcgcggctggtcctgctgatcaacgacctgttgaacttctcgcgctaccagaccggcatgcagaagctcgaactggcttcctgcgacctcgtcgacctgctcacccaggcgcagcagcgtttcatggctcttcgcatttaa

SEQ ID NO: 355333 - DNA, 507 bp, Pseudomonas aeruginosa
ttggtcatttgggacaccaacatcctcgcactctactttagcggccgcctttcttctgatgaccagatccgcatgaatggtctcgtctccgagctttcacgcaagaaagaaaccatcggcattcccgctcaggtctgggctgagttccttgaagcggcaagccaggaggaggcggaagagagcgtgaagctattcaagtcaaacgccttctccctactcgcctacgatatgcgttgcgccattgaaaccgcagaggtggccagacaaggtcagacagtccgcaaaagcaccaagggaccgaagcgcgatcgtcaggctgtaaaagttgattggcagatcattgctattgccaaggtcaaccaggcacgactactgctcagcaacgacggaccaatggcagcagaggcaattcgtcagggcctcaattgcatgaagatatctgagctacctatccctgataatggccggcaacactcgattcgatttgaagaggatatccctgactga

SEQ ID NO: 355334 - DNA, 1041 bp, Pseudomonas aeruginosa
atgaaggcccaagaagagattttcgagatcgtaagaacagctcgccaacgaataaaggagctgccgtccagaaacccatctaaggccactggtgatggttatgtgcgcgaatataaccgtatggttggcgatgaaggagctgatccagaaaagctatggtcagcaatctgcgcgaccaaaagtaagtcgacatatcggagaagagtggccgccacaatttactgttgtcgcgctcagcttcaggaagcgttgcggagtcaaggcgtggcccagcgtgctggcgatataaatggccttagatatcaagctgaagtaattgaagaggtaatcggaatattgagtattgttgagaggcataaaggacagtgtcctctcgaaaatactgtcagacggaagtcaaagcgatctgatctaaaatacctaccaagcaattggagggatctgctccataagcaaattaagggcagcaagtacgaattggcatatctggttgaagcagtgtcgggatgtcggccaggtgagctcgagaaaggcgtcaaagtgattttttccaaagagagcgggctgctgactatccgggtcgacaacggggtaaaggtcaccgatcagaaaggccagccctggcgagaaatcacctatcgagtcgatcagggtccgttggttagggctctctatgaggtctgcagaaaggttgcacctgacgcgatcgagacggttgtcgacatagagaaaactaccaactggcgtgcagcgttgtcgtctgccgggcagaagttgtggccgagactgaaattcagagtctgcccgtaccacctccgaaatgctgcggccagcgactggaagcgggccgggctgagtgaagaagagatctcggccgcgctaggccactgtgtaaacaagacgtccagcaactatggtcagtttcagatcgggcagggggatggcggtttgagtccggttgaagtaaaagccgaacgtcctatcttgaatacccggactctatctccccatgtgggccgacccaccctgagccctaaatga

SEQ ID NO: 355335 - DNA, 516 bp, Pseudomonas aeruginosa
atggatttcatcaccgaaccttacaatcgctctgtagaccgcaagtcctttgactgcggtctacaccctgccctgaacacatacattgcccagcaggccagccaggacgagaagcgcaatgtctcgcggacgttcatgctgatcgaggacggccagctaatcggctactacacccttgccaatgcgtctgtcgtcgagtccgacctgagcgaagagcagatgaaaaagatgccccgctacccgatgccggcagtattgctcagccgccttgctgtggacaaaagccagcagggcaaaggagtcggtaagcgcctcatgagcgacttcttccggcgcgtatatgtgatctccaagcactctggggtagccttcgtggtggtcgacgccaaggatgatgacgcagcgcggtactacaagagcctggatttcgttgaaacgaacaccagccctcttcgcctggccctatcgaccggcaccctcattcaaggctacaaagcactggagacctcagactga

SEQ ID NO: 355336 - DNA, 432 bp, Pseudomonas aeruginosa
atgaacgacaaatcgaagtcccacaaaccaaccgccaaaggccagcccctgttacaggaagctggtagcggacgctttgtgacgctcgcttttgccggcgacccctcgcaactcaagcaagctgccaaacctgcgcacggcactgtttgggtgaagtccttccgactcgcgcgcggcgtggctaaggtcaagcaggtttccaaccgtgctgacaagttgtcgatggctgcaatgcagaagcagatccaagagctgcagcagcagatgcaagttctgatcgagcacgaatccgagcgcatccaggaagcggttgtcgtcgacctggtggatctcgaaggcctcaccgtgctcaattcagctgttgctcgcgacctggtcgataaccctccggcgccgaacgccaagctccaggctctactcgcgctgcgataa

SEQ ID NO: 355337 - DNA, 369 bp, Pseudomonas aeruginosa
atgagcgcctccagcatcgaagcgctggccagcgcctgggcacaggtcgccagggaagccgccttgccagccgagtacgagggcacggcaacaccggaggcgcatcgagccagcgagctgatccaagagcggattcgtgagcacattgttgcgagcaatgacatgcgcctgttcggcctattgcacctgctaggtcaagcatcgctgcgcatggagcaagtgctgtggccggaagattacgagcgcatgatccgtgaggtggaggaaaccctgcaggaagccgatgcccccaacgccaaatatttcacgcatgaagaagctatacaggctatgcagaaacgcatcgacaagcctcagcactccgagtag

SEQ ID NO: 355338 - DNA, 327 bp, Pseudomonas aeruginosa
atgagccgcagtcgtcgcaagacgcccattgttgggcacacgacctgtcgcagcgagagcgaggacaagaagctctggcatcaacgctggcgaacccgcgagcgtacagcactggccggcgcgtcgccggaagtcctgagcgcccatctgaccctgcgggaaaaccaggtcagtaacgtctggtcgatgggcaaggatggccgctcgtactggcccatcaagcaccagatcgctacggcggagcgcatcgccaaccgtaagggacgcaatccgcaggagcgcgccagcctgaaaaagcgcctgctgcgcaagtggatgagtaaatga

SEQ ID NO: 355339 - DNA, 528 bp, Pseudomonas aeruginosa
atgacgctgggtgctcgcggcgtacggtggccattggcgctgctcgccggcagcctggcagcaatgggttgggcaacgattgcgacgtcgccaccacggctgatctacaacgcctccgacagcgtgcccgtcggctggtaccgcatttcgccggccaactcgttggcgccgggcgatctggtgctggttcgcctgccgcctgaggtgaggtcgttggcggcgcagcgcggctacctgccggcgaacgtgccgctgttgaagaccgtggcggcgatggcgccgcagcgggtatgcgtgcagggcagccaggtgcgtatcgatggcgtcgtggttgccaggcgcatgaggagggatcgacaggggcgcgcgctgccaacctggcaggcctgtcggcacctggctgacgacgagctgttcctgctcagccgcagcaatccggcgtcgttcgacagccgctacttcggcccgatttccgccgacgcggtgatcggtcgggcgcagcccctatggctggaatcgcgtcgatga

SEQ ID NO: 355340 - DNA, 1218 bp, Pseudomonas aeruginosa
atgtaccaagcacttcttcgggaacaactggagacattgaagtcctccaaccaataccgcaccttcaccaccctcagccgcatctgcggccagtacccgttggccaaactggatggctgtgagcaagaaccggtggtggtctggtgcagcaacgactacctcgggatgtcgcaacatcctgcagtgcgcgaacagatgcacgatgcgttggagacctacggagcgggctccggcggatcgcgtaatatcggcggttcgcacgaggtgtattccagcctggaagctagcctggctgactggcacggcaaggaagcggcgctggtcttccccacgggttttggctccaacgacgccaccctgcagtgcctgctgcggcgtattcccgattgcgtggtaatcagtgacgaactgaaccacgcctcaatcgtcaacggcatccgctcgacgcccaacgagcgcaagatcttccgccataacgacgttgagcatctggagcagatcctcgccagctacccgcatggccaaccgaagatcgtggtgttcgagtcggtctactcgatggacggcgacatcgcccccatcgccgagatcgtcgcggtagccaagcgctacaacgccctcacctacctcgacgaggtgcatgcggtgggcatgtacggcccgcgcggcgccggtatcgccgccgagctggacgtggccgatcaggtcgacatcatccagggaaccatggccaaggccatcggcgtgatcggcggctatatcgcctcggaccaggtgatcgtggatgccgtgcgctccttcgctgtgggtttcatcttcaccacctcgctgccgccagcgatcaccgccggctgcctggccagcgtcgagcatctcaaggccagccgcttcgagcgcgatcagttgcatacccagaccgccaagctgcgcgagcggctcaagcactatgacgtgccggtgatgccctgctcgcagacccacgtgctaccggtgcgggtaggtgaagccaagcgctgcaaagcggcagccgaacgtctgctgcataattggcgtgtgctgagagaggtcggtcatacgggccttcggaagcgggctttggacggtgcaaaagagggcaatgttaacccgattcaccggcctgtgtcgggtccgttcggaaccggcgcggaccctcaggtccgcgcctgtgcgggctgctttcagcgtgccgcggtatag

SEQ ID NO: 355341 - DNA, 660 bp, Pseudomonas aeruginosa
atgcacggcatagccggtatcgatgaccttgacgatcttcttgctgtcgccgtcgaccagggcgatctgcccggcgtcgcgcagggtcaccgagaacaggttgggcaggtcgaggtcgttgagctgtttcttcggccggtcctccggcttcaccagcaccttccacgattcgcgcatctccggcatgccccactccggcggttgcggcggggtgtgctggatgtacttggccatcagggtgatctgttccttgctcagctcgccggagctgccccagttcggcatgcccagcggggtgccgtaggtgatcagcgcttccaggtattgctggccgcgttgctgggtgatgtccggggtcagcggcttgccggtggcgcccttgcgcaggacgccgtggcaaccggcgcagcgttggaagtagatctgcttggcctcgttgaactcgctttcactcatgtcgggggcaccgttggtgcgcaccacgtgagcgggatcgacggcggaagcggcaccctggtattgctcggcggctttcatgtcgtccttggcgtgagcggtggccaggcccagcagcgtcagcgaggcgagcaaggtgcccaccagtggcttgccaaatggcatggtctatctcctcaggagccctgcgaggcgctcccttag

SEQ ID NO: 355342 - DNA, 225 bp, Pseudomonas aeruginosa; identical to SEQ ID NO: 340992

SEQ ID NO: 355343 - DNA, 987 bp, Pseudomonas aeruginosa
atgctcccagtcaagaacctcttcgtgctctacaccggcggtaccatcggcatgttgcagaccccgcagggcctggccccggccggcggcttcgaagcgcgcatgcgcgaccacctgcaaagcctcggcgacgccccggacctgcgctggcgcttcgccgaactgcaaccgccgctggacagcgccaacatgacccagggcaactggctggcgatgcgcgacgccatcgtcgccgcgctcgacgccggccacgacggcgtgctcctcctgcacggcaccgacaccctggcctacagcgccgcggcgctgtccttcctgctcctcgatctgccgatcccggtgctgctgaccggctccatgctgccggccggcgcgccgggtagcgatgcctgggacaacctggtcggcgccctgcgcgtcctccaggagggccacgcgcgcggcgtacaggtctatttcaacgatgccctgctgcacggcgcgcgggtcagcaagctgcgcagcgatgcgttcgacgccttcgccgaactgccgcgaccgcgccacgccgagcatgcgccggtgcccgcggcgctcggctaccgccagccgcgccgggaagtgaacctcgccgtgctgccgctctatccagggctgcgcgccgcgcacctgcgcggactgctcgacagcggcgtggaagcgctgctgctggaatgctatggcagcggcaccggcccgtccgacgacgaggagctgctggcgaccctgcgtgaagcccacgcccgcggcgtgctgctcgccgcggtcagccagtgcgcctacggccaggtcgagttcggcgtctacgccgccggcagccgcctgcgcgacgccggcctgctctcggctggcggaatgacccgcgaggcggccctgggcaagctcttcggcctgctcggcgccggcctcggacgcgacgaagcgcaacgctggttcgccctcgacctgtgcggcgagaacgccgactga

SEQ ID NO: 355344 - DNA, 795 bp, Pseudomonas aeruginosa
  misc_feature (305)..(305): n is a, c, g, or t
atgctcagcgcgaagaacctgaagatcaccttcaaccccggcacccccatcgagacccgcgccctgcgcggcctgtcgctggacatcccggccggccagttcgtcaccgtgatcggctccaacggcgccggcaagtcgaccttcctcaacgcagtctccggcgacctgccgatcgacagcgggcagatcctgatcgacgacgaagacgtcacccgcaagccggcctgggcccgcgccaaccgcgtcgcgcgggtgttccaggaccccatggcgggtacctgcgaggacctcaccatcgaggagancatggccctggcgcagcgtcgcgggaccggtcgcggcctcggcagggcggtgcaggcatcgatgcgcgacggtttccgggaaagcctggcgaccctcggcctcggcctggagaaccgcctcggcgaccgcatcggcctgctctccggcggccagcgccaggccgtcagcctgctgatggcggcgctgcagccgtcgcgtatcctgttgctcgacgaacacaccgcggcgctcgacccgcgcaccgccgacttcgtcctgcatctcaccgcacggatcgtcgccgagaagaaactcaccaccatgatggtcacccacagcatgcgccaggcgctggacgtgggcgagcgcacggtgatgctgcaccagggccaggtggtgctggacgtctccggcgagcaacgcaagggcctcgacgtaccggacctgctggcgatgttcgagaaggtgcgcggcgagaagctcgccgacgacgccctcctcctcggctga

SEQ ID NO: 355345 - DNA, 591 bp, Pseudomonas aeruginosa
atgagcgaggtaagtcagatgcgcgatacaagcagatggagtcttctgcaagaaattgcaggccgttatgcgggccagtcagtgctttactgcctgaccttcagccacggactgatgaaggtggggaaaactcagaacatgaagtcgcgactggaagctctttcagctcacgggttgctgagatcggttgctgtcaatctagtagttcagcccgtaaacacgtgccttgctgatgctgagaagatcgccctcaagcgattcgctgggctaacccagcagcatgagcctgaggtgttttctgtgctcgaccttggcctcgtcaagtcggttctcgccgagtcggctgatatggccaaggagaagcagccaaagccagaggctaccgatgcattttttgattcatgcgccagatcatcagggatgtacgccgcgatgattcatctggcaataaaccgagctaaggaaacgggaatgcacgcaagggctgccgagcttctccaggtcgtggaaaccacgccgcctggcgagctgaacgaagtcgtcagaaatatgctcggtaagtcgagcactggcgcggccaactgcaactga

SEQ ID NO: 355346 - DNA, 186 bp, Pseudomonas aeruginosa
  misc_feature (164)..(164): n is a, c, g, or t
atgctcatcaagatgctgccggaacctgaaaagaagcttctgctcgatttgatccaactgctggcactttccgacaacccgatactctgggatggaaagaagtacgacgagctgacgtcagacaccgacctgagcaatctcggctcttcgcatttaagggtgtngctgatttctaaaccctcctga

SEQ ID NO: 355347 - DNA, 225 bp, Pseudomonas aeruginosa
atgcgaaaggccctgacccattgctgcccccgctgtgattggcagcagacgtcggtactcagcggcgcggagagcgcactgcaagagcgcttcgatcattgccctcggtgccgctcccccggcctccttatacgccaggcaactcgcctggagaccctcgcggccagtgccgctcgcttgagcacaactattacctaccgccagcatagcaaattgctactgtaa

SEQ ID NO: 355348 - DNA, 207 bp, Pseudomonas aeruginosa
atgaatgaaaaggccttactggctttacgtcagtctcttcgaatcatccgcagggagaacgacgtacaccgagcgcgcatcgagtactacgaaacggtcggaatgctgcgcggattgcactacggcggagcgatcgactgctggcagctattagctctaaccgagctagcaggaagcgcatacatcaacgctggcaaaccctggtaa

SEQ ID NO: 355349 - DNA, 498 bp, Pseudomonas aeruginosa
atgcgcctgcacaaactgaaggcctgtgaagcgaccggcacctacctggccgagtcgccgctcacggaaaccgacattctgctgatggctcggcaattggccactctgcgcctgcgccggggacgagcactgacgtcgcctcaggaggtgttcagccacctgcaggccctgctggccgactacgagcacgaagttttcgccctgctcatgctcgacagttgccaccgagtaatcgccttccaggaggtgtttcggggcacgctcgacggcgccagcgtttaccccagagaggtcgtcaagatcgccctgaaatacaacgctgcggccatggtcctggtacacaaccatccttccggcaacccagaccccagtcaagctgatcgcatcctcaccaagaaactgcaggaaacgctgaacctggttggtgtgcgcacgctggatcacatcgtcgtgggccgcgaaggttgcgtgtcgctggcggaacagggttatctgtga

SEQ ID NO: 355350 - DNA, 180 bp, Pseudomonas aeruginosa
atgaaactattacgtatcctggcggcagcagccatgttcgccggcatcctggccgggtgcctggcactgttgctgttggtgcttctgatggtgcgattcccgccaatactcattgcggtattactgacctgctggatcgtcagcaggctgctgaacacccgcacccaaccctctcaatga

SEQ ID NO: 355351 - DNA, 1164 bp, Pseudomonas aeruginosa
atgagccggatcaatgcgttgatcgccgagctttgcccggagggggtggagttcaaatcaattggcgaaattgccgctgttggcactggtagcagtgaccggaaagacgcaaaagccgatggtgagtttccgttctatgtgcgctctcaagacgtattccgtatcgacgaatacgagttcgacgaagaggcaatcttgatcccaggagagggcgggattggcgagatattccactatgtatccggcaagtatgccctgcatcagcgggcctacagaatttgcttcaatctggccgaactcaacacgaaatttgcgtactactactttgccgttcattttaagggcttcatcttgtcgaaagcagtcagtgcgaccgttacttcgattcgtaagccgatgattactgacttctgtattcccattccgccgctcgaagtgcagcgcgaaatcgtgaaagtgctggacactttcacggagcttgaggcggagcttgaggcggagcttgaggcgcgtcgcaggcagtacaagtactaccgcgacgccttgctcgctttcaacgatcaagatattcgctgggccgcgatggccgagctcggcgagttcatccgggggcggcggtttaccaaggctgattacgtcgaggacggtgtgccttgtatccactatggcgagatttacacccgctacggtacggccgcagatacggccatctcgcatgtgcgtgcggatatggccgcttcactgcgttatgccaagcccggtgatgtagtggttaccgacgtaggggaaaccgtagaggacgttggcaaggccgtggcctgggttggcaccgaggatgttgcgatccacgatcactgctacgccttccgccattcgatgaacccgaagttcgtttcctactgcatgcaaacgagctcattcattgcagagaaggccaagtatgtggcgcgtaccaaggtcaacaccttgctgattggcggtttctccaagattcgtatcccagttccatcgctcgaagagcaagagcgcatcgtcgccatcctcgacaagttcgatgcgctggtaaatgacatttccatcggcctgcctgccgagattgccgctcgccgtcggcagtacgcctactaccgcgaccgtttgctcacattcaaggaagccgcatga

SEQ ID NO: 355352 - DNA, 300 bp, Pseudomonas aeruginosa; identical to SEQ ID NO: 324438

SEQ ID NO: 355353 - DNA, 348 bp, Pseudomonas aeruginosa
atgaacaagggtgtgatgacctaccttccacctcacgacggccatccaggcctggaaatagcctgggcggccgactgcagagaagcattcaaccagggcgtgaggctggcccagacctggctcgataacgcccgcagcggatggctctgggcagtgatgatcgccgagcgcgatctgctgcactgcgctattgagaggcgagcttttgaggtgggttttatgagccgtatccaccagcgcatgtgctcgtaccaaggctgcggtgagcgcgccaagacctgtactactggtgactacttcgggcacagaaagaccctgacgctcgccgaagcgaggtgtcagggctga

SEQ ID NO: 355354 - DNA, 318 bp, Pseudomonas aeruginosa
atgtctgccaaggaagagcagttgatccagttgctgggcctcatggctcgcggcatgacccacatgaccgcatccataaccgcaatggccttcgaacagctgcgaagccaggatgcagcactgcagagttcagccaagcgcatgatcgagcgcatgcaggctatcaatgaagagctggatctgcagtgggagctggtcggccagctaaccggacagcgggatcaggaagtgctggtagagaagctggacatttcatcggttcgagtgcaccgagaagcggagactgccgagcttgaaaggttggcaggtggccgctaa

SEQ ID NO: 355355 - DNA, 459 bp, Pseudomonas aeruginosa
  misc_feature (145)..(154): n is a, c, g, or t
atgcaactgattactgaattgattcacccccaactcaaatccaggcaaggcagagtatttcgtcgccacgccgcccgcggtattgttctgcgagaagagcaaattctgttgctcttcacagaacgatacaacgacttcagcttcnnnnnnnnnnacatacaagtactccagaacttcggctacatcgaagagtaccgaccttactggaagccgcagtacgatctgatgcacatgacctcgcacttctacgtgtgcgatatagcgcaacagctgcagccggtcagaatggaaagtcacgagatcgccaacggtatgcgtcccatctgggtcgatctgcatgaagccattgcgcataacgaggcagtgatgcgtcgccaggaatcctcaatgggtcaatcaatccagcgagagaccttcatgctacgaagagtggctacccaactcctgacgacctgctga

SEQ ID NO: 355356 - DNA, 351 bp, Pseudomonas aeruginosa
atgagcgatgagatcgacctggagcacttccgcgacttgctacaggcccgcttggcggaactggacagccttgaatccgcagcgcaatcgcgggactccatcgagttggatcagagcaaggtaggtcgactctcgcgcatggatgccctccagcaacaagccatgctggatgccaaccggttccgtggcagacgggagcgcctgcgcattgaggcagcgtttcgacgcattgccgaaggcgattatggctactgcgcccagtgcgatgaacctatagcccttggcaggctgaacttcgacccggcaacgccgctatgcatcgcgtgcgcgaacaaagccgacgataattag

SEQ ID NO: 355357 - DNA, 849 bp, Pseudomonas aeruginosa
atgacctatgtgatggcttgcatcgacggctctccttctgccaccgcagtatgcgactacgcggcctgggctagcctgcgactcgattgtcccctggcattcctgcatgttctcgatgagaaccgctacccaaccaacagtaacctcagcggcaacatcggcctgggcagccgcgagcatctgttggaagaactggccgaactcgatgcccggcgcagcaaactcgctctcgaagaaggcaggatcatgctggaggctgcgaaacaacgggcgcagcaagacggtatcagcagtccgctggtcaagcagcgtcatggcgacttggctgaaaccttggtggagctgcaagaagaaatccgcctcgcaatcatcggtaagcaaggcgatcacaccagtgccggcgcacaggtcggcagtcacctggaaagtgtattgcgtacactcagccgtccggtgctggtgacccccaccgccttcaaacagcctgaaagcgtgatgctcgcctatgacggccggccgaccatggataaggccgtccaactgattgcgggcagcccattgttcaaaggcttgcccatccatctcgtgctggtcggcgcggataccaacgacgcctgggagcaactcaagtccgcgaaagagaaactcaaggctgcgggcttcgatgcccagatagccatccgtgctggcgaagtggaacctaccctgcacgcttaccagaacgagcatgccatcgatatgatcgtgatgggtgcgtacagccgctcccgtatccgtgagttcctggtcggcagtactactaccaagatgctcagcacctcccgcacccctcttctgctgttgcattga

SEQ ID NO: 355358 - DNA, 1161 bp, Pseudomonas aeruginosa
atgcccgaggcacctatatcgccaagcatcaactatctccgcaacgactccagcctgcatcgcctgatgttggaactgctggaaaaagccgatatccgcataggtggagatcgcccctgggatctgcagctcaatggccctggcctgcccgaacgcgtattcgcccaaggcaatctgggacttggcgaggcctacatggagggcctttgggacgctccgcagctcgatgagttcttccatcgactgctcgcagcccacctcgaccaacacgtacagcctttgcggctgatcttccatggactgcgcacgcgcctagtcaacctgcaaagcttcagacgcgcctggcaggtgggcgaagctcactacgatctgggcaacgacttctatgcagccatgctcgacccgcgcatgacctacacctgcggttactggaataaagcggcgaccctggccgaggcgcaagaggccaagctggatatgatctgtcgcaagctcaaactggagcccggtatgcgcctgctcgatatcggctgtggctggggcagcctgatggggtttgccgccgagcattacggggtcgagtgcataggcgtgaccatctccaaggagcaggccgcctgggccaaacagcgctatgcgggtctgccgctggagtttcgcctgcaagattaccgtgaagtcgaaggccagtttgatcggattgccagcgtgggcatgttcgaacacgtggggcgcaagaatcaccgcaccttcatggaggttgcacatcgctgccttgccgacgatggcttgtttctgctgcacactatcggcaagaacatgcgccacagcacaccggacccctggatcgacaggtacatcttccccaacggggatctgccgtcagctggccagatcggtgatgccgcggacaatcttttcgtagtcgaggatctgcataacttcggtgccgactatgaccgcacgctcatggcctggtacgaaaatttcgaactatcctggcccaggttctctgacgaactcggcgagcgtttctatcgcatgtggcgttattacctgctgtcgtgcgctggagcctttcgcgcgcgcgatatccagctttggcagtgggtgatgagcaaagagggtgtcccaggaggctactcacgggttgtgatgtag

SEQ ID NO: 355359 - DNA, 849 bp, Pseudomonas aeruginosa
atgacagctgtcatttcctgtattgacggatcgccgtcttcagccgccgtatgcgactactccgcatgggccagcgtgcgcctcgccgcccccctgaccctggttcatatcctggaagaaacaccgaaagcccctaccgactttaccggcagcattggcctgggtagccgcgagcatttgctgcaagagctcgcggagcttgacgagaaacgtggtcgcttggcgcgcgaacacggtcagcacctgctggaagctgccaagcatcgcctcgaccaacttggcatcatgcatcccaaagcggtacagcggcatggcaacctggtcgacagcctgaagaagatggaagacgacatccgcctgctggtcatcggccgccagggcgagcacagcgaaaatcttttcgagcacataggtggtcacgtcgagaacgtcatacgcacgctgcaccgcccagtcctcgtggttccgaccgacttcgtgatgccgcagtgctttctggtcgctttcgatggcagtgccaacggccgtcgcgtggttgagcgtctggttcagagtccactgctcaagggcctcgactgccacgtgctgatggtcggcgagccatcaaccgaacatcaggcgcaactcgactgggcaactggccaattgcagcaggccggctataccacctactcgaaaacctgccagggtgatgtcgaggatgcgctggaaagctattgccaggaccaattcatcagccttctggtcatgggggcttacggtcactcgcggattcgtcagttcctggtcggcagcaccaccaccaacatgctgcgccgggccaagctgcccctgctgatgttgcactga

SEQ ID NO: 355360 - DNA, 1488 bp, Pseudomonas aeruginosa
atgcttcagaaactcaagcaagactggttctcaaacatacgcggcgatttgctcgccggcatcgtcgttgctctggccctcatccccgaggccatcgccttctccatcatcgccggcgtcgaccccaaagtgggtctgtacgcctcgttctgcatttctgtagtaatcgcctttgttggtggtcgccccggaatgattacagcagcaacgggcgccatggcgttgttgatgatcacactggtgaagaaccatggcctggaatacttgctcgcggccacgttgctcacaggtgtactgcagatcgtcgcgggctacctcagactaggctcactcatgcgattcgtttcgcggtcagtggttaccggcttcgtcaatgcgctagccattctgattttcatggcccagttgcctgaactgaccaatgtcacctggcatgtgtacgccatgaccgccgccggtctgggcattatttatctgtttccctatgtaccactggtaggcaaggccattccctcgccgctggtttgcatcgtggtgctgacggccatcgccatgtatttcggcatggatatccgcaatgtcggcgatatgggccagttgccggacaccctgcccatcttcctctggccggacgtaccgctgaccttcgagaccctggcgatcatcttcccctatgccgccgccctggcagtggtcggcctgctggaatcgatgatgaccgcaacgatcgtcgatgacctgaccgacaccaacagcgacaagaaccgcgagtgcaagggccagggtgtggccaatatcgcctccggcctgctcggcggcatggccgggtgcgccatgatcgggcagtcgatcatcaacatcaaatccggcggccgcactcgcctttcaacgctgtcggcaggtgttttcctgctgctgatggtggttttcctggccgaatggctgactaaaatcccgatggctgctctggtcgcggtaatgatcatggtcgccatcggtacctttagctgggattcgctgcgcaacctgaagaaacacccgctgtcgaccaatatcgtcatggtggtaaccgtcatcgtcgtcgtggccacgcacaacctggcatacggtgtgctggctggcgtgctgctggcggccatgttcttcgccaataaggtcggccattacatgcacatcggttcctcggttgacaacgatggcataagccgcacttacaacgtcactggccaggtgtttttcagctcggcggacaagttcgtagccgcatttgatttcaaggaagccctggaaaaggtcaccatcgaccttactcatgcacatttctgggacatcactgcagtggcagcgctggacaaggtagtcgtcaagttccgccgcgaaggtactgaggtcgaagtgctcggcctgaacgaggccagcgccaccatcgtcgaccgctttggcgtacatgacaaaccagacgccgtagacaaactgatgtcccactaa

SEQ ID NO: 355361 - DNA, 1506 bp, Pseudomonas aeruginosa
atgcccccaacgacaaccgctgcctttgcgcacaacttccttggccatgcgccaacttggtacaagcaggtgattgtcgccttcctgctgctcaatccgttctgcttgtggctactcggcccgcaggtcaccggctggctgttgattgccgagttcattttcaccctggccatggctctcaagtgctacccgctgctacctggcgggttgttggcagtggaggccttgttgcttggaatgacgactcctgaagcgttgtatgccgaggtgaccaccaatcttccggtcattctgctgctgatgttcatggtcgccggcatctacttcatgaagaacctgttgctggtgaccttcacgcagatcctggtcggggtgcgctccaaatacttgctggctctgctgttcagcatgactgcggcactgctatcggcatttctcgatgcactgacggtcacggccgtcattatcagcgtggcggtggggttcttttccgtctaccacaaggtcgcctcaggcaagggctaccatcacggcgaacacaaccataactccgacaaagaggtcatcgagctgcatcgagaggacctcgaagggttccgtgcctttctgcgcagccttctaatgcatgctgcagttggtacagctcttggcggcgtatgcactctggtgggcgaaccacagaacctactgatcgcgaagaccgcaggctgggacttcaaggatttcttcaccctgatggcaccagtgtccatgccagtactggccgccggcctgttaacttgtgttgccttggaaaaactgcagtggtttggctatggcgccaagttgcccaagcccgtacgccatgtgttggaggaatttgccgccagtgagaaatccaggcgcggccccagccagcgagccgcgctgataatccaagccatcgccgcactggtgcttgtgctgggcctcgcccttcacattgccgaggtaggcctgatcggcctactggtaatcatcctgatcgcatcgttcaacggcgtgaccgacgaacaccagatcggcaaggcctttcaggaggccctgccattcacctcgctgctggtggtgttttttgccatcgtcgcagtgattcacgagcaacacttgttcagcccgatcatcaccgcagtgctggctctaccgattgaacagcaaccggggatgttcttcctcgccaacggcgtactgtcgatgatcagcgacaacgtgttcgttgcaaccgtctacatcagcgaaatcaagcaagcgctggatgccggcaccatagaccggacgcacttcgagcgcttggccatcgccatcaacaccggcaccaacctgcccagcgtggctacgcccaatggccaggctgccttcctcttcctgctaacgtctgccatcgcaccgctggtgcgtctgtcctacggacgcatggtggtaatggcattgccctataccttggtaatgggcggcgtcggcctgttggcagtgatttttctcgtttaa

SEQ ID NO: 355362 - DNA, 1056 bp, Pseudomonas aeruginosa
atggcggtctggtttgccggctccagagagggcgccgcagatgttcaggttcgcggctcgcgttacgacgcccaagaagccgagtggggagaggaggtggttcttgctacgcgggaatctaccgagagagcgacccagaaacacatacgcaagctgggcaaccctgttatcgcgctggctcccgacaaccggctgtggcttttctacgtctctgtgtccattggtggctgggctggcagcgccatcaatgccatgtactcggatgaccttggcgaaaactggtcggcacccaagcaattgatcactacccctttcttgaacatcagcacgctcgtacgcaacgcgccagtgttccatcgtgacggcaccatcggactgccggtctatcacgaatttctgggcaagtttgccgagtacctgtacatcagtccggccggcgtcgttgtcgataaaacccgtatcagcaggggcaagcactccctgcaacccacgatagtaccgatggacgagcacaatgccgtggcgatgttgcgctatgcgggtgacactcatcacaaggtccttgccagtcgaaccgaggacgcggggcaaacctggagtgagccttatcctgtcgatcccgccaacccaaattcctcgcttgcagcagtggctacgcctgatcacggattgctggttgctctgaatgatcttgaagatggacgttttcgactgcggctgatgggaaccgattccggtctcgatttgtggaagccagtgattgatctggacgagtctcccgatccggatggcaatccattcagtcttgaggtttatcgagaaattatcggcgacaagttcctccgttccagcggaccgcgcagagagagccttgtcgatgagtttctggcaaatctagaccagcgggtgtgcaaggatcacggctgcgacttcgaatatgaatacccgtacttcatcaagagcggcgatgggctctatcaccttgtctattcctggaacaacaccttcatcaaacacgtcagtttcaatgacgcctggcttgaggagcagctctga

SEQ ID NO: 355363 - DNA, 615 bp, Pseudomonas aeruginosa
atgcttgaactttggcaagcacatttgacttttgcgctactggcattcgccattattccgaggcttggcttcagcccggccctgcagtttgtccgtctggtcgtgctgctggggatcagtttcattcccgtggacggactttcgctggcggcttatatgcgcagtttcacggatgacgtggccatcaccacgttggtggcactgacgttcgttgcagcggtaaaaatgggactggtggagcaactggatcgcactatccgcttgcaggtgttggtcctgatagcggctttggcgctatttctctatcccgccacgatggggctgtcctactttgacccctatcggctgggctacaacccgcggccattgatcctgatcataggcctgctgaccttagggctgttgatgctgaggaactggttgggggcctgcatgctgggatttgcgactttggcattcagcctgggccttaagccctctccgaattattgggactatctgctcgatccgtttattgctctgtactgctggggagccttgcttggctacgcgattaagttgctcgtgagccggtcgaacgcacctaaagagctgaggctgccgatacgcccttga

SEQ ID NO: 355364 - DNA, 2043 bp, Pseudomonas aeruginosa
atgatgggttggcttcactcgcggcgcctgcactactggtttggcgcggtaacgatcctgttcttggtgctcgcggcattgcggggactgttcttcgtggggttctcggggtttgaggccagcgcgctcggtgaagtcgaggcggtatcgcaaaccctggggatagggctgcgattcgaccttcgcttggccatcttgctgatgttgccagtcgctttgctggcctggctgccggtgtggaatctcatcacttcgcgagtgctgcgctggctagcgcggctgtatctggcgttggcgctcggcgcggtgctgctggtttatatcatcgactttggccactacgcctacctgggtgtgcgtatcaatgccaccgtgctgcgcttcctcgaagacgcgcaaatctccaccgacatggtctggcaaacctatccggttgtgtggatcagccttggctgggctgccgcaaccgccctggtttggtggctgctgctgcgcctggagcgggtaaccctcgaacgtccggaaaagccgatcagccgcctttcgctgacttggggcagcgcgctgatggttgtggcggtctttctcggcattctcggccgcgtcgacaacatcaacctggaaaacccggtgccgttgcgctggagtgacgcattcttttcgggggacaaccagatctcggcgctcggcctgaacccggtgatcttcctctacgacaccctgaaggtccccagtcagccctatgatcgggagcaggttgctgagcattacgatgttgtcagtcgctatctgggggtggaccagccggatgcgcagagcctgaatttcagccgtgaacaagcatcgcaatcctatgccattgccggtagtcagccgcctaatgttgtgttcgtcatgctcgaatccctcggtaccagcgccgtgggtgcctatggcaatccactgaacccaaccccaaatatcgaccgactggccaaacagagttggttcttcgaaaacttctatgtgccggtcaccggtaccgcaaaaaccgtttgggccagcatttccggtgtgcccgacgtttcacgtcaagaaacggccacacgtaacccgctgatcacccgccagcacagcctgatcaatgcgctgcagggttacgacaagtactacatgattggcggcaactccggctgggccaatatgaacgcgctgattcgtcaaagcatcgacgatgtccaactgttcgaagagcgccattggacttcgcccatggtcgatgtctggggcatttcggatctcgatctgttcaaggagagcgatcgaatcctgcgccagcaggctgaaggcaaacccttttttgcctatatccagaccgcgggcaatcaccgaccgttcaccattcccaaggagaacgatggcttcgaggtgctcgatctgccgctggaaaccgtgcaaaacgctggctcgcgtagcttggcccagtacaacgcggtgcgcctgctggacttcaatatcgggcgcctgatggagattgctcaagagggtggttggtatgacaacaccatcttcgtcatgtttggtgaccacaacactcgcatcagccagattcctcatatgccgcctgcattcgaaaagctgggcctggaaagcaatcacgtcccgctgctgatccatgcgcccaaactgctggagccgagagttatcgaggaagctgtgggcttggtcgacctgctgcccagcgtgctgggcatggccggcatggaatttcgcaacggtgcgatggggcgcgatatccagcagccagctccggagggggagcgcgtggttccgctggtgctgcgagaaggcactttcccgttgatcgggggtgtgaccaaagatttcctgctacagatgcaacacgacggcagccagccaaccttgcatgatctggcctcgctgacaccgctggataacgtcgctgagcagcaccccgaagagtttcgccgcttggcagagctcacccgggggctgcatgagacctcgcgcctaatgctctatcagaacgtcagaaaggactga

SEQ ID NO: 355365 - DNA, 450 bp, Pseudomonas aeruginosa
atgcataaaccaagcatcctgctgctttgcagcctgctcgccggcacgggcgcccatgccggcacctacgaatggacttccggctggggcatgggcgtcagcgagcatctggtgggcgacggcaatggcaacgagctgaacatctcctgcccggatcatgaggaggatggctacgtccgcgcctacgccagcatcgacggccggcaatacagctccgatgagggcagcggcttcgacgtgatcgtcgacggagagacctacagcaaccccttcttcaccgactgccgagtgtgcggggccaacttccccggtttctgggaagccctgcgccaggccaaccacctgaagctcgtggcggacgacaagaccatcagttttcccaccaaaaacatctccagcgtactccagccgctggacagcccggagaacagctgccgctcggcctggtag

SEQ ID NO: 355366 - DNA, 555 bp, Pseudomonas aeruginosa
atgtccgacgctcaaagcactacgaaccagtggttctatgaggaaaaaggcgagcgcaagggcggcgccagcgaacaggagatggtcgagctgatccgcttgggccgcctcggctacggcagctccgtgtggatgcccggcttcaacgagtgggcgaagctggaggacacccccctgcgacaacacctactgcagaccccgccaccactggttggcagccaagtgaacaacaccctggtctgggtgctcgccttcgcgcccatcataggctacctaatggagtggttcgtcgcaggcgctctcaatggcagcgaagcgacagcggcgcgagcgatggaaaacgccagttactggtacatcacgctagcgctcaatctgctgctgtccttcttcgacgagaagcgtctgcaaaaggccgggcataataccagccgcttcaggggctgggtctggctggtgccggtgtacctgtatcaacgcgccaaaaatctgcagcagaacctggcctacttcattgtctggctggtgtctttcgcgctggtttttctggcctga

SEQ ID NO: 355367 - DNA, 708 bp, Pseudomonas aeruginosa
atgaaagccatgagcagaagaaagaagaaggaaaacccaataggcctgctgattatctgggttctgggattgctgctgataattttcactgtgctggccagtctgatcatctggctggggtgggcaacctgcgaggtgctgtatggcaaccatccccggacgccggaggaagcggacatcctcctggatagagacgagcgccaggaagtggccaatgcagacaggcatattcgcgaagtcgaggcgcgcctggcgcagatagagatcgaaggccagcacctgcggcggcgtaaggatggtctgttccatgccggcagtaatttgggcgcacaactcaatgcagagatcgatgagctcgtgcgggacctgagtgacagccaggccattcgtcatgaactgcttgcacgtcccggcgaacgtctgcgcaactgggccgcgcccctaagccgtctgatcacgttccgctgggcaatagtggtttaccttgtttgtatcctttacgccacgttagcgaagccggcctccgtcgtgcatatgaaccagatgatcctcgactggctgaatgcctacttaccgcctctgagcattccaatctatggcggcatggctctggccagtatcgtggcaagttgcgttgcaggtgccacctatctgctctacagccgcctgatacacggccactatgcccggcaactaccgggcagttga

SEQ ID NO: 355368 - DNA, 591 bp, Pseudomonas aeruginosa
atgagcagaactcgtcgatcctttcatggaaacagctatcaggtcgtggatatctggcatgccgtgacaaccaccggaaagtgctggctggggctggctggagccatggccatcggtggcggcagcctgctggctctgctggcaggagagcgtcttcctccatcttggcctggcttctggctgttgctgtgcctattgctggcgactccctttggcctgaaggtttggcgcagccaatcggctggcatcctgcttgatccacagcagggcaccctgagtttcagcgctgatgatctggaaaacagcctgcacgacatcctcagcctacggcgcttcttcgatcatgctcgccgcatcagcgtcgccctgcgtgatatcgagcgcctcgataacgatactttcagcagcggccgcgggcagtttcgcaagcgccgtttcgccctcaacctctctggcgacttcggctcctaccagttgatgttcagccacaagcagaagcgagacgagtgccgcagtctgctgatccaggtgttgcgtcgcaccaaaggcaccgcgccttcgcgagacagcaatatcgcctttccctactga

SEQ ID NO: 355369 - DNA, 1677 bp, Pseudomonas aeruginosa
atgcacctcgacaacgccaagatcgcgctgatgtacctgctcgaccagttggtcaatggcggactgaatgcgcgcttcgccaagggcaaccccaagtttccccattcgctcagcatgctgaccctgggttggctgttccccatgctcgactacgtaatgaccggggacgagcgagtggggcgggtgcacaagaggttcctcaacgaagtgctgaacaacggcctgacggtcggtgatttcaacgctgcggacaaggccctgcgtgacaacggtgctgcgttcgatccgaaggtgccgcctgcatttctgctgatcgccgagcggttgcagccgggtttctgcttgagtatctaccgttgcctggacagcctgatccaggcggcgattgcttgggacggggaaaggactccgcaagacattgcccgggcggaggaggtcctgcggccgatccgccagcattttcacctgcccgacctggcgcccgctccggctgcgcccaagtcggcagccagcggcaatgcactggcggaattggaaagtctgatcggcctgcaaggcgtcaagcaggaggtacgcaacggcgtcaatcttgcccggtacttgctcaatcgccgcaataacggcctgccggtggccgcgacctcgctgcatatggtgttcacgggcaaccctggtactggcaagacgacggttgcccggttgatagcagacatctaccgggacatcggcatactgcgcaaaggtcacctggtggaaaccgatcgctcgaagctggttgggaagttcctggggcaaacgccgtcgcaggtggccgagatcgtggacagcgcgctgggcggggtgctgttcatcgatgaagcctactcgctggtggtcaaccgtgattcggaagattacggcttcgaggcggtggataccttgctgaagctcatggaggaccaccgcgatgacctggtggtgatagtcgccggctacaccgccgaaatggaacagttcatccaggcgaaccccggcctcaaatcgcgcttcacccgctacatccacttcgacgactacaacgcaggggatctgcagcagatcttccagcgcttgtgcgacaagaatgaattgcgactgaaaccagacgccaaggcagctagccggcgcgccatagaacaaatctggcaacaacgcggcgagaacttcggcaacgcacgagaagtgcgcaccttcttcgaaagcgtgatgcaacggcacgcgaaccggctgtctctggtggagagccccgacaaggcagcgttgtcgaccctcaccgtcgaggatatcccctcaatgagcgacgccattttcaaggccagcctcaggcaaacgctggcgtatatcgacgcctacaatgtcgagctgcttcgcgctatcgaaacggacttcaaggacgcactgcagtgccctgatggtgacgacgaaggggagagcgaggatgaaggagcccaaggggacgtcgagggcgaagaaaacctgaccccgccggaggaggagccgccgccacctgcacctcgcaccaagcgtccgccaccggagccaccgcagccaagagcacaggcctatcagttcgaattgaccaggctacccaactggcatttccaactacccttttttgcagccgtggtcgcgacggtcttgttgttgttcgcccgatga

SEQ ID NO: 355370 - DNA, 1851 bp, Pseudomonas aeruginosa
atgcaatctctgcctaacaaactgagctgcttcagcgaccagcccatcaagtcgcaacacgacgaccatctcaagaacaaccaatatgccaggggcttgctggaattcattaagatcgccgacgcgcccatcaccattggcattcagggcggctggggcagcggcaagaccagcctgatcaacctgctgcagaatgagctggaagacactcaagaaacgctctgcgtcaccgtcaatgcctggcaacaatctctgttcgcctccggcagcggtgggcaaattgcactgagcctgctggaaagcgcttacgccgaactgtatgaaaaggccaagaactccaagctccttggcgtgaatttgaaggaagtgctcgagaaatcctcgaagagtttcttcggcgcaatcaggttggctaccacgctttacaccggtgtcccgctgccagggggcagcgaaaatcccctgcgcccctcacaaaccttcaagctcctcaaggccaagctcaacgaaaccatagttgcgctcacgaacagcaccgaaaacaaaataaatcgcgtcgtcatattcgtggacgatttggacaggattcagccggaagtcgctgtagagattcttgatgtactgaaaaatcttttcgatatcgaacactgcatctcagtcttggccatcgactacgatgtcgtcaccaaaggtctgcggaagaaatttggcgagcaggagaagaaccagcgggaattccgccagtatttcgacaagatcatccagattcccttctccatgccgaccagcgcctaccgcaacaacattccaggcatgctggaacgtctgctcgaggccatcctgcccggagtcgtcggcgcgcagaatcgcgaagacctgatcgaagacgtttcggaagtggccctgctagctaccgatggcgttcccagaagcgtcaagcgtattgttaataccgtgtcgctgctgagcatcatcgatgccaccacgccgagcgaatcggacaaggtgtccgcgccccaggagacactggtggacctgcaattcaagatcctatttaccgtggtctgtctgcaggtttctttccccgacatccacaaggcgctgtgccagctaccggacctgaaacgctgggacgaagataccagtagcactgtttggcatctgtcagcacttgactatgacgacgagcatctggcggccctggatatcgagttcaccgaggactgggaacccacgctcctaaagctgatcgtccaccacgaactgatcgccaaggccattgacatccgtgacatagcgcggaagttgtacaacttggcgaatcaacctggcgggctgcaggtcttgagaagaacactacgctcgaccagcatcacggataccgacaacgaatcgggccacaaggccgaactacacctctccaaggatgatgtcaccagatggtgcagatccatcctgcaagagctcctggatgcctgtgaggggcgagagcattacctcgggaacctggaccgacgtagaaaggccaagcatatcgatggcaactggtcgctcggccatgacacctccgatctcggtaagcgcgtacatgacatcgacatcatgctccaccccgacgcggaccctaccgactcgcggtactgcatcgatttcaggatcccatcggcgaagaacaacccaaccctgcgcgacaaaatccaagccaacagctcgttctctgaagtgctgaacaatgaatggttcagggtcgacatccccgacaacccgtcgaacaacctggaacccaacctggatggcttcaaagccgaaaccctgcctcatgtcctgaaactgctggaaacgctgggctga

SEQ ID NO: 355371 - DNA, 303 bp, Pseudomonas aeruginosa
atgcttgtcaacaagacacgatgggtcttcgcttaccgccgcagtgttagttggctgacctcgcaattgcttgagctggccattctggaggaactgatcttcgcgccggatagctacgccgaagatcgggacgaactactcgcgctgtttgccagagcattcaacaagttcaatcccgactccccggtgggcgagaacggcgagccgttgtccgactgcatctgcctgatgcagcgggccaagtacaagcggtttcctgagaacatcaccgacgaaatgatcgaaatggcttggcaggattga

SEQ ID NO: 355372 - DNA, 360 bp, Pseudomonas aeruginosa; identical to SEQ ID NO: 352176

SEQ ID NO: 355373 - DNA, 213 bp, Pseudomonas aeruginosa
atggacgtcagccgtatcgagcgcgtcttgctgataatcgtgcctatgatgacgctgatcgtggagcttctgaactctgcaattgaagccgcaattgaccgcatctcgacagacctacaccctctctcgaaacaggccaaggatatgggcagcgccgcacagatgttggccctggctgtcgtgattgtaacctgggcaaccattctgatttag

SEQ ID NO: 355374 - DNA, 1611 bp, Pseudomonas aeruginosa
gtgacaataaaagaaatcgaattcagtgagcgggcgcgcaaacacctgctagacggtgtaaccaagctggccgacgcagtgaaggtcactctaggtccgcaaggacgtaacgttgtactggcgcgtttttccagcctccccatcgtcaccaaagacggcgtttcggtggctaaggagatcgaactcgagaatcctttcgagaatacgggcgcacaggtgttgaaaaacatcgcaatcgccacggcggacgccgccggggacggcaccaccaccgccacggtgatggctcatgcgatgttacgcgagggcctgaagatggtgaccatcggcgccagtcccactgacctcaagcgcggcatcgatcaggccgtagccgtcgcggtgagcgctctaatgaagctgtctcgcccctgcacagacagccaaaccatatcccaggtgggtgccatctctgccaacggcgacgcggccattggccagatcatcgctgaagcaatggagcgggtcggtaaggagggcgtgatcactgtcgaagagggctccggtctggaagactcgctaaaggtggtcgaggggatgcagttcgaccgcggttacctgtcaccctatttcgttaccaaccaacagtccatgatcgtggagctggacgagcccttgatactcctgcatgacaagaaaattgccagcatccgtgagctgttaccggtgctagaagctgcggctgaatccggcaaaccgctgctgatcgttgccgaggatatcgaaagcgaggtgcttgccactctggcggccaataacttgcgcggaatcgtcaaggtatgtgcagtcaagaccccgggcttcggcgatagccgcaagacttggctcgcggatctcgcggtgctgaccggaggagtgatcattaccgaggagctaggcctgtcgctggagaaggttgtccaggcgcatctgggctcggcccgcagggttagagttaccaaggataaaaccactctcgttgactgcgcaggaaaggcaagcggcgttacagcgaggattaccgaactccgtgcacagatcaatccctcttgctcccgcgacgataaggaaaagctgctggagcgcttggctagactcgctggcggggtagcggtgatcaaagtgggcgctgccaccgaggttgagatgaatgaaaagaaagcgcgagtcgaagacgctctgcatgccacccgcgccgcagtagaagaaggcattgtaccgggaggcggagtggccctgatccgcgccttggaagccacccgggatctgaagagtggaaaccatgaccagaaccttggtatccggattgtgcaacatgctatggaagagccgctgcgccagatcgtgaccaacgcaggtctggagtcatcggtagtgctgaacaaggtgcgcgaggggcgcggcgactttggttgcaacgctgccaccggcgagttcggtagcatggccgctatgggtattctggatccgaccaaggtcgtccgcatcgccctgcaaaatgccgcctctgccagcagcctgatgatatccaccgaagcgttgatagcagagagcaccgaagagtcaggtttgagcaagacgggtatgctgtaa

SEQ ID NO: 355375 - DNA, 384 bp, Pseudomonas aeruginosa
atgacagatgatcaattcacgccactgatcgattacctcaaagcacgctatgagctgatcgccgcaatgatcaagacccttgaagcaggcaagccgttgatcccacctcaagatggcgagcaacatcccaacgggactcatgatcgagaagattatgaacgactactgcaaaccagtcggtcgcaactaggcatcgagctaaatcgcctgcaggcagcgctatcgcgcgtacataccagcaactatggattgtgctgccgttgcaatttgccaatggaggaggcccggctcattcgtgatccggccgcagcactgtgccaagagtgtcttgatgagctggccgaagaacgtgagcgagctaaacgcctcttcgccgggcggtaa

SEQ ID NO: 355376 - DNA, 852 bp, Pseudomonas aeruginosa
atgacgaaaccttctgcgttgatagtcgaaggcggcgccatgcgtggcatatttgccagcggcgtactggacgcctttctcgaagaggactatcgaccgttcgatatggccataggcgtttcagcgggctcgaccaatctcgttggctacctggccggcaaccatggtcgcagccgtcggattctgaccgaatacgcgacgcgcagagagtttatcgacccgactcgttttctgcgggcaggacaccttgtcgacgtcggctggctctgggaggcgaccaagaacaccgtgccactggacgtgcaacgttttgcaacctgcggtacgccgttgctcgttgtcaccaccgaggttgccaccgggcaggcgcattacctgcaagctacgccggagaacatggatcaggtattccccgcatcctgcgctctgcctctggtctatcgggcatttccgacctacaacggaattgcgatgaccgatggtggcatcgccgactcgatcccagtgctggaggcgtacagaagaggcgcccgggacatgacgataatcctctctcgccccctgggctatcgaaagaaggccagccgcatgccctggctgactgccagcctgatgcgacgccatccgcaacttgccacagccatgctggctcgcgcccagcgttacaacgaagcgctgacattcatagagcgacctccagaagactgccgggttagggtgctagcccccgacttggaatttcctgtcggccgcttaacccgggatctggggcggctgcagaagggctatgagcagggccaccgcgccgccagcaagatgctgcgttgcttgaaaagtactactgccgcataa

SEQ ID NO: 355377 - DNA, 810 bp, Pseudomonas aeruginosa
atgcttagcgagcgatacaggctcaagcaggcagagatcaaaacgcgaggcctgctgtctttcccaagcgatagcactgaggatctgcaggcggttgctgaactctccgtaatgctcaagtgcctggaaggaactcgggaattcactagtccgagctgtggcttaaagatcgccgtagatcggcatttttcgccacgaatgctctattacttccttataggcgactacgaacagggcgacctggaactgatccgcaagcatgtgcaaaccggggatagagcgcttgaactcggcggcggcataggtgtaacgggctcgctacttgggcaagttaccggtcaacgcgtgactgtctgcgagcccaacccgactcttgagcccttgataagacgaacattcagcgcgaacggacaacagctacgcctcatacaggctgctgcggtcaaggagtccgaaggcgatgggcgcacgacactgaacgtggctcctggctactggtggtcatcgctgctttcggtacatggcgcaaccagcctgcaagttcagtccattcggctgtcacgcctgctggagctcactgaggcgaatgtcctactggtcgacatcgaaggctatgagcaacacctattcgagggatgcgacctggcacgagtcgacacgctgatcatcgaaattcacgcccctagtttgggcgccccgaacagcagcgccctcctcaccgagctgattcgtcgcgagttcgatcttgtcgactttgccgcacagagctttgtattcaagagatcacaacgcaaggagcaagtgagatga

SEQ ID NO: 355378 - DNA, 1332 bp, Pseudomonas aeruginosa
atgaatgcggccaaggccgggcgcaaggtggccgtggtggacaaccgcccgctggtcggcggcaactgcacccaccttggcaccatcccgtccaaggcgctgcgccactcggtgcggcagatcatgcagttcaacaccaacccgatgttccgccagattggcgagccgcgctggttctcctttcctgacgtgctgaaaagcgccgagaaggtgatcgccaagcaggtcacctcgcgcaccggttactacgcgcgcaaccgcatcgacacctacttcggcaccgccagcttcgccgacgagcagaccgtggaagtggtctgcctcaacggtgtagtggaaaagctggtggccaagcaggtggtcgtcgccaccggctcacgcccctatcgtccggccgacgtcgacttccgtcacccgcgcatctacgacagcgacaccatcctcagcctcggccacaccccgcgtcggctgatcatctacggcgccggggtaatcggctgcgaatacgcctcgatctttagcggcctgggcgtgctggtcgacctgatcgacaaccgcgatcagttgctcagcttcctcgacgacgaaatctccgatgcgctgagctatcacctacgcaatcagaacgtactgatccgccacaacgaggattacgagcgcatcgaaggtctggagaacggggtgatcctgcacctgaagtcgggcaagaagatcaaggccgacgcgctgctctggtgcaacggccgtgccggcaacaccgaccagctgggtctggagaacatcggtatccaggccaatgaacgtgggcagatccaggtcgaccagcactaccgcaccgagatcagcaacatctacgcagctggcgacgtgatcggctggccgagcctggccagcgccgcgttcgaccaaggacgctcagcggccggcagcattatcgacaacggcagctggcgtttcgttgatgacgtgccgactggcatctacaccattccggaaatcagctcgatcggcaagaacgagcgcgagctgacccaggccaaggtgccctacgaagtgggcaaggccttcttcaagggcatggcgcgggcgcagatcgcggtcgagccggtgggtatgctgaagattctgttccaccgcgagagtctggaagtgctgggcgtgcactgcttcggctaccaggctgcggagatcgtccacatcggccaggcgatcatgaaccagaagagcgaggcgaacagcatcaagtacttcatcaacaccaccttcaactacccgaccatggccgaggcctatcgggtggcggcgttcgatggactcaaccgactgttctga

SEQ ID NO: 355379 - DNA, 1890 bp, Pseudomonas aeruginosa
atggcaaatcttgcgcgtcgtgaagatcagccttctgcaatcgacctggcccatgcagattttctgcagtcgcttttcgatccagtagttcgagtatccccatcaacctgcgtgaaactcgatgtccaagtgcttgaggaggatccgaagatagatgccaggctggcgactgctttggctgcgagcctttgcctgagcttgaccggccacgttcaggggagccccaaagcgctggttcagctcgcgattgccaacggtagctgccgactcaatccgagcctggatatgattccatcagcacaggctagcctctgggttttcggtgacaccgaccatctgctgcatgtcgatggcagcgctcgcgaactcgacgaggcactgctgaccaaagcgctggaaactgcacacgagtgcatcaagaaaaccagtcaagtcctgggggaactttccagcttgggaaagcctgacttggataccccctctgtggatgcatcatcctgtcccgctttgctccacaaggttcgagcccttgcgacacagcctctgttcgagattttctccatcaaagatgcggagaaacgagacaggaggtgggatgacctacacaaagccgtccagctctcgctctgcctgaatgacaactatcccgaccacctgcagaaaatcacgtcgtgcttcaggcaggtaaccacggacgttgttcggtctcggatactcggcggccatctgcgtcccgaccagcgtacggccgagcagctgcgtccccgcagcaaaatagaggtaggccatcacagcagagcacatggctcggccagcgtggcgaccaacggttcaagaactcacgccaccgccagcttggggctgaatcgttcggcactggataaagtgcagggcgcagcagcagaagcattcatcgcgcatgtttacctgaactctaaaggctcgccctcagcggtgagtgccgaagccaccagccgttggttgaccaatgcgctacggccggcgatgcctgccgttgaaaactttccgtatgccatccggctggactgcgagtactggggagacgcctctgcttcgaagcaagtttcactttgcgccgcaacccttgccttgatggatgctggcgttcctttgaaagcgcctgtagcggctgtcgaggttggccttcttcgttcaccctcacacttcagggcgctcagtgagctcgatgatgtcgaacgaccagcgtgcgacctaacggccactctcgcgggtactcaggccggcttgacgggcatccatatacgcagccaaggcgtcaagcttacttccgatatcttggccgtcgtacttcagcaagctcgacaaaatcgcttggagctgttgctccgaatgggcgatgccttggcaacaccacgaacgctcaaccctcaggtgccaagagtacagatcctcaagatatcgcctaatcaaaccggtcttctggttgggcgcggaggcacaacggttcgcgccctatgcgaggacactcgcagccagatcgaagtattcccagatggccgcgtgctggtcagtgcaggcaatgacctttgtttgcaacgcgctgttgctgccatagagataacgcttaaacccatacgcgtaggccaggtatatcagggaaccgtcagcggatttaccgagagcggcgcattgatcaccctggctccaggccgtacaggattgctgcccgcgtcggccaccctcagcccacaagctagtcccgaaaagcagttcaaggtgggcgagtccgtgcgcgccctgtgcacggaccttgataaacgtggccgcgcctggctctcgatcaaggcgctttatgaacaagaggaaatcgatgaccaacccgaccccagccccctcaggcttgcctaa

SEQ ID NO: 355380 - DNA, 249 bp, Pseudomonas aeruginosa
atgttgctcctctctgatttcttcaccgcatataccgagtcgttgcctgcccgtgcaaatattccaaagctcaatcgtgaggagcttgaggcattcactctttcgttgccggactatagtcggcaacttaaattttcctcaattgtgagagcgaccaacattgccggtcagcgcgtggtggagagtgctgcttatgttgacggcgcatttgtgtccttgagtcaaaaagccttctccggccagctatag

SEQ ID NO: 355381 - DNA, 1497 bp, Pseudomonas aeruginosa
atgcagaaagcggaggctccgctagatctagggaagcgccgcgtctggaaaatgtcactcggtaatacgttgggcagcgatgctggcatttacgacgagtgcttgcagggcggctatgtgctgctggggtacggtggcggggtcgacttcagcgggtgcaaaagtcgcggtgaagtccgacagcgctttgctgaggccggtgtatcgcttgatggctccaatgattacagcctgaccagcgtctcggcattcgtcaccaaaatgaaaccgggcgacatggttgtggtgagtgacggcaattttaaattccgtgcgattggcgaaatttctggcgactacaccttcaaaccgcatgctgagtatgaggatggctacgcccagatgcgcccggtgaaatggctgcgccaatacagcccctctctgccgcatggtgagctgctcaatgcccagttcagccagatgacgttgtacgagctgcgtagcccaacgttgaatcgcgagaagctgcaggcgttgttgggctcccaggtagccactcacgccggccatattttctcagtgggtcaggttttcggtagggactatcaggttgtacaggcaacctccgacctgcttgagctgaaaaagccaaacggtaattcgcttcgtacaggaaagatcacgctgaaggatatccgtgagaaaaccgccgtcgagaagcttccgggatcgacgttggagccttacttggtcaacggctataacaacatcctgtccccattggttgagcacatacttacggcgggggctgcaggcggagctgatagcaattcgactgctcgggttttgatcatcgacgagatcaatcggggcaatgtttctcgcatcttcggtgaactgatcactctgatcgagcaatccaagcgcgcgggcgctgaggaggctctttcggtggtgctgccttactccaagcagcgattctctgttccgcagaatgtctatctgatcggcaccatgaatactgctgaccgctctctggcagggctggatatcgcactgcgccgtcgttttgagtttcgcgaaatgccgcctagacctgagctgctggatgatgtgcgcattggcggtctgaatgtcggccaactgctgcggactatgaaccagcgcattgaggtgctgctggaccgggatcattgcctggggcacgcctacttcataccactcaagaccgagcccacactggaaaggttggaggctattttccgcaaccaaattctgccgttattgcaggagtatttcttcgaggattgggagcggattggctgggtactgaatgatcagcacgcgaacactcggaacaccgagcgctttgtaagacgcccccagggtgagcagagacttgccgagctgtttggcggcgaggtggcagagaagctcagtgatcaacgctgggagttgaacgacaatgcctttaactcgttggacagctatctcacaattctgggcggagccctgtga

SEQ ID NO: 355382 - DNA, 2466 bp, Pseudomonas aeruginosa
  misc_feature (1417)..(1426): n is a, c, g, or t
atggacttcaaccttgacgattcccagaaaaagctggcacgacaaatcgccgagacctgccgcgaacgcctgccggagcgcccgaccgcgcatttctcgcccgagcaatgggctgtctgcggggaggccggcctgctcggcctctccattccccgcgactatggcgggcaggggcttggcgcgctgtcgacggcggtcgcgatgcacgccttcggacactcctgtgcggacatgggcctggtgtttgcagcggcagcccaccagttcgcctgcgcgatgcccatcgtcgaattcgccagcgaatcgctgcggcgcgacctgctgccgaagatggccagtggcgaactgatcggctccaacgccatcaccgagccaggcgcgggttccgactcgaccgcactgaagacccgcgcactgccgcaggacgacggtggttatatccttgacggtttcaagagcttcgccggcaacgcaccggtagctgatgtattcgtcgcctacgccaccacccagccggaatacggtgcgctgggcatcaccgggttcgtggtggagagcgagcgcccgggcgttatggtcagcgagccgttgcgcaaggtctgcctgcgcagctgtcctgccggcgaagtgactttcgccggctgccgggtccctgttgccaaccgcctgggtgaagaagggcagggccgcttcgtgttccagagttcgatgggctgggagcgcgcctgcctgttcgcggcattcctgggcatgatggagcgccaactcgaagagaagtttcgcctggaatcctcccgcctgctgctgtaccgggcctgctggggcatggaccagggcgatccccagcaactccacatcgccttgtcgaaactggccatcagcgagggcgcgctggcctcgagcctggacgctgtgcgcatcttcggcggtcgtggttgcctggagcatcgaggaaatgttccgcgactcggtcggcacggtgatcttttccggaacctcggacatgcagcgcgagatcgttgcccgggagctcggcctatgaagctcctgcatgagtgcctcgtgcgcagtgcgcgcgagtatccgggcaatatcgccgtcgttgaccaggccggctcctgtagctatgccgaactggacgcgcgggccgaggcctatgccggcttgctggttgcgctgggggtggggcgcggagagcggatcctgctctgggcggaaaagtcggtggagttgccggcgctgatgcagggggccttgcgccagggcgttgtctatgtcccggtggatccgctgggaccggtgtcacggctggaaaagattctcgccgacagcggggcgagcctggttttttccaccgcgagtcgtctggcggatctggacgctctggaacggcgcccgcgtatcgtggtcctggacnnnnnnnnnnacgatctggcctacatcctctacacctcgggctctaccggcacgccgaaaggcgttgcgctgagccaccgcaatgccctggccttcgtggagtgggccaatgagcgttttgccttcgaggcacgcgatcggttttccaaccatgctccgttccatttcgacctgtcggtgctcgatctctattgcgccttcagccgtggcgcggcggtttgcctggttccggaaggcatcgccttttccccggcgctgttgacggcgttcctccaggaacagcggatcagcgtctggtattcggtaccttcggtcctgctcatgatgatgcgcgacggcaacctgctgcagtcttgcccggactccctcagagtcgtgctgttcgccggtgagccttttccgatcaaacacctgcgtgtgctccgggaagcgttcccagggctgcgcatggccaacctgttcggtcccaccgagaccaatgtctgcacctgttacgaggttgtcgcggtcgatcctgctcgtctccagccggtgcccatcgggacggctgcttccggcgacgaagtctgggcggaaaaggacgatggccggcgctgcgaggtcggggaggagggcgagctgatcgttcgcggccccaccgtgatgctcggctatttcggccagccggcggttaccgggagctatcgcaccggcgacctcgtcaggcaactggacgatggcaactacgagtatctcggtcgtcgtgacgacatgctcaaggttcgtggctatcgcatcgaacggggcgaggtggaggccgctctgctggcccatccgcgggtacgcgaggctgcggtgatcgtcgccggtggcggcatggacgccgcgctctgggcgttcctggtgccaagcgatggcgaggcagtctcgctcatcgaactcaagcgtcactgcgctgagcgactgccgcgctacatgatcgtcgaccgggcgaagacgctagcggaactgccgcgcaacgctaacggcaaggtcgatcgcttcaagttgaaagccctggtggaggactga

SEQ ID NO: 355383 - DNA, 651 bp, Pseudomonas aeruginosa
atgaggctctctgcgatgtcggaaatggccctctggtttccctatgccaaccggccacggggaaagatgcgactattcacctttccctatgccggcagcggtgcgtcggtattccataactggttcctgccgctgtacgacagcgtcgatctttacgcactgctggcttaccgggtcgcctgcgtcctgcgcgcgcgtgggcggacggagccctgtcggctagtgctttccggcatggctccgccgcacctagggcaggcggtgcagcccttgcatcgcctgccggccaaccaggcgatcacgctgctcgggagaatgggcggggtgcctgacatcgtccttggcgagcccgacctcatggagatgttcctgccgatcatccaggcggatatcgagctggtctactcccatggctgccgggagccgcagccgctggactgcgcgctgacctgcctggcgggagatcgagatcgaatcgcccccgccgatcggatggcggaatggcggcgctacagcagcgggccgttcgagcatgcctgcctaccgggcgggcattttttcctcaacgaaagcggggtccaggccatggcccggattcgctcggcactggctgcgagcagcgcggtctcgtgcgcgttcgtcacactctga

SEQ ID NO: 355384 - DNA, 543 bp, Pseudomonas aeruginosa
atgagcacacgacgccgcaccccacgaagcgacggcgaaagtacccgcgcacggattctcgaagtcgccggccggctgttcgcccagcacggttatgccaataccgccagcaaggccatctgcgaggaagctggggccgaccttgccgcgatcaactaccacttcggtagccgcgacgccttgtacaaggcggtgctggtcgaaggacacaagcagttcgtcagcctgcacgacctccgcgaactggcggatagcgctcttccgccggaaaccaagctggagcgtttcatcaatgccattgtttcccgcctgctcgacgaccgcagttggcagagcaaggtctgcccccgccacgaccccgccctgtcgcgctgcgtcataagcatcatcgcgccctgcctgatgctgatggtcatcgatcgcgaccagtcgagcccgatgcaagcgatcctgctgcacgacgccgacgccctgaagaaccacctgaacctcttcgcccgcagcggactggaagccatacgccggcaccacgacccctcctga

SEQ ID NO: 355385 - DNA, 939 bp, Pseudomonas aeruginosa
atgaagcgcgtccagcacgccttgcatggccttggacatggggttgttgctggcaaaactgtactcgtcaaacagcgcatcgaataccggcttggttaccaggtgctgggcgagcatttcgacaatctcgccatcgctgatgctgtcgttgaggtcgtcgcgcagctcggcggcgaaggcgttgaaggcagccttttcttggatgttggccgggttctccaagatgccctggatgcggtcaatatgggtgcgggcgatcttggcaatgtcgtttgcccagtcttcccagtgatggcggttgccgcacttgtcgacgattttggcgtagatggccttctcgatttcccccacctcataggccagctccgcctgctgggtcatctggccttcgacatcgtacttagcgcgtttctcaccaatgccgtactggcctttgcctgcctggccgttgctggtgccgctagttttcctggcttttttatcggccttgtcggtgatggcgatgacttccatcttgcgcgggtcagagccgatcaggtcgagcttgttgaccatggcgtcgaagctgtcgtcgtgcgaacgcagtgcctgaagcacctgccagaccactttgtaggtctggttgtcattaagcgcttcgtggggctccatgccggccggaatgaccacgggcagcaccacgtagccgcgttttttacccggtgcgttgcgcatcacccggcccaccgattgcacaacgtcgacctgggaattgcgcggggtgaggaagagcacggcgtcaagcgccggtacgtccacaccttccgacaggcagcgcacgttactgaggatgcggcaggtgttggctggcggttcttccttaagccagttgagcttggcttccttggcgctggcgttcatgccgccatcgacatgtgcggcttcgcagatgatgcgtga

SEQ ID NO: 355386 - DNA, 852 bp, Pseudomonas aeruginosa
gtggacttcgtagatcgacagcggtgccgcatagccctggcgctccgcgcgccgggccagccagtcctggtcgcgccactcgtggcgcaacgccgcgcaggtcttcgaagcggttccgggcggcgtctcgcaggccagcgccagggggtcggccttcagcggcaggaggccgtcgtggccctgcaactcgtacttgtacagttcgccctcgccgaggcgcgggacgaacagttcccagacgccggatggatagcgtcgtcgcatcgggtgacggcgcccgtcccagccgttgaaatcgccgaccaccgagacgcgcacggcgttcggcgcccagaccgcgaagcgcacgccctccacgccttcgtgacgggtcacttgcgcgcccagacaggaggccagttggcggtggttgccttcggcgaacaggtagaggtcgagttcgccgagcaacggcccgaaggcataggggtcttcgctttcctgcacgccgtccggccagtgcacgcgcaggctgtagcgcggtggcaggcgctccaggtggcgctggaacaaaccgctgccggggtcgctctgctccagttcggtgagcgtcgcgccgtcttcgtcgagcagctcgacgcgctgcgcgccgggcaggtaggcgcgcagcacgccgccttcgccgccggggtcgcgctgcgggccgaggaaggcgaatggatcgccctgcaggccgcgctgcagcttgtccagctccagttgccagcgttcgcgttcggacatcggttcgctcatcggttcttgcccttcaggaggtgttcggtgagttcggccagaccggcgagaggcacttccagccagtcggggcggtag

SEQ ID NO: 355387 - DNA, 1227 bp, Pseudomonas aeruginosa
  misc_feature (51)..(60): n is a, c, g, or t
atgcgttgtggcagcgcagctggatggaagcgggggagcagtaacggcagnnnnnnnnnnggggagcaggaacggcagcttgcctactggcgcgagcggcttggcgatcagcacccgcttttggagttgcccaccgatcatccgcgtccggcacaggccagctaccgtggaacgcgctacgaattcgaaatcgatccggcgctggtgcaagcgctgcgtgccagtgcccgcagccaggggctgacgttgttcatgctgttgcttggcgggttcaacattcttttgcagcgttatagcgggcagtctgacctgagggtcggcgtgcctatcgccaaccgtaaccgcgccgaagtggagggattgatcggcctgttcgtcaatacccaggttttgcgctcggtggtggaaggccaggccacggtcgcatcgttgctggcttctctgaaagacagcgtgctcggtgcccaggctcatcaggagctgcctttcgagcgtctggtcgaggccttcaagatcgagcgcagcctgagccacagtccgctgttccaggtgatgtacaaccatcagcctcaagtagccgatatcggctcgctggatgatgtggccggcctgcgtttcgctcctctcgactggaaaagccgcacgacccagttcgatctgagtctggatacctacgagaagggcgggcgtttgcatgctgcgctgacctatgccaccgatttgttcgaagccgagaccatcgagcgcatggcgaggcattggcagaacctgctgcgggcgatgctcgtcgctcccgctgcgcgcatcgatacgttgccgatgctggaggccgacgaacgtcggcagatgctggagacctggaacgccacggcagcgaactatccattggaaacctgcgtccatcgactgttcgagcatcaggtgcagcgttcaccggaggcgccggcgctggtgttcggtgaacagcgcctcagttatggcgagctgaaccgccgcgccaatcgtctggcgcatgccctgatagcgcggggtgtcggggcggaatcgttgataggcgttgcgatggagcgctctgtggaactggtgatcgccctgatgggaattctcaaggccggcggcgcctacgtgccgttggatcctgagtatccgcaggagcgtctttcctacatgctggaggacagtggtgtccggaggtggccgtcaccggagagaatctcgcctacgtga

SEQ ID NO: 355388 - DNA, 261 bp, Pseudomonas aeruginosa
  misc_feature (187)..(195): n is a, c, g, or t
atggagattaaatcgcaggcattggtcgatgtcgttgaggatgtgatctgcgacgtgtgccgctctggaactcgtatccctggctatggccttcaatacggcaagcttgaagcccaatggggatatggatcacagcatgacggaaagcactatcgggtgcatctctgcgagccctgctttttcaggnnnnnnnnngagcagccatgttcctctgaggagtttggcttggtcagcaagggtaactactgggaaaagagctga

SEQ ID NO: 355389 - DNA, 2109 bp, Pseudomonas aeruginosa
atggctcgcaccactcccatcgagctctatcgcaacatcggcatcgtcgcccacgtcgacgccggcaagaccacgacgaccgagcggatcctcttctacaccggcgtcaaccacaagatgggcgaggtccatgacggcgcggcgaccatggactggatggtccaggagcaggagcgcggcatcaccatcacctcggcggcgaccacggccttctggcagggctcgaccaagcagttcccgcaccgctatcgcttcaacatcatcgacacccccggccacgtcgacttcaccatcgaggtggagcgctcgctgcgcgtgctcgatggcgcggtggtggtgttcagcggcgccgacggggtcgagccgcagtccgagacggtctggcgccaggccaacaagtaccatgtgccgcgcctggcctacgtcaacaaaatggatcgccagggcgccgatttcctccgcgtggtcgcgcagatcaagcaacgcctgggccatgtcccggtgccgatccagttggcgatcggctcggaggaaaacttcagcgggcagatcgacctggtgaagatgaaggccatctactggaacgatgccgaccagggcaccagctaccgcgaggaggagatcccggcggagctgcgggcgctggccgaggagtggcgggcgcacatggtcgaggccgccgccgaggccaacgacgaactgatgaacaagtatctggaaggcgaggaactgagcatcgaggagatcaaggccgggctgcgccagcggaccctggccaaccagatcgtaccggcggtgctcggctcctcgttcaagaacaagggcgtgccgctggtgctcgacgcggtgatcgactatctcccggctccgtcggaaatcccggcgatcaggggcaccgacccggacgacgaagagaagcacgacgagcgccatgcggacgacgacgagcctttctcggcgctggcgttcaagatcgccaccgaccccttcgtcggcaccctgaccttcgcccgcgtgtattccggggtgctgacttccggcgacgcggtgctcaactcggtgaaaggcaagaaggagcgggtcgggcggatggtgcagatgcacgccaaccagcgcgacgagatcaaggaagtgcgcgccggcgacatcgccgcgctgatcggcatgaaggacgtgaccaccggcgacaccctgtgcgccatcgacaagccgatcatcctcgaacgcatggacttccccgatccggtgatctcggtggcggtggaaccgaagaccaaggccgaccaggagaagatgggcatcgccctgagcaagctggcccaggaagacccgtcgttccgcgtgaagaccgacgaggagaccgcgcaaaccatcatttccgggatgggcgagttgcacctggacatcatcgtcgaccgcatgcgccgcgagttcagcgtcgaagccaatatcggcaagccgcaggtggcctatcgcgagaccatccgcaacacctgcgagatcgagggcaagttcgtccgccagtccggcggccgcggccagttcggccattgctggatccgcttcgctccggccgacgaggggcaggaaggcctggagttccacaacgaggtggtcggcggggtgattccccgagagttcatcccggcgatccagaagggcatcgaggaccagatgcagaacggcgtgctcgccggctacccgctgatcggcctgaaggcgacggtgtacgacggctcctaccatgacgtcgactccagcgagatggcgttcaagatcgccgcctcgatggccaccaagcaactctcgcagaagggcggagcggtgctcctggagccggtgatgaaggtcgaggtggtgaccccggaggactacatgggcgatgtgatgggcgacctcaaccgccggcgtggcctgatccagggcatggaggatactccggcgggcaaggtgatccgtgccgaggtcccgctgggcgaaatgttcggctatgccaccgacgtgcgctcgatgtcccaggggcgcgcgagctactcgatggagttcgtccgctatgccgaggtaccggccagcgtggccgaggcgatcgtcgccaggcagggccgctga

SEQ ID NO: 355390 - DNA, 1212 bp, Pseudomonas aeruginosa
atgctggatcttcgcatgggcttcgacctcgtcggtgatgtcggccgccgtgccgcgatagccgctggcgacgccgttgcggatcgcgctggcgctcagcttgccgacccgcgcctggccctggctgtcgcggaaagcgcagaccaggctggacggcgcaccggcatcgggcagcccttccagccacttgacgatgttcaccgtatcgctatccagcaactcgtccagccgccgcccgatccaggcctccggctggtagccggtgacgtcgcggaagcgcacggagagataggtgaagacgaaatgcccgtcgacttcccagatccagtccgaggccgcctcggctatcgacttgaaacgttcctcgctggccagcagggcctggttgctgcgtttcaggaccttctgctggcgatccaccgcgcgggcgttgagcacggcgctgcggctcagccagaacagcagcccggcggcgagcacgaagattcccagcagcggcaacgcggtctcccgcagcatggcgctacccggacgcgacgacacccaggccaggcgatggggagtgccctccagggcaaggctttccttgtcgcccgccgcgccgccggccagcaggtgcaggttggcgatgccgtagtcgccgccgagcttggccagcttcgccggggtcagccggtcgacgaagaccatcaccgaggccttggccaggtcgatgggcgcatgatcgctggtgggcttgatcgccgaggcaaccaggatcgccggtgcgccgtcgaagtcgacgtagcggctgatcgccgcttcgtccaccgcggcacggcgtgcggagcggaggatgtccccggtgtcggcgttcagcgagtcggccagcgagcgttcggaaagctcgccctcgagcatggcgtagcgagtgccacggtcgtcgatgacgaagacgccgtcgtagccgttggtggtgtagagcaccgagccgaggttgttcttggtgaaggcccagtccacgtcgacccggtttcccagatagacgtaagcatcggtccagaaggaataggtggtggagaactgctcggaattttcccggcgattctgcagcgccttttccacgtagaaatggctctgctcgatggcgatgtcgtcctggtgcctggcgatgtgcaggatcgcccagccgcatgcaccgagggcgaggaaaagggcggccaggaacattag

SEQ ID NO: 355391 - DNA, 528 bp, Pseudomonas aeruginosa
atgagcctgaacggcagactgaaagctcgtgcggccagcttcgctcgcacagcctatccacctattcttggatcgttgcggcgggtgctctccgagcgccaactacaacgcttcatactggtctgcgaccgtttgaagggctggttgctcaaggaggcagtcgtcgtaccgtcaccctctccgatggcgctgccgccatggatagtcgacgaaatgaaggcgttggcccggatcgagcctgccctgtatccctcggcggcgaagctgcgcgttttcacttcctggaaggccccgatagataacggaccggcgcaactgtaccggggatgtctggcggacttcatcgaatatgcgccggatatggtcttcctcgtcccgcatttgcagcgtggtggcgctgacctgggaatcctgcatcatgtgcggttatgcgccgagatgggcgtgaaggtgacggtagtggtcacgcgggatgtggtgtctccctggctcaaccggcttccggcggaggttcgggtggtggagtaa

SEQ ID NO: 355392 - DNA, 216 bp, Pseudomonas aeruginosa
atggcctatgacctggccttcctgcgcctggaagaaaaccacttcctttccatacccgtcgagcgcgttcggcagctcccctcgcaaatgcagcgtctgctggggtggagtgccagttccacgctactgggttgggtggagatcgatggtcagatgcgtgacccgcaagagctgttgggcatgccctccttttccgaggcggggaaggggttctag

SEQ ID NO: 355393 - DNA, 3237 bp, Pseudomonas aeruginosa
atgtccggcgaaacagctacggttttggtcaacataaatctgaaggggcggcagctagacttagtgctcgggacggatcgtctaactttggtccttgaagccaaagcctgtacggtgccgctcagcgggacgacaaatggcccatggaccgcgcatccccgttcagggcgttcgagagccacgggcaatgcctacgcccaggccttgggcgaaaaaaacgctctctgcgacgctctccgagactttttaggtagtgttgaaggatatccggatgctcatgtggtgttcgtccccgagctggctgcgggctcagagttgttgtttgacttcaaggtcacctatggcgggatagacgggctcgctatacaactggccaagcgcaccgaactccgctgcactaccgatcaatggcgcgcgtttgcaatccagcatagccttgagcaggtgttcgatctttccagcgctctggaccctcgctcgctcgaagcgcagcgaacacttgcaacgtatatcgccgctttcaccgctacgtatgcttcggcagcagctgagtacaagacggacctctacgacgtcgacggggagctcgtagatttgccatgtctcgagcatctgttgcaggaggctcgcacggaccttctaatccaaggtccttcaggctgcggtaagtcattgctgtcggtggtgttagcaaaccggttgtgcgctaaagatgtgataccgatcatcgtggagggaaagctatttgagggacagcttggcccggcgctggatcgtgaagcagctctactggacgtactatcagccaagaagctattggctgcagttcgtacgctatcgcgaccgattgccataatcgtggatgggtataacgagtgcccttccgacttgaggtttaaattgatccgggcgctccgcgccgcttcgatcaggtatgacgcagcgattgtcgtgagttcgcaaatcgagaccgacagggcggatttgcttccgcttcggaaggtcaccgtttccgctcccagccacgacctcaaggttgagatagcgtcccttgataccgcctccacggagttgctggctcctctgctacagacaatcgctaccggtattgaggccagccttgttggtcaaatggggcgcgaagtgaacctagtttctagcagatccgcactgtttgacggctttgttcggcggcgccttggttctaatgcaagcgagggcataacgctcttatgtcacgtcgctggactgctgttcgagcgcatgactttcagcttatccatacgcgagcttgaccgcatcctagttagagaacggcttggggctgaggtgctccaagaggcacttcggatgcggctgctgatccagcgaggagagcgcctaagtttcgtccatgaaatgtacctcaatgcctttgcggccgaggctatcctgcggcagtttggttccgacttcgacgctatgactcgggcgttggcgctaccccgattccatgaactgcggacatttgtggttggcgctatcgaggatatggagttgctcgctcgcttgctcagctcgaccacagatgcgcagttgctgaaggccatcataaaaggagaatgtggcagcgccgctaagaggttcgtggcccatgacttgaatgccgtaatgggccgattacgggttgaagttgaaacagtccgtttcttcatcgctcctgaccagcactggcatattggcgttgagcccgctagtcgcatgctctggacagagcatgaaagagcaatgctgtctgcattgcctgctgcattggcgctcggtcaatactcactggagttgctcgatgttttccgactgctcgataagcggctaatcgaggagcgagcacggcttcaaagtgaggcggttgagcagggcttcaagctgctgaggaccagcttatttgcagctgcctacgtattcggtcagcacgaccttggagtttcacttgtcatatcggctctccacggcgggggtttagagcgcttagccctacattctgagcggcaagcgcccctgagagacgtatggctcaatgtagctacgccaggacagttctactttgcgctggcgttgtcgcgtgatacctacaggctggagcgaagcattcttaacctggcgatcgaccaaacgctgccgctgttcgaaattgagcgctggaagtatctgccttatcacgttcaattagatctcatgcatttcgtgcactttcttccacgggatgacttgacccagcaagaaaagctgtcgaaggcactcgaaagcctgctccccgtgctaaatccgattctgcaaaccactgccctcgaagccctcagcagtttgggagcgctggatgacgaggttaaggggcacgagacacagattcgactacaagttgccgaggtcctcgttgaccctggtgcggagggtgcggcggaaatcgcctgggagatctatagcgggcaattcgatcaccccttcgacatggcctacatcaacgttgtcgacaacctttcaaacgagcagcaactgacactgatgcgattggcctgcatgggagcgtccgagtacagtttctttgtggggtcgctaatggacaagcttgctggtgaaggtgatgccctcgcggttccggcgatctcgcgctgggcacgcttgccagatccgaccagtccagtacgtcagaacgcagttgaaatctatatttccgcgctgatggccttggggaaacttcaatcagatctaccggtggagtcgtgcccaatggggctcggcccccgtgaagatgcgatgtccgcatgcgggatgatctactactggctgcagcggcgtacctttgaagcagcagaggcggaaccgccagttatggctgctctggaggctctttctgccgatccatcgcgcgcgattggtgtgctatgcgagatctcccagtcgatcattggccatgacccgcgcggcacgttgttggttacagcctttcccgcccgtatggtcatgcttgctcgcgtagccctccagcaaggaggccctatggaaggatacttttccggcccgcacttcttcgagcgcagagatgccgagcgatttgcgatctccatgattggttcttacgggggggcagacgacttgccgctgcttcgtacttttgtagatcaagtggaactctcatggaatgctcgcaacgcccttgcggcgatcgaagcaagagcttcaaccgttgcacagcggtag

SEQ ID NO: 355394 - DNA, 603 bp, Pseudomonas aeruginosa
  misc_feature (582)..(591): n is a, c, g, or t
atgatcaagcagaccgcgaccggcggcaacgtggtgttcttcaacttccgcgagccgagcagccaggacagccagcctgccaaggtcaccaacatgcgcgctccgcttcagggcgatgccaccttcgtggctggatcctggaatccgaaagtgagcctgcagaacgacccgctgaacgaattgcgtttccaggtcacggtttccgcacagttcgataccaccactggcgccgatgccggcaaccctgcgaataacgattctgcaccgcccctgaccattttcacttcgctgcccgcggtttactgggacgttctcaacaccaaccagtatgggcagaatcgcgtcctgcatccgttgaacctgaacaatcaggatcgctccttcgataccacggtgtccgtcggtggcgataacaccgattattatggtgccaactatgcgcgtctgggcgccgtacggctcggcatcaatacggatgtgctcaacgaggcgggtcgaaccgtgtttggtttcgccggtggcgacaaggtgaccagcaccctgtcgggtaacttcaacgggatcagcgacatcggcctgacnnnnnnnnnntcgaaggtgtag

SEQ ID NO: 355395 - DNA, 972 bp, Pseudomonas aeruginosa
atgcgaagcctgatcgggatgacgttcctgaactcctccgtgggccagcgccggctgcgccagaacggcatcgtgctgcgcctgggacgggtagtcgcggatcgccggcgcgcggccctgccgcaccggcaagggcgctgcctcgaccgccaaggcctggaaaccctgctgctgtggctacagcggcacttcctctgcgtgcccctggaacacctgctcgagagccccgctccagcctgcttgcggatcgccctgagcgtcgacggcaaccctgcggaactggccgagctggtctacccgctgctagagcgctacgaaatgccagcgagcgccttcatcggcggcgacccgcgcagttggcgcgaagcggtcgccgacaccctctggcaggccgatgcggctgccgccgagccattgctggaactgctggagcgttacggcggcgctgcgctcatgcgggtgctcgaacgcaccggcgacgaccagcgtcgcagccgtagcctcgacctcctcctgcgcaagctggaacgcctcgacccggcttcgcagcaggccttgcgcgcggcctgcacggaccccgcggcgtacggcgcgggcgattgggaacgggtccgccgcctggaaaacagcggcctggttcgcttcggcctgcacggccacgacccgcacccagcgacaggcctttgcgccgaggactgtctcggccgcgcccaccgccagctccagcagcattgcgccgcccctctgccggtgttctgccaagctcgcgccacgcccgccgcgacgcctgcgcaacccggcctacgcgccgccctcggccggcttggctaccgcttcgccttcggcgcgcgcaatggcctggtggatactcgttgcgacccgctggacctgccgcgcatcgaggtggacgcggcgatcgccgcccgtcccggccggctggcctggcgcatctatcgtggagcccgtccatga

SEQ ID NO: 355396 - DNA, 234 bp, Pseudomonas aeruginosa
atgcaccatccggatagcggtttcaggcggcgcctcgtcgccctgacgcgcaaggaactccgccagttgctgcgcgacaggagcaacctggcgatcggcgtgatcctgcccatcgtgctgatcctgatcttcggctacgggctttctctggatatccgcaacacgcccctggcgatcgttctcgaggacagctcgccggctgggtggcaagtatccgcgaggcggaagacctga

SEQ ID NO: 355397 - DNA, 225 bp, Pseudomonas aeruginosa
atggcgctgatccgcacgttctttcccctggccgtgcttagcatcacccaagctgtcgtaaaaatggtctctcaccatcagcgagtacagctcaatatcgccagtaaccaggaccacaaggcttggaatatcaaggtatttgcgtatgcattcgagcacgctgcgtgcgtgttgcgcatgggtgtcggcgtcgtcgaaggcgaggacgagcgcatcggcatctag

SEQ ID NO: 355398 - DNA, 1230 bp, Pseudomonas aeruginosa
  misc_feature (459)..(468): n is a, c, g, or t
atgctggccgcccccggtagcgtggcgctattcgggcaggttttacggcgcaagggtaaagaccttcagaccgaagaagctcgccagagccttcgcatacagttcgaacaatatatgggcattggtcgcaaagaggacgcactcaactgggcccgtcatgctgtggcaattttttccgcacctcatggagctaacccaaagagcccactggtctactccggtattattggactcaacaagggtaagcctgaccatgccccccttgagagcgaatcgggctataaagcagctgctagcgtcatcagagaatgccctgaacttccggctttcgcgttaagccttgtggacgtatcggggacatcaactaggacctatgcatcgatctacaacatccttggcctcatcgcccggttactctcgcttcaaccgaaagatggccaataccctgtcctgagcgtnnnnnnnnnncccaaaccgttccccccgctgagcgtatcccgaccacagtgggaagctgacgcggcagatgaggaagagctcgagcaagatgcgtcggaggacgcaggaaagctctccacgcttgaagcatcaatcaagcattggttggccataacagtaggagttcgtaaacagctgaacccatcggctgtattgattggcaagatctggactcgtctgtatttcagtctagagaaagtgtgtgacgccaatagaccgagggtctcctcgatgtcaacggggacagccggcctgatggagctctttgcgctgtgcgtcatcaatgctgtctatatcgaggagcgagattaccatttaagcagcagcgcgggcttcactgagagcagctctgcattagatcgcactaaccctctgacatctggcaaagcttttattgagaagttcaaggacattaaggagtctcaccaaaagctccccctaacctaccttatagccacctgccccttactcttaggactgttgcaggcaacctccaaatcgaaggagctagttgatggtcttctttcctgccacccaacatcactggctgcgcaagatgagttaaacggctctagacttggggactcagtgcttcaggctaaagatttgatgtgctctaccaaaatttggaacaagatcaacaaaacatatattgccggcacaaaatggaagaaatttacttccaacgacctccctcaagacagctctgatgaggagtccgtagagtcttga

SEQ ID NO: 355399 - DNA, 291 bp, Pseudomonas aeruginosa
atgaagtggtatagccgcatcagcctgggactcagcctcgcggtcgcgagcgctttcctggtggcgtactggcgatcgctcgacagccatagctatcccaatatgaatgcgcctgggctgatcgcctacctgctggtctttcctgcctgcgccctgttgctgcattccactgcgttgacattcgtgctccagcagcgaaagctgggaagcgctcgcgaaagagcgctgcaatggacgatcaacctggcgctgtggatggcgccgctttgtttcatattttccagtctttaa

SEQ ID NO: 355400 - DNA, 219 bp, Pseudomonas aeruginosa
gtggccgaacgcgactcgggccggttgctgggggtgcaggcggtggcgggggaagccggtgagctgatccagacggcggtgatggcgctacgcgcacgcatgaccgtacacgacatcgccaatgagctatttccctacctgaccatggtggaagggctcaagctctgtgcccagactttcaccaaggatgtgacgcagttgtcctgctgtgccgggtga

SEQ ID NO: 355401 - DNA, 135 bp, Pseudomonas aeruginosa
atgaacacgacactacccgattgcgggatgatgggggcgatgggctggataatgccagtgatcggaattgccctactattgctgctggtcctgggcatcgcctgtttggtgaagtatctgctctctagcaagtga

SEQ ID NO: 355402 - DNA, 348 bp, Pseudomonas aeruginosa
atgccccgctacccgacactcgccgctcttattgccctgctggcgtttggcagctttacgctgttcacgctggtacacgccgaacagtccctgctgcaatttggccgcgaactactcgcccgccccgacaccgcccaggtcgtgatcgacctgtacctgatggccgggctgggcgggatctggatgtaccgcgatgcccgtgccaaaggccgttcatggcgctcgctgctaccgtactggctgctgacggccgtttttgtctcgctcggcccgctgctctatctggtggtcgagggatttcgcgcgtcttgcggccatggcgctggccgccgccagggtctatcttag

SEQ ID NO: 355403 - DNA, 1506 bp, Pseudomonas aeruginosa
atgaccctgagtgtgcagcagtacctgcaggccgacgccacggcgctggccgatctggtccagcgtggcgaggtcagcgccgccgagttgctggccctggccacggcccagctacaacgcctcaacccccagctcaacgccgtcaatcggcccatgcctgaacaggcccgccagcgcgtgggtgagaccctggagggcccgttggccggggtgcccgtgctgatcaaggacgcggtgcaggactatgccgggctgccgacctccaatggtagccgggcctttcgacaccacgttgccgccagccactcgacggtggtccagcgcctgctggacgccggcgcggtcattatcggcaagaccaataccccggagctggccctcaagggctttaccgatccccaggccttcggcatcacccgcaacccctgggacctgacgcgcacaccgggcggctccagcggcggctcggccgcggcggtggccgccgggatcgtccccatggccggggccaatgacggtggcggttcgatccgcatcccggcggcctgctgcgggctgctgggcctgcgcccgtcccgtggccgggtgccctgtggaccggccagcggcgagatctgggaaggcgcctcaagcgatctggtggtctcgcgcagcgtgcgcgactcggccctggccctcgacgtcctggccggcccggcgtgcggcgagcccttcgtgattgccccgcccgcccagtcttttcgcgcattgctcagcgaggaaccacgccgcctgcgcatcgccttcagcacccgctcgcccctggacaccgaggtccatccagaggccatcgccgccgtccagcacaccgtgcggttgctggaaaaactcggccacgaggtgatcgaggccgaaccacgatacgacggccatgccctcgcccgctgttacctggacatgtacttcggccaggtcgccgcgaccctggccgaagcccgtgaagccggcgcccgcagcgccgacttcgaactcgcgacccgtctgctcgaagcctttggcaacgccactcgcgccggcaactatgtacgcagtcatcgacgctggaaccagttcgcccgcgccctgggcgagttccatcagcgtcatgacctgttcctcacccctaccctggcctgcccgcccgcaccccacgccgccgcgcagatgcccgccggccaggagcgcctgctgggctggctgctcaatagcgggctgctcggcgtcctggcccgcctgggcctgatggaaaagccgctgaacgagctgtcgcgacaaaacctcagctatgtgccattcacccagttggccaacctgaccggcaccccggcgatcagcgtaccgctgcactggaccgccgaaggcctgccattgggcgtgcagttcattgcgccgttcggtcaggaggggcggctgctgcaactggccgcgcagctggagcgggcccagccctggatgcatcgcctgcctgccatggcctacccgacctag

SEQ ID NO: 355404 - DNA, 501 bp, Pseudomonas aeruginosa
atggcgcacccgaaggaaacccgcgacgccctgcgccgcgcctacgtcctcgaccgccagtccctggaggtcgcggccgccatgttcggcgtctcctacggcaccgcccgccgctggaaacagcaggcggaagccgagggggacgactgggacaaggcgcaatcggcgcagttgctggccggtggtggactggaggacgtggcgcgccaggtgctggccggtctggtgacccagttccaggccaccatggaagccgtccaggtagacgcggacatcaagcccgccgtgaaggtgcagctgctcgccagcctggccgacgcctacaacaagtcgatcagcgcatcgaagcgggtactaccggaaacctccagcctggccaccgcaatggaagtcatccagcgcctggcggccttcatccgtgaacagttcccgcagcacgtccaggccttcgccgagattctggagccgttcggggaagtaatcgctaaggggctgaaatga

SEQ ID NO: 355405 - DNA, 561 bp, Pseudomonas aeruginosa
atgcaggtccccgaggtgttccagatcatgctcggcaagaaaggccagctggccgacggcatcgccgagatcatccacgccatcgtcaccgggcagcagaccctgcccggctccgacagcctgcaagcggtgcccgccggacaattgctgctggccggcgccgcccctgccgacagccaggcgcagagcctcgccgccggcgaagtccccaccgacaagagtgcgcgcaaggactactgcctgaataccgagcatccattcctcggctacatcgctcgcccgctgaacggcatctgggccaccgcaccctacctgcacaacggttcggtgccgtcgctgtacgacctgctgctgccccaggagcaacggccggccaccttctacaccggcagccacgagttcgatccgagccgggtcggctacctcaccgcgcccggcccggacaacgccttccttttcgacacccacctggaaggcaactccaacgccggccacgacttcgcccgcgagtacgacgaaagccagcgcctggcgctgctcgaatacctcaagaccctgtga

SEQ ID NO: 355406 - DNA, 171 bp, Pseudomonas aeruginosa
atgagccagcagcccgatccttgcaacgcctaccacaccgacgaacagcgctgggccgccgtgctggcgcgcgacgcggcggcggacggggcgttcgtctatgcggtgaagaccaccgcagcctggcggcggagcagcgcgccgagcgggtggcgcaggcctgccggatga

SEQ ID NO: 355407 - DNA, 735 bp, Pseudomonas aeruginosa
atggcccgctcgaaccggcggaaggactgggaacatggcgttcaaacggatagcactggcctactgcgtgcaactggagcgggtgatctccatcgccagtgcccgccgcgaatacttctcccagaccgagccgcgcaaacgcttcgacttcctctgctccagcgaagcgtgccgggcacaggggatcaaggtatcggcgagcaactacgacaagctgccgcaggacacccgcaaggccgcgcacttcagcaagttcccgcactccacccacctgccggactgcgagtggttcgtcgaggacgacgaggacgctctgcgcccgggcgaatccgccgaggaggccggccagcggcgcatccgcgacaagctggacgcctacgtcgaggaattcgatccggccatcgccgaggaagccgcgccgccaccagcggacccggacgccgaggaacagccgccggcctccgccgcagtgcgcgccgacgctcccgccgcgcctcggcagagaacgcaacggccacggcgcacccgcgatttcgaactgctcgtcgacaccttccgccaggcccgcgccgagctgccggcggaagagttcaagcaactggacatccgcatcagcggcctcggccggatagcgctgcgcgcctatttccagcacatcggctatgccaccccgggcagcgccggcaaggtattctacggcggcgccgacctggtcggcgcgttcgcgcagcttga

SEQ ID NO: 355408 - DNA, 657 bp, Pseudomonas aeruginosa
gtgcacggtcgacgagcctgcggcagcgcttgccaatgttccggcgaagaaggctggggcgcgcccggcggtcaccctggcgcaggcgcgggaagtggtcagcgcggcgttgtcggagatactcggggtgccatgcgacgagctggatgccgaaaggggttttttcgaactcggcctgacctcgatctcgctgatcgagttcaagcgcaagctggaggcacgggtgggattggaactgcctgccacggtcggcttcgactatccgaatctggaggcgctggcgcggcgcctcgagcagttgggggcggcgaaggaaatccagccgacgacctgtgcgccggccgcgcgcggggcggataccggacacgaggtggcagtgctggggatggcttgccggctgccgcgtgcggacagtcccgaggcgctctgggaagtattgctcgagcaggcgacatgcgtcgtgccggtgccgtcgtcgcgcctgaccgagccggtcggcacccggcgccatgccagcctggtcgagcgcgtggaagggttcgacgaggactttttccggatctcgccacgggaagcgggcagcatggatccgcagcaacgcctgttcctgatggttgcctgggaggccctggagcgggcaggtattccgccgcatga

SEQ ID NO: 355409 - DNA, 693 bp, Pseudomonas aeruginosa
atgcgccgagaggcacaacggccagggtcgcgaaccgtcgccgtcgctcctttcgctggggtcccgcacctcaccgcgcaacagcacatggacattggtaccggtgaaaccgaaagcgctgatgcccgcgatccgttctgccgctggcacctcccagggctgattggcctgcggcacctggagactcgttgcctgccagtcgaagcggctgttaggacgctggaagccagcctgtccgggaatcaccccacgctcgaccaccaggcaggccttgatcaacgaagcgataccggcggcggcctccagatgtccgacgttacctttcaccgatgccaccgccaagggcacgcgctcagtacctcgataggcgttggccagggcctgcaactcgatcggatcgccgagcactgtgccggtcccatgggcctcgacatagcccaccgccgcggccgacaggctggcgttggccagcgcttcgcgaatcaacgcctcctgggccggtccgttgggtaccgtgagccccgcgcaggcgccgtcatggttgaccgccgagcccagcagaacggcgatgacccggtcgccgtccgcccgcgcccgttccgcccgcttgaggatcaccacgccgcaaccctcgccgcggccgtagccatcggcacgatcgtcgaaggtcttgcaggtgccgtccgccgatag

SEQ ID NO: 355410 - DNA, 762 bp, Pseudomonas aeruginosa
atgggcgccttcgaagagcgcgagggtttccgccagcagcagccgtcgacgagccgcatcgctgcgcagaggaaagcgatagttgccgtaccggccgtcgcgctgcccctcgagcgcggccgcaaccaggccggcttcggcctggccgaggtccgccggggacagttcgagctgatcgacatccggggaggcgcactccaacggcacggcgctgagcacgtcacgccattcatggtcatgctcgccacgcaacgccagggtgatcgaggccttgtccgagaggctcaaggtcagccgcgaagcgagcggcccgcaacgcgaaaatcgtggcaccgacaggcgcagctcgaccagggcgaaggcgcgctccggctcggccactgccagcgcctgcagcaaggcatccagcagaagcgcaccggacggatgccagtgagtctcgtcgccgctcttttcctcgggcaggcgacccagccattgccactcgccacccatcccacggctgtgcaacagcaggcacggatgatcatcctccagcgccggctcccggacgccatactcgagccagtaatcacgcagttgccagggataggtcggcaggtcgacccatgcccggacatcgccgaacaccgcgagccagtccgccggctgtccattcaggaaggccgtgcacgcgctgcgagtcccttcgtccagctcagcaggcatgcttgcatcgatccccctgcgccagtccgcgagcgccaccgcgagctcggctga

SEQ ID NO: 355411 - DNA, 219 bp, Pseudomonas aeruginosa
atggatcggatcaagagtgccatcaggcgctggaaggagaaaaactgggacgaaaggccggtgttccacgacgacccaatccacccatcgctaggctttgaacggccaccgatcagggcgttttgggagtatcgaaagggccgaatcatcactatctccaaatggctactcgccctggttgcaggagcggccatccttcgccttctcggccttggctaa

SEQ ID NO: 355412 - DNA, 294 bp, Pseudomonas aeruginosa
atgaacgacagcgaaagaagagaaagatcgaatgaaatattaagccagccaagagactacaccgatgaagaaattcaacagttcttgtatgaatttggttatgaaaccggaatgatgatgaagccagaggcaatgattgatttattcagcggcagcataaaggcaagaatattttatttttcatctatgattatttatataaacagcgaattgcacaacataacacttgagcaaagagaaaattatataaaacatcttgcatttataattgcggaaattagcaaagacttataa

SEQ ID NO: 355413 - DNA, 1428 bp, Pseudomonas aeruginosa
atgattagaaagaaattaagcacatacaaaacagtcggatcaatcgggaacggctgcaattacatatcaaaaaaagccgcgttggttggcggcagtgaagccaaatttgacaacacaagcattgaagaatattcagcgttggcggttaagaaatttgagcaagtcaataataaatttaaaaataaatcaggaagaaagcaggaaagcaaagccatacacgaaatgatttcatttcataaagatgatgatttgacgccagaaaaggcggcagaacttgctttaagtgtatggaataaagccctcgatttagaaaatagaaaacacagatgggcagtccatacagacacagacgaaatgcacgtccacctcgtatggaacaaaagaaacaataaaggcgagatttacaatcaaaaagatgattatgcactttttgaaaaattatgttatgaagcagaaatcgaaaatgatttgactattgttaaaaatagaaaattcctaaaccctttaacgccaacaaatccgcaaccgtccaacgaatacaggcacgaacaaaaaggacttaaatcggaaaaatcaaaatttaaagatgaagtgaaatcagcaattgataatgctatatcttcaagtgattttctcgaaattatggacgctcgcggcttttccattattcacaacggaaacaacgcatacacgcttgaaaaagacgggattgggtttaaggcttcggacgtgggagcgtcctataagcacttaaaaggccattttggcgatgatccagggttccccgctactctcgcccgcctgaacagaaaaccacgcgaaagcggcccagttggaagccttagcggcccacaattccagtccgcccaggactacgacaagaaacagaagaaaatgaaccgcgttcttgatcttcgttttgatactcaggacgggcagtcttataaatggaacggatcaaatcgtgaagcattcatttatgaaaataattctgcaacattctatacaacaagcccaacggctattaaagccggttttcagcgtcttgcagaaaatgcaaaaaatgaaaaagacaaagaaatgtatttaactggcactaatgattttaaacgtaatgcgtggttagaatttcataaaatgaatttagatcaaaaaggcttttcactttctggttataccccatcaaaccaagacaaattagatcttgaacgcattaaaaatgaagtcaaagaaaaatactcgaaaacaaaagaagataatgcaacagaagaaaatcaaataaatacagataaagtagtaaaatctaaatattctgctctattagaaaaaaatgcagaaatgcaagagcataaagatatagcgaaacgagaagaaaaagaaacagagaaagaaaataataaacgaagaatgaaattaaaaccgcaataa

SEQ ID NO: 355414 - DNA, 1239 bp, Pseudomonas aeruginosa
atgcacgacagcctggcgtacatcggcgaagacccgctgcaccggcgctatcaccaccaccagttgaccttcggcctgctctacgccttctccgagcatttcatcctgccgatctcccacgacgaggtggtacatggcaagcactcgctactggacaagatgcccggcgaccgctggcagaagttcgccaacctgcgcctgtacctgagcttcatgtggtcgcacccgggcaagaagctgctgttcatgggatgcgagttcggccagtggcgcgagtggaaccacgacggcgaactggactggtacctgctgcgctatccggagcatcagggcgtacaggacctggtggcggccctcaaccggctgtaccgcgaactccccgcactgcatgcgcgcgacggcgaggcgctcggcttcgaatggctgatcggcgacgaccaggcgaacagtgtctacgcctggctgcgccacgcggccggcgagccatcgctgctggcggtacacaatttcaccccggtgccgcgccagggctatcggatcggcgtaccgcaaggcggcgactgggacgtgctgctcaatagcgacgcccaggcgttcgccggttccggcgcaggcagccagggccgcgtctccagcgagtcgtgcggcgcccatggccaggcgcagtcgctggtgctcgacctgccgccgctggcggaacgcttcgagctgatcagcatgaccgccgtgctgcactggctgtatcccgacgaagagcggctgttccggtgggtcgcgcggcaccttgaggcgcagggggtattcctgttcacctcgcaccatccgttcgccgaggatggcctcggcggcgaggacgacctggtcgcccaggccctggtcgagatgggcctggctgcgccggaacgggtggcggcgctctacgcggaagccgggctgctgccgatgggcacccgcacccgtggccgggaggcgttgcgcgaacgcgtcgaacggcacttccgggtcgactccatcgtctcccgcccggcggccctgcgcgtcgccgactccgccgagtaccagcgtttccacgccgccaccttcggcacctatttcgcaccgctggtgccagcgacgcgcctggaggaattcttcgtccgcctcgggcggatcgccgagcggcgcatgcaggccgacggacaggtcagcgaaatcccggtcagtgtctggcgctgccgggcgcgggagggcgaggcataa

SEQ ID NO: 355415 - DNA, 144 bp, Pseudomonas aeruginosa
atgatccgctgtcgcaactgtggcgaacgcccagccagcgaagggcatatctgtatggtctgcaagcgccgatccagcgtccagcccgccgaggagctggcccagcgcgcccgccaggccaccctggaacagcgcggcatctga

SEQ ID NO: 355416 - DNA, 1425 bp, Pseudomonas aeruginosa; identical to SEQ ID NO: 322215

SEQ ID NO: 355417 - DNA, 234 bp, Pseudomonas aeruginosa; identical to SEQ ID NO: 341916

SEQ ID NO: 355418 - DNA, 966 bp, Pseudomonas aeruginosa
atgagcgcatcgccttcctcccgcctgcacctgcaggtcaccgatttccgcgctgttgcgcgcgacgtggtgctggtcgagctggccgccgtggacggcaccgaactgccggccttcacccccggcgcgcatctggagcttcacctgggcaacggcctgatccgccactactccctgctcaacgactgccgcgaacgccagcgctaccaactggcgataggccttggcgacgacagccgtggcggcgcccgcttcatccaccgccaactgcgcacgggcgaccgcctgcacgcggcggcaccacgcaaccacttcatgctgcgcgaagacgccgcgcgctactgtttcgtcgctggcggcatcggcatcaccccgattctctcgatggttcgctggtgccaggcgcagggcaaggactggcgcctactgtatgcggtccgcgaacgccagcgcgcagccttcctcgccgaactgatgacgctcggtggcgaacggacgcggctgcattgcagcgacgaaggcgacccactcgacagtaccgcgctgatcgccggcctaggtgccgacgaagaactctactgctgcggacccgacgggttgatgcaggccatccgcgacgccgggagcggctgcgcggaacgcctgcacttcgaacgcttcgacgctccagtagcgccggcgtcctcgtccggcggcaccgacgccttccgcctggagttgcgccgcagcgccctgagcctgcgcgtcgaaagccaccagagcatcctcgaagtcctcgaggaacagggcctggagcctccctacgcctgccgcgccgggatatgcaggacctgcgagacacgcgtctgcgccggcgagccggagcacttcgaccatgtgctttccgacaccgagcgggccagcggggaaaccttgctgatctgcgtatcacgctgccgcggcaactacctggaactcgatctctga

SEQ ID NO: 355419 - DNA, 186 bp, Pseudomonas aeruginosa
atgcgcgcagcggtcttccagggctaccgcctggccggcgagggtgcgatagagcaccacgcgcttgccgagcagagtgcgcgcgagcagttcgcggccgacctcctcggcgaaggcggcgacgtaccactcgttgaagatgaacgacgtgtcgcgcgtggccatctgcgcggcggccttgcgtga

SEQ ID NO: 355420 - DNA, 864 bp, Pseudomonas aeruginosa
  misc_feature (739)..(748): n is a, c, g, or t
atgccggccacctctgcgccgctggtttcggtggccgggtttggtagtgcggcagtggagacggctcgcctggcggcttccctaacgaatgctgtcaatcgcttgattcagattgctggtagtggacctggcgcatacgtggccaccttcgcggtgctgtcgctgtattccgaccaggctggtaaagacagtgacaaggttcctgccggcgttcgcaatgcattggcactggaggcgtccgctctgggtcttcctggcacggctgatttgcaaagcgccgccaaggcaggtggcacggttgatatgccggtacgactcacgagtgctgcacaagagagcccgagtggtaaatcgcagattgccgcggtgctgaccaacggggcaactgtccccaagggcgtgcctgttcgcgccgcgaccctcaatgctgcgacgggccggtatgaggtgtcggttcccgcaaagcccaccgtaccgaatacaccaccgctgatcttgacctggacccctgccacccctccaggaagccagaacccctcaagcaccactccggtcgtaccgcagccggttccggtgtatgagggagcaacgatcaccccagtacaggccgagccggagtcctacccgggagtgcctttagacctggacgatctgatcgtgattttcccggcgggctcggacgttcctccgctctatctggtcttttccaagccgccggttaagctactggaggtggacnnnnnnnnnngggacgacctcgtgatggaaaccatcttgaccatatgccctcacagggcgcgcttgccgaatcgttgctctcaaaaaatcctgggctcacttacgataatattcgagggtacctga

SEQ ID NO: 355421 - DNA, 1755 bp, Pseudomonas aeruginosa
  misc_feature (1309)..(1318): n is a, c, g, or t
atgtcgcgcctggtttcggcattctcggcgcgcgggctgggcgtccgcgagatgccctgggaggacgtcccggacagctcggagtggctggccgaggctgcgctcgatacgacctgtgagggcctgctcgtgccctgctgcggtgactgcgacgagcagcgtttcgctgactttctgctcgccctggggcgggcggtggcgacgtgcccgacgggtaagccgatctggttcctgcatccgccagccgagcgtgccgatgccgccgcagccaggaggctcgggatactgtatggggcgacgcgggcgttggcgctggaacaacccgcctggtggggtggggtggtcgagctcgacccggccgacggtcgcggcctgcatcgcttcgctcgcctgcttgtcggcgtgccccggcacgatcacctgaagatccgcggaacgcgggtcttcgcccggtatctggaggtccgaccggccgcgtcgcgccgaatcggtagcgcctcggcggggggcggcacggttttgttgcatgtccgcgccggtaccgacctgacgccctacctgctgctctcgccggtacgccgggcgcggcgcctggtggtgctgtgcgaacagccaccgagactgcccgtggagtgggccggcgcgccactgccggagacattgattgtcgattgcgcggaccgtcgcgccctggccgaggtccttgggcgcctgcaggcggagcagtcgatcactggtttcatccaggcacggccggaatggaccgctggtcggttggaagagccgacatccgccacccgggttgccgccgctcggcgcgaaatgcacgcgctggagaacttccatgggttgctggcgggacagccgctggcgttcttcctgattctgggcagcctgtcctcgctgctggggggggcgggtttcgcccaccaggcgatggtcgatggcttcgccctgtggcttcacggcgaacgccgccgcgcgggacttccctgccagttgctgctgggcctgcagaccgaggccgagctggatggtctgcacgaggttcgtcaacgcctgctgggcagcggcctgcagccgctgaaggaggagcggttcgttcgggcgctcgagactctgctggaggagcccgacggctgtgtcggattggccgatggtgtcgattgggcgcagttgaagccgctctaccagaacgagctgccgtggccgctgctggaccggctcggacagccgtccgcgacggttccggaacgggctgcggggttcgcgcggatgcccgagcacctgagacgcagggccctggcgnnnnnnnnnngccctggcggcattggtagcggaacaggtcgccgcagtcttcggctatccggatgcggatgccatagagcgcagcaagggcttcaccgagatgggcatgtcctcggtgatgtcgctggatttccgttcgcgcctcggccgcgcgctgggtctccagctgcccgccaccttcgccttcgaatactgctcgatagatgccgtcaccgactatctcgccctgcacctgcaggccgggcccgcacccgtgtccaccgagcccccggcgcgccccgcgcaggagcccggcgagcggcgcgagatatccgcgctgtcgcgcagcgagctgatcgacgcgctggaagaggaactgagagatatcgagaactactagttcaccgcaccgcaggacgactgagacccgatcgaggcctttcatggaaaacgaaacgtcagatgtga

SEQ ID NO: 355422 - DNA, 351 bp, Pseudomonas aeruginosa
gtggtcaaggacatcctcgagcaggagcgaaagcagcctgcctggctccagccgcaccagctcctcgctagccgtggcgcccagcgccagcatggcatcggcgtcgagggtcgcctcgaagaccgggaatggcgcattgatcggttgcccgagcaagcgtcccacgccgccaatctggctgcgcccgccagcctgggcatagccaggcaacgcctggcgcaaggcgccgtcgtgcgcatgcaggcgctgccaatccaggtcgacgccaccggtgtacaactgcgcagccgccaggcgtatttcccgcgctgcatcaccgccacggcgcatgctgggcacgacgagcaatga

SEQ ID NO: 355423 - DNA, 834 bp, Pseudomonas aeruginosa
atgggcacaccagtagtcggcggacgacaggctttccagcgtatgcaggcgtccgctgacgccggacaccagcggtatccgcggctcgctgaaacggatctcgcggactacctcgcggaaacgctcgagcatgggctcggccgcggcactgtggaaggcgtgggaaaccgcgagcttgcgggtcctcacctgcatcgccgcgagtttttccagcagcacttcgacgtccgcttcaggaccggcgacgaccaggtcctcgggactgttcaccgccgccagctcgatacccgccaatccttgctcgcgcagcagcccgagcaattccgcttcaccgaggttcacggcatgcatcacccctccggcggtcatcagttcctgggccaggcgtccgcgcgcctcgaccatcctcagggcgtcctccagcgtgagggccccggcgatacaggcggcgccaatttcaccgaaactgtgaccgaacagcgcgccggggagcacgccccaggccatccacaagcgggccagcgcgtattccacggcgaaaatcgccggctgcgcatagcgtgtctgcgccagcaacgcctctgcctccggcgtcgactcgaacaaggcgcaggacagctcgacacccatcccgcgcaacgccacgagacactcgtccaatgcctcacggaacggcagctcgctgtcgtacagcgtcctggccattcccggatactggcagccctggccgggaaacagccaggcggatgccggcggcacaccaggccgacagacaccctcgaaggtatcgccgaccagcttccgagaagcgtaggccgccaattgctcgcgtag

SEQ ID NO: 355424 - DNA, 1725 bp, Pseudomonas aeruginosa
atgatcattctcgggatcaccaacaacgacctggccggcgcctgcctggtgcgcgacggcgggatcgtcgccgccgccagcgaggagcgcttcacccgccagaaggaccacaaggcctggccgagccgctccatcgactatgtgctcggcgaggccggcatcgacctggccgacatcgaccgcatcgcctacggctggaacgccgggttcgacgccgggcggcacctcgacctctacctggaccgggtcctcgaggaagcccgcgagcgtcccgagggcctgccgcacctgcgcaagcggatcgccgacgagatggccaacgacaaggccaagcgcggcgaattcgatgccttcgtccgcgccaacggcctgcgcggcaaggtcgagtacatcgaccatcacgaatgccacgccctcggcgcattcgtctgctcgccgttcgacgaggcgctgaccctcacctgcgacggccgcggcgacttccagtcgctcaccgtcacccactaccgcgccgacggcggcgaggcggtcctgcaacgcgagaccagcgtcgacagcctgggctacttctacgggcgcatcacccgcctgctcggcttcaagccgaaccgccacgaaggcaagatcaccggcctggcggcgttcggcgacgcggaaaagctgctgccgctgatgaacgacatgatccgcctggagaacggccgcctgcgcgcccgctgcggcgaactgtacctgccctcctacgacggctacagcgatccgctgctgcaacgctgcgcggcggaacgcccggcggatgtcgccgccgccgcgcaacggcactccgaagacctgctggtggccatcgcccgggagcacgtggcgcgcaccggctgcgccaacctgtgcctggccggcggggtgttcggcaacgtcaagctgaaccagcgcctgcgcgagatccccggggtccgcgatgtctacgtgctgccctgcatgggcgacggcggcctggccctggccgcggcggtggcggtggcctatcgcgagaacggtacgcgcttcccggcgccgagcatggccctcgggccggacgcgcgcagcgccgcgcagaatgccgagctgatcgccagccagtacccgcagctggcctacagccggccggccaacctgatcaagacgctggtcgaagcgctgcgggaaaaccaggtgctgggcatgttcaagggccgcatggagttcggcccgcgcgccttgtgcaaccgcagcatcgtctaccatcccggcgatgccagcgccaacgactggctcaatcagcgcatggaacgcaccgagttcatgccattcgccccggtcaccgcggtagaacacgccgaggcttgctacgttggctggcgtgaagaccaggtggcggccgactacatgaccatgacctacgactgccatgcggatttccgcgcgcgctgcccggcggtggtgcatgtcgacggcaccgcgcggccgcagatcatccggccgcaggccgatccgttcatgcacgccctgctgcatgcctggcatgcccgcagcggccagccggcactgatcaacacctccttcaaccgccacgaggaaccgatcgtctgcgccccgcaggacgccctcggcgcgctggaggacgggatggtcgacctggtggtgctgggcgagtccctgctggtctggcgcaagggcgagaacgccttcgccagggcgcgcttcgagtga

SEQ ID NO: 355425 - DNA, 1278 bp, Pseudomonas aeruginosa
atgaacgacccccagggcttcgaggccatctcgcgccgcgaacagggcctgcaacggcggctctcggccgcgcagatgagcatgatcgccatcggcggcgccatcggcaccggcctgttcatgggcagcgccttcgccatcggtttcgccggccccagcgtcctgctcagctatgccatcggcgcgctgatcaccctgctgctgatgggctgcctggcggaaatgaccgtggcccatgccacccccggctcgttcggcgccttcgccgagcactacgtcggcccgctggccgggttcctggtgcgctacgcctactgggcggccatcgtcctggcggtgggcaccgaggtcacggcggtggccatgtacatgaagtactggttcgccggtatcccggaatgggtctggatcatctccttctcgaccctgctgatcggcctgaacgccagcagcgtgaaagccttcggcaacttcgaatactgcttctcgacactgaagatcgccgccatcgtcgccttcatcctgctcggcgcctacctggtgttcggctccgccaacccggcctacggcgtgcacaactacagcgcccacggcggcttcttcccgcacggcctgaaaggcatgtggatcgccgtggtggtgtcgatcttcagttatctcagcgtggagatgatcgcggtcgccgccgccgaggccgaacatccggaacaggcggtgaggtcggcgttccgctcgaccatcgtgcgcctggtggtgttctacctgctgaccctggcgctgatgctcgccatcgtcccctgggaccaggccgggcagagccagagcccgttcgtcacggtgatgcaggcgatcggcctcggcgaactgagccgccagggcgtgccgctgaacgcgctgctgctgtcgagcgtcggtatcgccctggcgaccctgctcaacctggtctaccccgagcagtccttcaccctgatgatggcggtgtcgatgttcggcgccctcttcacctggctgatgatcttcttcacccacctctgcttccgccgccaccgcgcccgccacggcggcgcgccgctggccttccgcatgcgcctggcgccctggtcgacattgctcggcctggcgctgatggcggcgatcctggtcaccaccttcttcaccgaggcgttccgcatgaccctggtcttcggcgtgccgttcctcgcgctgctcagcgcactctacctggtcttcgtccgcaagcccggcagggattgtccgatagaacgggcaacgccctag

SEQ ID NO: 355426 - DNA, 1476 bp, Pseudomonas aeruginosa
  misc_feature (1277)..(1286): n is a, c, g, or t
atggtcggggacgcgaccgccgctggctggcgttcggcaaacttccgtgtctatagcggcgactacaatggcgacggtcagccggacctctacctgaaggcggtcacttcggtggtcgtggtgggaggcgaagtggctacgccgattccgctcctgccaccgttgaagaatgtcgtcctgctgcgcaatggtgccagctacagcgccctctacgatccaccggcggcggatctgaacgccgtggcctggacggcggcgccctaccagagcttcatcggcgacctgaatcgcgatggcatcctcgacctgatcctgcagccgaacgattccagcgactcgctgctgatcgtcagcggcaacccttccgcgcacggcgtactgcaggtagccagcggtaccgggctgggcaccgagatcggctatgacgccggcgctcgtttcgcccttggcgattggctgggcaacggcggtaccagcattcgagtcagccatccgacccaggggcagagcacgttgttcatcgatgccggtggacaactggtggctcgctacctgagcgtacccactccgcttcccggcgtggtactgggcaaggcagcggaagccttcacagccttgaacctgctggctccccaggcaggtgtgagaggcgacggtggggtggactaccgctatccccttgagctgccgccaggcattgctgggctgcaacccgagctggcgctggtccagggcggtgggggcggcgtgctgggcgaaggttggagcctggctgggctgtcgtcgatcgagcgttgtccggcgagcatcgcccaggatgggcagaaccgccaggtcggcctgttggagtcggatcgcctatgcctggatggcatgcgcctgcagttgctgtccggcgagtacttcaagccgggcagcgtctatcgtaccgagatcgacagcttctcccgagtccaggccaccggcagcgccgcctcgctcggtttcgaagtacgcactcgggacggtcggatcctgacctatggcggcgcggctgcgattaaggcgcaaggagcggcggttccctatcaatggggcatcagttcggcgacggaccgcttcggtaataccatcgagtaccgctacctggccgccaacagtctggtccccagcgaaatactctatgccggtaaccgggtttccttcgagtacgcaggcgccttgcgcagcgtgccgcgctatttcgccggtggctataccagcgccacccatgtgttgaccgcggtcgccgtgcgagnnnnnnnnnnccgtgcgagggcctgccgcgcagcagttgtttcgtaccgagcttgcctacgagcgcacccagggggacgccagcaaggtgcgtttgaagcaggtgcaacggtgcgcctgggggagcgccggcaaggagtgtctgagtccggttgccttcgactacctggcgggcgtctatggttataccgggacggctga

SEQ ID NO: 355427 - DNA, 1215 bp, Pseudomonas aeruginosa
atgacccacgacctggccgccagcggccttcgcttcggcatcgaggaagaattcttcctgctcgatgcctccgacctggacatcgtccgctccgcccccgccggattcgtcgcggcctgccgtgacacgctcggcgagcatttcgccgaggagatgttcgaatgccaggtcgaggtggccagcccggtgttctccaccctggccgaggccgcgcgcttccacggtcaggcccggcaacgcctggcgcatctggccatggacttcggcctgcgctcgctctgcgtcggcacccatcccttcgccgactggcggcgggcgcgaagcaacccggcggcgcacttcgcccgcctgttcgaggaccaggggcgggtggcccggcgcagcctggtctgcggcctgcacgtgcatgtggagataccgccgagccacgaccgcatggctgtgctccagcgcgtgttgccgtggctgccgctgctgctggcgttgagcgcatcctcgccgttccgcggcggccggcgcagcggtctggcgagttatcgacgggcactctgcggcgagtggccgaggatgaacattcctcctgccttgcccgacgaggacgcctatcgccgccacctggcgctgctgcgcgagaccggctgcatccgcgaggatggccaggtctggtggatgatccggccgtcatcccatgtgccgaccctggagctgcgtatctgcgacgcctgcccgtgcctggccgacgcgctgagcctggccgggctgttcagagcgctggtgggcgaagcgctggacgcggacccgcgtgcgttgccggtcgcgcgcgacgcctgcctggaggaaaactactggcaggcgctgcgttacggttgcgccggccgctatctcgtcgaaggccgctgcgtaggtgccggggactggctggaaatggcctggcgacagtgccggccgcaggcccgccagggcaacgaatgggcctacgagcatgcccgtggattgctcggagagacctccgccagtcgccagttgcagcgctaccagacactgcgcgcagcgggccaggaacggcatgtggcgctgcgccggctggtggaagaactgctggaggagaatctccagccggccttggccggtccggccggcaagcgcgccaacgaaggcggccggtcattccgtccggccgctggagcaccgatgccaatccgtggtcaggagtag

SEQ ID NO: 355428 - DNA, 348 bp, Pseudomonas aeruginosa
atgaccaccagttcggtcagcaagctgcccgtgctggccccgctgaaatccagaagcgtcggggaattggacggcgtgaagctgtacaggcctgtcaggtgccactggaatttcttctcgtccttccagcatttgccgccgttgccggtacacaggtcgatgaccgggttgagcatgaccgagtccttcggccggtacgacagctccgtaccgacggcccagtcaccgatcggcatgttggcactgatgccgtacatcatccggtcttcctggtactcccaggtcggtgccgccgcgaaggtgttcgggtcgagaatggcgacacgcaacgatggcaacttgtcgtga

SEQ ID NO: 355429 - DNA, 636 bp, Pseudomonas aeruginosa
  misc_feature (209)..(218): n is a, c, g, or t
gtggccggcgaacaggccacgaccttctactacttccccggccagcgccgcgtgcggcgaatgccgtcgtactcctacgatgcgccacagatcggcctggataaccagtacaccgtcgacgaggcgaacgtcttcttcggcaccatggaccgtttcgactggaagctgatcggcaagcaggagttgctggtgacttacaacgatttcgnnnnnnnnnncaaggtggagacgtttgctggcaacgactcgatcgcgccgcagtcgcgtcgctatgagctgcatcgggtctgggtcgtcgaggccaatgtccgtcaaggcatgcgccatcaggcgccgaagcgcatgttctacatcgacgaggacagctggaacccgttgctggcggtggactacgacaagcaagggcagatctggaaagtgcgcgaagggttctcgattcccgtgtacgagacaggcgcctgcgacgtccaggcccaggtccagtacaacctggcggatggccgctacctcttcgacatgacctcgatcggtgcgggcaagaacgatattcgctggctcaccgaagacaacggctccccccgcctgaagcgtgacttcttcacctccgacaatctgcgagccatcagcgagcgctaa

SEQ ID NO: 355430 - DNA, 363 bp, Pseudomonas aeruginosa; identical to SEQ ID NO: 352463

SEQ ID NO: 355431 - DNA, 498 bp, Pseudomonas aeruginosa
atgcctcctcaacgaccgattctccgctaccacggcggcaagtggctgctcgccccgtggatcatccagcacctagcgccccaccacacctacatcgagcctttcggaggcgcggcttctgtcctgctgcggaaggcccgcagctacgccgaggtctacaacgacctcgacggggacgtggtgaacctgttccgcgtcgcgcgggaccgtggcgaggaactacgccaggccctggcgcttaccccgcttgcccgtgaagagttcgaagccagctacgcggaaacgacggatccgctcgagcgcgcccggcggatggtggtccgcagcttccagggtttcggcagcgccgcggcgagcggcgaacgcacggggttccgctcaacgtcagcgaggattggtaccgcgcccgcgctggactggctcaactaccccgatgcgttggccgccatcaccgagcgcctacaaggcgtggtgatcgagaaccgcgacgcccgctga

SEQ ID NO: 355432 - DNA, 624 bp, Pseudomonas aeruginosa
atggcggacaatcaacgagtccgggtactcgccactccccgtatcttggtcaagagcggcgagcaggccaacatcaatgtcggtcgggatattcctatcccaacggcccaggtcaatgacgacagcaccactgctggaagcaccaacctgcgcaatgaaattgcctaccgctctaccggcacaattctgaatgtcgcccccgtagtctactcggatagtcgggtcgatcttacggtcagccaggagttgagcgacagtggcggttcttccggcggcggtggcaaggccagtggaggaggaatcagcgctccggagatttccaggacgtcgctggaaacatcgcttacgttgaaaagcggtgggtcggtgctgatgggggggctgattcgggacaacataacggactccaacgctggcgtgcctctcctgaaggacattcccggaatcggtttcctcttcggacgccagaaagccgtgaagacccgtgaagaagtcatcatgttgatccagccttacgtgctggaaagtgatgccgatgccagggaagtgacggaaaagctgcgcggcatgctgagcaagacactggcctgctccgatagaccgggcgcctgccgtatggaatga

SEQ ID NO: 355433 - DNA, 918 bp, Pseudomonas aeruginosa
  misc_feature (894)..(903): n is a, c, g, or t
atgtacgtcctcgggcaaagcctgtacgccctcgcctccctcgcgggcgggctggcccagagcgagttgccgttgatcctcgcccgcgccgtgcagggcctgggtggcgcgctgctgttcccggcgaccctggcgctgatcggcaatcacttcgccgagggcccggcgcgcaatcgtgccctggcgatctggagcatcgcctcggcgttcggcctggccctcggctcggcgctcggcggcgcgctcaccgagctgttcggctgggcctcgatcttcctggtcaacgtgccgctggccggcgccgcggcgctgctcgccctgcgcctgatcccggccgacgcccggcgccagcgcggtcggcgcttcgacctggccggcgcgctgacggtcaccgccggcgccaccctgctggtcttcgccctggtccagggccccgagtcgggctgggatgcgccctcggtacgtttcggactttacctttccgtcccgctgctactggcgttcctcgccatcgaacactacagccgcgacccgctgatgccgctgcgcctgctgggcaaccgcaacctgcaggtggcgatgctgctgaccgcgatcttcatgagcagctacggcgtgcagtactacttcctggccatctacttccagtcggtgtacggctacagcgtgttgcagaccggcctggcgttcctcccggcgactctgctctgcaccctcggtatccgcgtcgccgagcgcctgctggcccgccacggggcacgcgcgacgctggtcgccggcctgctgctgggcgcactcgggctcggcctgctggcagcgtgcctgccgctggggcgcggcttcctggcgctgctgccagccatcgtgatcctcagcatcggccagggcatgacnnnnnnnnnngcatcgaatgggtga

SEQ ID NO: 355434 - DNA, 291 bp, Pseudomonas aeruginosa
atgaccgccagtccctactacctacgccaaacccacgccccggactgcgcctgctctgtgtgctggtccgcaaggcaggccatcccattgcacaacccgtcgccgtgtccggactgccggccccctgggctgccctatctggaagatggccgctggctctgccgtccccgttccttctgcgcgaaacacgacccgtcccggcgtccgccgaagtactggcacgttgtgtacgacagcgggaaacctacgcccttcgtgcccgtgcgcgaagcattccaactggagggctga

SEQ ID NO: 355435 - DNA, 417 bp, Pseudomonas aeruginosa
atggctggcgggctcgacggcgaaggcttcgaggatgctcggcagtacgtcgatggactgcaccagcgcctcctccacccggccgcgggtggcgtccgcctcggggcgcggatcgcggatcagcaacggcacgcccaccgccgactcgaggaggaactccttctcgcccagaccgtggtcgccgaggaaatcgccatggtcactggtgaagacgatcagggtatcgtcccagcgcccgctggcgcgcatgtgctggaagagccggccgagctggtcgtcgacctggcggatcagccccatgtaggtaggtatcacctgccggcgcacgtcttcgcgggagaaattgaggctctcgcgatgttcgcggaaggcgcggtacaccgggtggtcgctttcttcgccgggcgccgcgcgtag

SEQ ID NO: 355436 - DNA, 933 bp, Pseudomonas aeruginosa
atgagcgaaaacatcccgcttctttccgtcgatctccccgccgaactgcgccagcgccagagcgaactggcgcagttgctgctcaagcactgtcccagcgacggtgtctacggcaccgccgtcgaccccctcgccctgattcgcgccgacggccccaccctgccggcgcgcggcatgcacaaacctgccctgtgcatcatcgcccagggccgcaaggaggtgcagttggccgaggaacgctatatctacgatccgctgcactacctggtggtctcggtcaccctgccgctggccggccaggtgatcgacgcctccccggacgcgccctacctctgcgtccggctggatatcgaccctgcggaaatcacccagctgatctccgacgccgggcccatggaagtggccagccggcgcggcgaccgtggcctctacgtcgaccgtatcgacgccagcctgctggatgcggtgctgcgcctgatccatctgctggacagcccgcgcgacatcccgatgctggcgccgctgatcctccgcgagattttctaccggctgctgcgcagcggccagggccagcgcctgcacgagatcgccatcgccgacagccaggcccaccgcatcacccgcgccatcgactggatcaaccagaactacggcaagccgctgcgcatcgagcaactggcccaggtggtcaacctcagcccctcgaccctgcaccaccgcttcaaggccgtgaccgcgatgagcccgttgcagtaccagaagcagctgcgcttgcaggaagcacgccggctgatcttcagcgagggcctggaagtggccgccgccggctaccgggtcggctacgaaagcccatcgcagttcagtcgcgagtacagccggctgttcggcgccccgccgctgcgcgacctggcgcgggcgcgcaacaccgcctag

SEQ ID NO: 355437 - DNA, 906 bp, Pseudomonas aeruginosa
gtgtgccgccagacgctccaccgtcgaccgttcgaacaggctggtcgcgtagatcagcgacgcgctcagcgcgtcaccgctttcataggtatccagggtcaggtcgaactgcgccgtcgcgctcgcccgctccaacgcctccacccgcagccccggcagctccagagccttgccctgacccgcgttctgatggttgtacatcacctggaacaatggactgtggctcaggctccgctgcggctgcaacgcctccaccagttgctcgaacggcaggtcctgatgggcctgcgcttccagtgcggtacgtttgacctgctgcaacaaggcgtcgaaacgggtctccaggtcgaagtcggccttcaacacctgggtgttgacgaagaagccgatcagacgctcggtctctacccgggtgcggttggcgatcggtaccccaacgcggatttccggctgcccgctgtagcgatgcaacaaggtctggaaactggccagcaacagcatgaacagggtcacgccctgctgctgcgccagctgtttcagcgagcgacccaggtcttcgcccagctccacctgcaggctgtcgccggcaggactctgtacgctcggccgcggccggtcggtcggcagttccagcaccggctgctcgccgcccagctgctgccgccagtaggccagttggcgctcacgctcgccggcttccatccagctgcgctgccacagggcatagtcggcgtactggatcggcaacggctccagttccacggcgcggccttcacggtagccggcgtagaactgcataagctcttccaccatgatcggcgtcgaccaaccatcggagacaatgtggtgcagggtcaccaccagcacctgttcttcggcggacaggcgcagcagcaggacccgtag

SEQ ID NO: 355438 - DNA, 228 bp, Pseudomonas aeruginosa
atgttcgaacagcgctgccagaggaagctccagacccaaccgacgacggatgcgggaaagcacctgagtcaccagcagggaatggccaccgagctcgaagaagttgtcgtcgcgaccgacccgctccaccttgagcacctcggcccagatttccgcgagactcctttccagcccttcgtgcggtgcgacgaaatgggactgatcctggctgtcctcgattggaggtaa

SEQ ID NO: 355439 - DNA, 666 bp, Pseudomonas aeruginosa; identical to SEQ ID NO: 325028

SEQ ID NO: 355440 - DNA, 369 bp, Pseudomonas aeruginosa
atgtacggcgacgacgggatgctctacatcgccggcaccagcacgccgttggtcaacgacatccaggtgcgcaacttcaccagcgccggcgagcgctcctggcaactgcgctacgactacgacttcgtcgccctgggcattcctgggctgaccgccatggcccgctacgccagcggcgcccatgcccggacgaaggcgatggacgacggccgcgcctgggaacgcgacgtggacgtcgcctacgtgatccagagcggcccgctgaagaacctcggcctgcgttggcgcaacgccatgctgcggtccaaccatgccgccgatgtcgacgagaaccgcctgatcctctcgtattccctgccgctgctctga

SEQ ID NO: 355441 - DNA, 1074 bp, Pseudomonas aeruginosa
atgctggccgctgcggtcggcctggcgggtcaccaggcgcgttaccaccagggcgcagacccagggaatcgcggtgatcaggccgacgttcaggccgacctggccgtcgaggaagctggcgatgcgggtcggcaggtagaacaccacgccgtacacgctcatctggatggtgaagtagaccaggcagaacttcagcacctggccgctgcgcagggcgctgaggaagccgtgcgggccgcgtgcctgtttgcgggtgtcttcttcggccagctcgccttccagcgcccgcttctgctcgtcgctcagccagccggcatcgcgcgggcggtcgaccaggtagaagtaggcggcaatgccgaccagcgaggccagcaggccctcggtgacgaacagccactgccagttggccaggccgaagatgccgtggaactccagcagccagccggacatcatcgccgccgagaccaggccccaggtgaccatgatcctgcacagccagaccctggcgccgaggcggtgcagcatcaggttgctgggcacctcgaagcaggcgtagccgatgaagaagatgcttgcgccgaacgcgaaggcggcatcgccgaggccggtgtcggcttgcaggaaggcccgcgcgtagccgacgttggcccggtcgatgaaagccagtacatacatcaggaccaggaaaggcaggagccgcaggcggctggtggcgatcgccgaggacagcagcctggcgtggtcgttcatggcgctcatggagggcttccttcttgttgttgttcgacgcggaggcggcatggccgcttgcgttgggccgactgtagccaggccgctcccgcgcggataatcacttctacgcattcatcgataaccccaggcaataccttttcacaaatcagccaatcgccggttatcgggcagcagcgagagcggccctgcgctcagagcagcggcagggaatacgagaggatcaggcggttctcgtcgacatcggcggcatggttggaccgcagcatggcgttgcgccaacgcaggccgaggttcttcagcgggccgctctggatcacgtag

SEQ ID NO: 355442 - DNA, 936 bp, Pseudomonas aeruginosa
gtgatcggcaccggtgccagcgccatccagttcgtcccgcggatcgccccgcaggtgcagcgcctgtcgctgttccagcgcagcgcgccctacgtgatcgccaagccggaccgcgcctacgccgactgggaacgccgcctgaaggcgcgctggccgtggctgcaacgcctggaccgggggctcaagtacctgcaccacgaatcgcggatgctcgccttcgcgaccttcccggcgctgatgaaggcgatgcggctgagcttccgtcgccacctgcaccggcagatcgccgatccgcaactgcgcgcgcggctggtccccgactacccactgggctgcaagcggatcctgatcagcaacgactattacccggcgctggccaggagcaatgtcgaactggtcgacacgggcatccgcgaagtcaccgaagacgccgtggtcggccgtgacggccgccggcacgaggtcgacgcgatcatcttcggcaccggcttcgccgccaccgaattcctcgccccgatgcgcatcctcggcctcgacggacgcgacctgcggcaggcctgggcggatggcgcggaagcctacaagggcatcagcgtcagcggcttccccaacctgttcatcctctacgggccgaacaccaacctcggccacaactccatcgtctacatgctggaaagccagttcccctacgtgctcggctgcctgcgccagctccaggcgcagggcctgcgctacctcgacgtgaagcccgaggtccagcggcgtttcaacctggaggtgcaacaggggttgcgccacaccgtctgggagcgtggctgcgacagctggtacaagaccgccgccggcaagaacaccaacaactggccgggctacaccttcgtctatcgctggcgtacgcgccggccggagcttgccgactatgacctggcccgctga

SEQ ID NO: 355443 - DNA, 987 bp, Pseudomonas aeruginosa
  misc_feature (149)..(158): n is a, c, g, or t
  misc_feature (879)..(888): n is a, c, g, or t
atgaagggtaatgcaccggtacttgcggccgtagatataagcaagggttttagagtctacagggctcctcatcaaaggatgttgcaggccatctggggtgagagaaagaagttttattcggagttctgggctctgcggaatgtgagttnnnnnnnnnngcgccctacgagtggacaggtggttcgcccagaaagggtagcggcattgttggaactgggggccggtttcaacatggagtacaccggcagggaaaacataatcttcaatgccatgcttcttggactgggcgagcaggagatttctgaacgcctagacgagataatccagtttgccgatatcggtgagttcatcgatcgtccggttagaacatattcgagcggtatgttcgtgcgtttggctttctccattgcggcatatgtcgatgccgatgtgctgatcgtggacgaggccctggcggtaggtgacgccgcgtttcagttcaaatgcctgaaccggcttgaagaactgctgctgaaaggcatcaccatcctgctggtctcccacgatatacagttgatcaagagttattgtagtcgagcgatctatctgtccaaaggtagagtgatattcgatggcgactgtgaaacagccacggaactctatctgcgggacagtatagagacacagcgggcggaagtccgctcaggaagcctgatcgcttctggcgaacacgggaactcgggaattgcatatggaaatgggcagggcaggtttctatccatccgcatgggcgtacttgacgaagcccgggattacttcgattcgggcgaacgtgtctgggtcgaggtacttgtgcaacttgacctacccgtcccggagcacccaaagatcaccctgacnnnnnnnnnnacgtatcagcttcgactgcgacttgcaggccggcgaatacgccttgacgtttcgtctggagaactctttgtcggagtccgtttgcgaactcatggataa

SEQ ID NO: 355444 - DNA, 1314 bp, Pseudomonas aeruginosa
atgacccgagccctgcccctgctcctgcttgccctgtcccttcccgccgcggcgacggacagcgagtcgttcgcccgccgctacctggcctatgtccatgccgtcggccagcacagcgaacgactctggcccggctggcggatggccgacaaggccttcctctacagcgatggccgcagtacctgggtcgccgatgccgaaggccgcgcgcagcgcaccacggcggcgggcgacagcgacccggatctcgacctgagctatgcctttccgcgttaccggggccgtccggcggtgctgctgcagatcagcgccgcgcacctgcggagcaataccggcaatagcgagacgctggccgcctggccgggcctgcgcaagcccggtggctatcgcggcgacctggccacgctcgacccgcgcccgcgggaataccgctatgccctgttccagtcgctgctccaggccctgcgcacgcccgggcagcgcgacagctacctgagcgacgcccagggctggctgcgccgctggcgcgaagcggctcccgaggaaagccggctggcggcgcaggtcgatctcagcgaaggcaccgcgcgctacatcgagatggccgccgccgcgcgctaccgcaccgatttcgccgaggatccgcaacgctatcggcaggcgctgcgggagtacgccctggccttctacgatgccaacgagatcggcgtcggcgtcgacagcgaagcctacgagatcggcgcgctggccggagtgctgctggacctgcgcgacgacgacgcggactggaaggaagccgcgacggccggcacctggccgctggactacctgctgcgcgaccagcctccggcctggagcgaactccccgacgacgcgcgggcgcgcggcgagcgctaccggcgcgagatgggcgccacccgcgagcgcctggtcgagttgcaggaggccttcgccgacccacggcgaccgctgctggtgatcccgcaaccgcgacgcaccatcggcttcgccacggcggccagcgaggtgcgcgggggcttctacgtccttgccgacgggccgttccgccaggcctacctcggcgcgcgctggaatgtcggcgagctgaccctggacggcgtcgactacctggagggcgacgccgaggcgtactgcccgggctacggccgttcggcgctgattccgttgcgcggaggcgattggcgcgaaggcacgctggcgccggaagaacccggcctgcgcggccgcctggcgactgctcgcagcctcgtcgacgggcggaccctttattgcgcggcggagaatgctccttga

SEQ ID NO: 355445 - DNA, 225 bp, Pseudomonas aeruginosa
atgcagcagtggcgtggcgtcggcgaaatccagggtctccagcgcgtcgatgcgccggtaggggaattcgcagccggcgatgcgcatgccgcggcgcatttccgcttcgtcggcgatcagcacgatgtgcgccttctcgcgcacctcggtgtcggccagcaggcgggcgatcagttccgggccgatgccggccggatcgcccaggaccatggccagtcgcggtag

SEQ ID NO: 355446 - DNA, 162 bp, Pseudomonas aeruginosa
atgggcgtgccgccgaagatcgccggcgacctggtgacgctgaccgacccctgggaaatcgaacgccgcctgacccaagcgctgcgccgtgccttggaagatgccgaccgcctcctgcagctcgatgccgagatcgaacaagggggcaaggagccgaactga

SEQ ID NO: 355447 - DNA, 429 bp, Pseudomonas aeruginosa
atgcgcctgcgccaggtggacgcttcgcaatacatcgagcgcatacgtgcgcgggactacgacatgatcgtttcgagcttctcccagtccaattcgccgggcaacgagcagtacagcttctggcattcctccagctacgccgatcccggcggctacaaccgcatcggcctgaaggacccggccatcgaccggctggtccaggcggtggtcgaggccgactcgcgggccgccctggaaaccgccgtgcgcgccctcgaccgggggctgcaatggggctactacctgatcccgacctggtattccgacgaggtctggatcgccagctggaatcgcttcggccgaccgccgcaggcgccgcgctacagcctggggctgaacacctggtgggaagtccgcgagcgggccgcgccgagccgggaggcgcagtga

SEQ ID NO: 355448 - DNA, 282 bp, Pseudomonas aeruginosa
atgccggcacccggtgcccgggtgctctggaacgcgcttttcaacaagccgagaagcaccgtcccgcggcagcctttacccgtgctcagcccgagtcgtgccgagctcgatgcgaccgtcgatggcagtctgttccgcctgggtcattcgaccttgctgctgaaactggccggtagctggtggttgaccgacccggtattttccgagcgcgcctcgccgttgccgttcgccgggatgcgccgccggtggcattggcggatctcccgccgatccgtggggtaa

SEQ ID NO: 355449 - DNA, 669 bp, Pseudomonas aeruginosa
gtggcattggcggatctcccgccgatccgtggggtaattctttcccacgatcactacgaccacctggacctggcgccgctcggcgtaggcgaccgcctgctggcctggggcgtaccgccaggcaaggtgcgccaactggactggtggcaaggtatcgaggctggcggtttgcgcctgactgccacgccggcacagcacttctcaggccgtgggctacatgatgggaaccgtacgctgtggtgttcctgggtgatcgaaagcgccgaactgaagctgttcttcagcggagacagcggttacttcgatggtttcgccgaaatcggccgccgctacggaccgttcgatctgaccatgctggaaaccggcgcctacaacgaacattggccgtacgtgcacatgcacccgcagcagaccctccaggctcaccgggatcttggcgggcgctggctgctgccgatccacaacggcaccttcgacctggccatgcatgcctggtacgagccgttcgaacggatactcgaactggccaccgaacacggcgtgcgggtttccacgccgatgatgggcgagcggatcgacctgcaagcaccgcatgccggccgacgctggtggcgcgaagtggtcgacagcgaaacgcaggtgcagggttacggctgttgcagaagctag

SEQ ID NO: 355450 - DNA, 267 bp, Pseudomonas aeruginosa
atgccggccagcgtgttgttgctggagtcgacggtgatcgccggcagcttcgccttgagaatgtcttcgttggaagacttggcggtgcgcgccatgaacacagcattgctgttcagcgccgtgagcgccgtctggaacgcgctgatcgcactcttgaactggcccagggcagtgagacgagtagtggtggtcttctccagggtggcgagctggttggtcttagccgcgccctccaggttcaccatcttgttcaccagatcggtgtaa

SEQ ID NO: 355451 - DNA, 654 bp, Pseudomonas aeruginosa
  misc_feature (528)..(537): n is a, c, g, or t
atgcgtatcgacggtcatcgtcaggtggtttctaacgcaacggcacagcccggaccgctactgcgccctgcggatatgcaggcacgggctctacaggacctgttcgatgcgcagggggtgggggttcccgtcgaacatgccttgcgcatgcaggcggtggccaggcagacgaataccgtctttggcattcgcccggttgaaagaatcgtcaccacgctgatcgaagagggtttcccgaccaagggcttcttggtgaaggggaaaagctcgaactggggtccgcaggcggggttcatctgtgtcgaccagcatctcagcaagcgggaaaaccgcgacacggcggaaatacgcaagctgaacctggctgtggcgaagggaatggatggcggagcctatacccagaccgacctgcgcatctctcagcaacgccttgcggagctggtgcggaatttcggcctggtggcagacggtgtcgggccggttcgcctcctgaccgcgcagggccccagcggcaaacgctatgagttnnnnnnnnnngttcgaggcccgccaggagccggacggtctctacaggatcagccgcctggggcggtcggaagcggtgcaggtactggccagcccggcttgcgggctggcgatgaccgccgattatga

SEQ ID NO: 355452 - DNA, 729 bp, Pseudomonas aeruginosa
ttgcgcggcctgcgccaactggccagcgagggctacgtgccgcgcaaccgcctgctcgacagcgagcgcctgctggcccaggtcaacggcgagatcgccggcgacctcggcagcctcggcagtacccgccggcagatcctcgaactgcgcctgcgcatggcccagcggcgggagaagttccaggaagaggtgcgcgccagcctggccgacgcccaggtgcgcgccgaggagttgcgcaatcgcctggccagcgcgcgcttcgacctggccaacagcgaggtacgggcgccggtcgccggcctggtggtcggccaggaagtgttcaccgagggcggcgtgatcgcgcccggccagcaactgatggaaatcctcccggagcgccagccgctgctggtggacgctcggctgccggtggagatggtcgacaaggtccgcgtcggcctgccggtggagctgatgttcagcgccttcaaccagagcactacgccgcgggtggagggcgaagtgaccctggtttcggccgaccgcctgctggacgagcgcagcgaggcgccgtactaccgggtgcgcatccgcgtaggggaggagggcgtacgtcgcctggccggcctggagatccgcccggggatgccggtggaggccttcgtccgcagcggcgagcgctcgctgctgaactacctgttcaagccgctggccgaccgtacccacctggcgctgggggaagaatga

SEQ ID NO: 355453 - DNA, 966 bp, Pseudomonas aeruginosa
atgcagcaccgccggaatgatccccgccgcgccgttggtcggcgcggtcaccacgcggccgccgctggcgttctcctcgttcaccgccagggcgtagaggttgacccagtcgagcacgctgagggcgtcgcgcaggccggcctccggccgctggcacaactggcggtggagcgccgccgcgcggcgcctgaccttcagtccgccgggcatgatgccctcgttgcggcagccggcctcgacgcaatcctgcatcacctgccagatacgcagcaggccggcgcgggtttcctcggcggggcgccaggccttctcgttctcggccatcaactggctgatcgacaggccttcgcgggcgcaatggtcgagcagttgccgcgcggtcttgaaggggaacgccagcggcgtgcggtcctcgacgatgcggtcgaggccggcggcctcgtcgtcgaccacgaaaccgccgcccaccgagtagtactcgcggctgcggacctgcaggccggcggcgtcgaaggcacggaagatcatgccgttgggatggtaggccagcggcttgcggatcagcgccaggtgttccttctcgacgaagcggatcggccgctcgccgagcaggcgcagctcgccgctggaacggatggcatcgagccgggcgggaatcgcggcggtatccaccgtgtccggctgctcgccctccaggccgagcagtaccgccttgtcgctgccgtggcccttgccggtggcgccgagcgagccgtacagctcgaccttgacgctggcagtggcctccagcaacccctcgcgcctcagcccctcggcgaagcgcgcggcggcacgcatcggccccacggtgtgggagctggacggcccgatgccgatcttgaacagatcgaagacactcagggacatgctcgtctccgcttgcggattggccgccaccacggcggcgttcctgttcaatcagcgtag

SEQ ID NO: 355454 - DNA, 123 bp, Pseudomonas aeruginosa
gtgaagcccgacaagctgccggccgagagcgcctacctcggcttcaaccagtacgacacctatgcctcgcagatcagcttcaacggcgccttctactacctcggcgcggcctacaccttctaa

SEQ ID NO: 355455 - DNA, 306 bp, Pseudomonas aeruginosa
  misc_feature (245)..(254): n is a, c, g, or t
atgaagccaaccatccgactcctgttcctgggactgctcctggctctatcccaaaaaagtctcgctttgacttgtctgaaaaacgcgaaggacgtatctgatcaaatctcgatggatacgaccatcgcggtacccattgcgcttcccaaggacaccattctctggcgctcccccaactacagcgtcaatataagttgctgggcgaaccagttctggaacgacgaagaggagatctttttctaccnnnnnnnnnngggacatacggtgcacgcaagtcgatcgctgccgaatcaagcttccctataa

SEQ ID NO: 355456 - DNA, 513 bp, Pseudomonas aeruginosa
atggctggccacgataactacgtgattttccagttggatggtattaaaggccctatcgccgacaactttcgcatggtgctcaatggcctgaaccaactgcgctatatcgcatgctcgtcgaccctgagcatttcacccgagacactcgacttcggcctacttcaagcgtatcaagccaccgccaaccagaccatcaaggaaaaacccttccagatcactgcaagcaagaactgcaatagcgcctatggcctgggagcacttctgagacccgtgaattcttccagcaccgtaggcgacacgttggtgccgggagacaacaagtccgtaggcatcaccgtgctcaggcaagaagaccgtagcatcgtccccttcaacgaagagttccaactagtggaacacagcaaagaccaggtcgtggtgaagaacttcttggcccaactgaaatggatgaccgacatgcctacgccgggtcgattcaatgccaccgctgcgatagatatctactacaagtga

SEQ ID NO: 355457 - DNA, 990 bp, Pseudomonas aeruginosa
atgatgacaacctttcgttgtcacctcggtaagcccgtgaaactccaccagttgcaagccctggtcgccagtgccgacgccggcggcatccgcgccgccgcccgcgtcctggggatttcccaggcggccgtgacccgcgcgctgcgcgaactggaaaccgaacagcatctgccgctgttcgtccgcacgcccagcggcctgaccttcaccgaatacggcaaggcgctgctgatccacgcccggctggtgctcaagcaactggagcacgcgcaggtcgaactcgaccacctgcgtggccaggccagcggccggctgtgcatcggggtgacgccttgggtggcgctgaccttcctctcggaggcggtgcaggcgttccgcgagcgcatgccggaggtgcgcctggagcttttcgaaagcctgatggcggtggcccagccattgcttcgcgacggcagcatggatttcgccatcggcccgctgcacggcgcccaggcggcccaggagttcgcctgcgagaagctgctcgactacgacaccgcggtgctggtccgccaggggcatccgctggcgggttgcggctcgatccacgagctgctggaacaggactgggcgttgaactacaccggcgacggccacgacgccctgatgcgcgagttgttctggcgccacggcgccttgatcgacgagcggcgcatcgtccgcgcgcactccgtggcgatcctgcagaccctggtggagcaggccgacatgtgcacctgggtgccggcgatcataggcgccgccccgccgttgctcggccgggtggtgccgctggtgctgcgggaaaccttcgagccacgacggctgggcatcatcacccggcgcggcggagccctcagcaatccggcgcaatgcttcgtcgagtgcctgctgcaggtgatccgccgccacgcccgctcggcgaagaaggatgaccggcgcctgttcgaaaccctgcgcctgctagtctga

SEQ ID NO: 355458 - DNA, 405 bp, Pseudomonas aeruginosa
atgatcttcattaccttcaccggcgcgctgttcccgatcctgctcaataccgtgcatggcgtggaggcgctcgatccgcgcctgctggcttcggcgcgcagcctgggggcggggcgccgggcgctgctgcgcgaggtgctgctgcccggcgccggaccgggcatcttcaccggcctggcgatcggcatgggcacctcctggttctgcctggtgaccgccgagatgatctccgggcaatggggactgggttactacacctgggcttcctacaacatccagaactacgacgaggtggtggtcggcatgctgctcatcggcctcttcggcatgggcagcagtgggttggtgaagcgcgtcggcgcgtcgctgacgccctggtacgcggcgggaggcaaggtccgatga

SEQ ID NO: 355459 - DNA, 759 bp, Pseudomonas aeruginosa
atgatccgtcccggacgggggctcatcaccagcaccctgtccgccaggtacagggcctcgtcgatgtcgtgggtgacgaacagcaccgtggtgcggacccgcgcccatacgtccagcagcaaggtctgcatcttcagccgggtctgcgcgtcgagggcgccgaagggctcgtccatcagcagcaggcgcggccggttgaccagcacccgggcgatctccacgcgctgctgcatacccccggacagttggccgggccagcgcccggagaagtccgccaaccccaccagtccgagcatctccatggcgcgccggttgcgctcggcgcgggccaggccctgcatcttcaggccgaaggcgacgttgtcgcggacccgccgccaggggaacagggtgtgctgctggaataccatgccacgctgcggcgaaggtccttccacgctccggccgtcgaccctcacgctgccggcgcttggcctcaggtggccggccagggcgccgagcagggtcgacttgccgcatcccgaaggcccgagcaggcagacgaactcgcccggccgcgcctccaggttcagatcgcggaccgcctcgaaggcttcgctcccctgccccaggcggatgctcaggtcgcggatctggatgcgccccaggctgttgccggccgtcgtcatcggaccttgcctcccgccgcgtaccagggcgtcagcgacgcgccgacgcgcttcaccaacccactgctgcccatgccgaagaggccgatga

SEQ ID NO: 355460 - DNA, 324 bp, Pseudomonas aeruginosa
  misc_feature (236)..(245): n is a, c, g, or t
atgaaacatcgtggatggagtgccgtgcgaggcggtcgcaagggggcgcaactggccctggggctgggcctggtcctgctgggaacggccgcgctaccgctgcatgcgcaagacggggcggactcggcgagccagcagcagaccgcgctgcgccgggtccggctggacatcccggcacaaccgctgaaccgcgccctgctgcgattcgccgagcaggccggggtccaggtgttctnnnnnnnnnngtgttcttcgacagccagcgtttcgccggtctcggcagcgcggcggtgcacggcgaatacgtgctggccgacggcctga

SEQ ID NO: 355461 - DNA, 921 bp, Pseudomonas aeruginosa
  misc_feature (447)..(456): n is a, c, g, or t
  misc_feature (791)..(800): n is a, c, g, or t
gtggtggtgattctcggcatgcatcgctccggtacgagcgtactttccgccggactcgaggcgctcggggtcgagtttggcgagaatctgatcccacccaggccggacaaccccaagggatactgggaagatgcccgcctggtggctttcaatgacagagtcctgtccctgtgcgggttttcgtcgggcgacgtcgggttgtccagtcgccgggtgttgggcgtcgagcgattcgaagagatcgtccagcaggccatggcgcttttgactgagctactggcaggcaaggcgctgctgggtatcaaggatccgcgtatgccgcgtctgatgccgatctggcaagccgcgttcgatgcattggggctatgggtcgactatgtcattgcggctcgccatcctcttagcgtcgcggagtctcttgctgcccgtgaccacttgagtcgggannnnnnnnnntgcgcccgcttcgtcggtgatgtcctggatgtcgaattgcgtcactcatcccatgatgcgagcgcgttggctgccgcagcgggaagctttcaggcgctgctcgaggtgcacgaggcactgcagcagcttgccgtggaccggttcgacatcgaagggtggaagggcctggagcgggaattcagcagagcgatgccgttgctggagtacgtgggggaactggacaggcaactctggcaatcggcttcgtcccacaacgagagcatgacgcggttcagcgagcaggtggctgacctggccatgagctgtaccgcacagaggcaactgaatgatggacnnnnnnnnnngaacagaacgaacgagccatgcgggaactttctcggcgattgtcggcgtgtcgcgaagagcttgcttccgctcagcgcaatctcgccgaaacggacaacttgctacggcgcacgcaggtag

SEQ ID NO: 355462 - DNA, 618 bp, Pseudomonas aeruginosa
gtgccgggcaacggtggtggcctttacggctatctagagcgcgcccgccagtatgccaaccgctggatgctgctgttcgaccaccgctacttccgctggagcgacagcaatgaaggctatttcaatgagcagagctacagcggtcatttcggtatctccgcccacaacatcgccatcaccaaccacgaagtagcggcctggcttgccggacagccgctaccccaccgcctcagcgatgcccagcagaaccatgcgcggcttgcgaccatagttgcccttaaggacgtttcgccgccttcggctggctgttccgcccatgtgagatggaatcccacagcgaccaacccgctgaaccggatacgtcctccggcaatcggcctggctcatgagctgctgcatgcctactacagttgccgaggcgcacaacccggctacgacgacaaccactactccacggtactgttcgaataccgctgcgtcggcctcggcccctgggacgaagcaccattgtcggaaaatgccctacgcaaggaatggtggagctatgcctgccagcaggtgcccggaagcgacccagagaacaggaaggccatcggcaaacgcatcagttacatgtag

SEQ ID NO: 355463 - DNA, 612 bp, Pseudomonas aeruginosa
atgacgcaaatccaggctgcgctggcaggcctcgatcacctcctccagttcttccgtagcatccagcgtacgttcccacaacaactcttcgctcgcctcctgtggcaggaactccgcctgccagcccctttcgccaggcatgtaacgcaagcgcagggcatcatgctgttcgaccagcgccgccagggccccctgcagcgcctgagggtcgagcgcctcgctgggttccagcagcaaagactggttccagtgatggcgctcggggacatcctcctcgaagaaacgttgctggatcggcatcagtggcatcgagccgagaacaggcccctgatcgacaagctgccccgtatcgaaccgcacagcccctgccagtccctgtatcgtctggtactggaacagatccttgggagtaaagcggattcccgcctggcgagcccggctaaccagttgcagcgagatgatcgaatccccgccgagctcgaagaagttgtcggccatcccgacccgctccagcttcagcacatccgcccagatcgctgccaatgtgcgctccagctccgtcaccggcgccacatactgttgttggctgtcactggcgtccggcgccggtag

SEQ ID NO: 355464 - DNA, 921 bp, Pseudomonas aeruginosa
atggtcgccggcaagctcgacttcggcgccatggccgactttcccggcaccttcaacggcgtggccttcgccgccgccggcaagcgcagcctgttcatcagcgtgctgtccggcagcacccgtggcagcggcaacggcatcgtggtaccgagcggctcgccggtgcagtcgctggccgaactgaaaggccagaccatctccgtaccgttcgcctccaccgcccatggcatgctgctgcgcgcggtggcggcgcaaggctgggacccgcagcgcgacgtgaccatcatcgcccagccgccggaaatcgccggttcggccttgcaggcgaacaagattgccgcccatgccgacttcgtacccttcgccgagctgttccccaatcgcggcttcgcccgcaagatctacgacggttcccaggccaacgcgccgaccttccatggcgcgctggtggtgaagaaggccgaccgtgggctggacgtcgagcgtttcgtcgacgaccgctacatccgcgaggcctaccgtcaggccgggctggactaccaggcggcgctggcagactacgcaccgtcgccgctgcgcgccagcgacgcgcgcagcggccggccgatcgaggagttcgaacgggtagcgcagatctgggtgaagggcgaggccagggtgcgccattacgcttcgccggagtcggccctggccgatcttgccgagctgaaggcgcagggcaaggcgattcgtgcgatctacgcccaggatcgtgacagcgggatcaagctgctggccaaccaggcgtggttcgtccgcgacggcgagggtcgcctcaacgccttcctgctccgcgagcaggcccaggactatgcccgccgccatggcggcgaggtacgcgactttgccgccgccagccagcaggcgctggcgctccgctga

SEQ ID NO: 355465 - DNA, 729 bp, Pseudomonas aeruginosa
atggggggataccaatgcttccccctctacctctacgacgaagccccccaccccgcagagaacgatctcttttccaagtcaactgaaggtggcttgcgcagccgcaatgcaattactgacaccggccttgctcatttccaagcagcctaccctggcgagcagatcagcaaagaagacctgttctactacgtctacggtatcctccattccccggactaccgcgagcgctttgccgacaatctgagcaaggagctgccgcgtatcccggcagtgaagaacgccgtcgacttctgggcgttcagcaaggctggccgtgccctggccgagcttcacctgaactacgaaaccgtcgagccctacccgctgaccatcgaggccaagagcacgctcaccgacgcagattaccgcgtggagaagatgaagttcgccaagaagggcgacaagagcgccgtcatctacaaccaccgcatcaccctcaagggcatccctgaggcggcatgggactatgtggtcaacggcaaggccgcgttggactgggtgatggagcgccaagccgtgcgcaccgacaaagccagcggcatcgtcaacgacgccaacgactgggccgtggaaaccatgggcaaccccaagtaccctctggagctgttccagcgcgtggtcactgttagcctggaaacccagagaatcgtcaaggcgctgcccaagctcgatatcgctacagataactag

SEQ ID NO: 355466 - DNA, 1032 bp, Pseudomonas aeruginosa
atgggcaccggggcgctgccgatcttcgaatcggagatcaccgtggacaactcggtgaccgacgacgccgccggcggctgggccgggcgcgccgggacgatcaactacgagaccggcgaattcagcctgaaggtggccggcaactacgtgttcaaggagtacacctactacaccgacacggtcgacaacttcggcatgaagaagctgcgcctggtggccaccgataccacgttgctggaggggttcggcggcacgctgagcgtgcgcgcgcagagccgcggcgtcgagtacggcgagcagaccgattcgcagaccgtcgctccggtgaccctggacctgttgcctggtgtggccgagccgatcctgccgggctcgctggtgttcacctgggccggcgaggtctacgtcgaccgctccggtgtgctctacaagaacatcaacagcagcaccaacgccggcatcgccgtcggctcggtggactacgccggccgtaccgcgacgctgaatacctatggctcgggggcggcgccgacggtcacgctgctggcctgcctgaccaccaacgccggcttcagcgtcaccagcatgaccttccgcacgccgggggcgccgctgcgttctgcgagcctgcaggtgacggcggttcgcctggataccgcgcagatcgtgaccaccacggcggacgcgaacggtaagctcaatggcgcggtgatcaagggtagcgtcgatatcgtgaccggcatcgtccggctgcgcttcaccagcaatctggaggacaccactggggccagcgatatcccggtgattccgctgctgctgcgctacaacgcggtcgtcttcacctcgctgccgctggacgccaccctgctgggcctggacccggtgcgactgccggcggacgggcgggtgccagtgttccgcgagggtgacgtgatggtggttgcccataccgccgagaccacggtgccgagatcaaggtggtggacgccaacgcggtggaactggcctcggcgggctacagcgtcgacctag

SEQ ID NO: 355467 - DNA, 399 bp, Pseudomonas aeruginosa
  misc_feature (328)..(337): n is a, c, g, or t
atgtccgaaaggccgaacggtgattcccccactctccgccagctcattgagtctttcatccaggagcgcctccagggcaagctggacaagctcaagcccgacgaggacgttaagcgccagtcgctgctggccggccatcggcgggaagcctggctggccgatgccgcccggcgggtcggccagttgcaactggtgacccatacgctcaagccgatccatcccgatgcccgcggcagcaacctgcacagcctgccgcaagcacccgggcaaccgggcctcgccggttcccatgagctaggtgacaagctggtcagcgatgtggtgggcnnnnnnnnnntgccgcggcgctggacgtattcaagtttctcagtctccagtatcagggtaaaaatcttctga

SEQ ID NO: 355468 - DNA, 396 bp, Pseudomonas aeruginosa
gtgcgcgagcagacgtcgtgccaggcctccgcccagcgcctcaccaccacagagcgccttgcggccacgcaggacctcggcgcgctccggagcgccgtccagcagcatcctccaagtcgccggcgtcgcctggatgatgctgacctcagcctcttcgatgagggccagcagcgcctgcggatccttgctctgctgagccttaggcatgacgatacaggcaccgcgggtcaggcccaggtctgtctcttatacacatctgacgctgccgacgatactcgcagcagccggtcggaagaggtgcaccccggctcccgcgccatgctggcgaggaagttgagcagcgaacgatgttcgatctggacacctttcggcctgccggtcgagcctgacgtgtag

SEQ ID NO: 355469 - DNA, 756 bp, Pseudomonas aeruginosa
gtgggccgaaacctgaggaagtcaaaggggcgtaacccgtccgggaccttcgctgccttgccgcacgcggtaatggatagcgaagacttccggacgctttctggtggcgcgctgaaggtactgctgggattgcttcggcagtaccgaggcatgaacaacggtgacctcagcgcctcattcactcaagccaagcaatggggtgtgaacagccgtaccaccctcgccaaggctctggatgagcttcaggagcacgatctgatcattcgtactcgagaaggcaagttcataagggaagatcgagatttcgcccaccaccacgcctccccggaaattcagtctcgaaagaacaaaacacccagtccagaaaatggacgcactgcgtccaaaaaatggactcatggaggttgcctaggccatgaaaaacactctcatcggtccagaaaatggacgcatggaagcagttcacttagtccattttctggactccttcttagatataccaggcgcagcctgggatttagatcttctgatttacctctcctcctgctcaaaaatgccctcaagagtgcgcgcagccccacgtcgcaaaatttccaaccttggattttcgttcggtctagcagtgtgccgacttcagccccggccccacctgggccagtgtggcaatttggtctcagtgaggcgtttccaccacgcacaatcacgcttagtcacgaaacgtgtacctctggtgggaggctcttatcgcattggtag

SEQ ID NO: 355470 - DNA, 228 bp, Pseudomonas aeruginosa
ttgcagcgtcgccacgggctgagctacctgttcatcagccacgacctggccgtggtacgcgccctggcccacgacatcctggtgctcaaggacggccgggtggtggagcagggcagcgccgctgcgctgttcagccagccgcgccacccctatacccgcgagttgctcggagcgatacccgcgctgcgcctggaagagcatctgcgggtggccgggctgggaatctga

SEQ ID NO: 355471 - DNA, 132 bp, Pseudomonas aeruginosa; identical to SEQ ID NO: 355328

SEQ ID NO: 355472 - DNA, 792 bp, Pseudomonas aeruginosa
gtgttcatcgccgcactggcgagcgtcgaacgcaagcggctgttcgtcgcctgcctgctgctgttcgccgcggccaatgcgctggccggcccctcgcgcgaaggacgcgccgtggcgctggtgttcttcgacatcgtcgccgccaccgtgctcggcattcccatcggcacgctgatcgccgacgcctggggttggcgcctggcattcgccgcactcgccgcgctggccctggccaaggcgctgctgctggccgcccggctgccgcgcattcccggacggccgggcatctcgctgcgcagccaggcgagcgtgttgcgccaaccgctggtgctcggccacctgttgctgtcgctgctggtcttcaccggcatgttcacccgctacacctacctggccgacatcctccagcgcctggccggcttcagcggttcgctggtcggctggacgctgatgggcttcggcgcggtaggcctgctcggcaactggctcggagggcgcctggtggatcgcagcccgctgggcgcaaccctgctgttcgtcctgctgatggcgctgggcatgctcgccctggtgccgcccctcggcaacgcctggctgctcgccgccgccctggcgacctggggcgtggcccaggcagcactgttcatcgtcggccaggtgcgggtgatgaagtccgcgccacgggccccggcgttcgccgcctcgctgaacatctccgcctgcaacgccgggatcggcatcggcgccctcgccggcagcctggtgatcgacttcctcagccgcgttcgctga

SEQ ID NO: 355473 - DNA, 252 bp, Pseudomonas aeruginosa
atgtcaggcgttgtcgctgtgcaggtgtgtaccgcgtggacctcgactcccgagggcttcatggcgtgtcgcgaactcgcatggcaacaggcctacctgattccgccagaggccgctggatacgtggacatcctggtcaacggtggtttctccccggaagccttcggcatcggtgccgctggcgtcctgggatcgttcgtgacggggcttttgattggctgggtcgcgtcacttcttcgtaaagccaagtag

SEQ ID NO: 355474 - DNA, 336 bp, Pseudomonas aeruginosa
gtgtgtgcgcaataccgcaggcgagtcagagctctggtagaactgctgcaagtcttccagcagaatccgccaggacacaccgtccacgaccaggtgatgaatcaccagcaagagccgctgctcaccttcgggaagctcgaccagaagagcgcgcagcagaggaccggtgctcagatcgaggctacgctgggcttcctcgcacaacgcggagagttcttcgaccgaagcgacctggcgccgccagagcgggctttcaacctcaccggaatattcctgccgccagcacccttcttcctcatggaagcgcaggcgcaaggcatcatgctggcgaattag

SEQ ID NO: 355475 - DNA, 753 bp, Pseudomonas aeruginosa
  misc_feature (684)..(693): n is a, c, g, or t
ttggcgaccaccaccgatgtaacgccttacgagcgtctgccacagatcactttcgatggtttcttgccttacgaacctggcggtgtgaagttcaactacagcaccgagttcgtccgcttcgaccgggatttggacgataatatttacctgaacgacgacggcagcgagtggggccgtcgcccggacgcctatctacaaggcctggcgcgctccaccggcgaccgtgtacatctcgaacccggcatgagcctaccgatgacccgcagctggggttacctgacgccgaccctgaagtatctgtacaccaaatacgatttggatttggatagccaagggaagcgtaccctcactacctatgaccaaactttcgacagcagccaggaccgctctctacccttggtcaaggtcgacagcgggttgtactttgatcgcgacactacctttgctggtacgcaattccggcaaaccctggagccaagggcgatgtacctctacgttccgtacaaggatcaggagaacatcccagtattcgacaccagcgaaccctccttcagctatgactccctatggagggaaaaccgcttctccggtcgtgaccgtatcggtgatgccaatcaactctctcttggtgtaaccacccgtttcatcgaatccaatggattcgaacgtgcaagtttgagtgcnnnnnnnnnnattacttccgcgaccgtcgtgttcagcttccaggtctatctgaaaaagatctggcgctga

SEQ ID NO: 355476 - DNA, 1017 bp, Pseudomonas aeruginosa
atggccatcgtcctttccccgctgcaccgccgccgcctcgccgcgttccgcgccaaccgccgcgggcgcctggcgctgcggctgttcctcgcgctgttcgtcacctgcctgttcgccgagctgatcgccaacgaccgcccgctgctgctggaataccgtggccagtggttcctgccggtgctgcgggactatccggaaaccgccttcggcggcgagctgccgttcccgccggactaccgcggccgcttcatgagcgaacgcatcgccctcgacggctgggcgctgtggccgccgatccgcttcgacgcgcgcagcatcaactacgcgcgcccggcgccggcgccgccctcggcggagaactggctgggtaccgacgaccagggccgcgacgtgctcgcgcgggtgatctacggcttgcgcctgtcgattctcttcgccctcggcctgaccctggcctcgtcgttgctgggaatctgcgcaggcgcggtgcagggctactacggcggctggatcgacctgttcggccagcgcttcatcgaggtctggtcgggtctgccgatgctttacctgctgatcatcctcgccagcctggtgcagcccggggtcggctggctgctggcgatcatgctgctgttctcctggaccagcctggtcgacgtggttcgcgccgagttcctgcgcggtcgtcacctggagtacgtcaaggcggcgcggaccctcggcctcggcgacgccggggtgatgttccggcacatcctgcccaacgccatggtcgcgaccctgaccttcctgccgttcctgctctgtggcgcggtgaccaccctgaccgccctggacttcctcggtttcggcctgccgcccggctcgccgagccttggcgaactggtcgggcagggccgcgacaacctccaggcgccctggctcgggctgaccgtgttcgtggtcctggcgaccttgctcagcctgctggtgttcatcggcgaagcggtgcgcgacgccttcgatccgaggacatga

SEQ ID NO: 355477 - DNA, 447 bp, Pseudomonas aeruginosa
atgaccatcacgccgaaacgcgcacagcacatcgccttcaccgaccgcgtctccaacgcgccgagccgcctggtggtacgccgtggctcggcgctcctgcccgacgccgagagcctgcgcggcaagcgcgtgggggtcggccagggctccaaccaggaggcctacgccaaggccgaatgggccgccaagggggtgcgggtcgtctcctaccagaaccaggaccaggtctacgccgacctcgtcatgggccgcctcgacgcctcgctgcaaggcgcggtgcaggccagctacggcttcctcggggtcggcgacggcatcggcctgcgcaaggaggacgtggcgctgcgcgaggacctgaacaaggcgctggcgacgatccgcgccaacggaacctacgcgcgaatcaacgcccgctacttcgacttcgacctctacggcacgccctga

SEQ ID NO: 355478 - DNA, 225 bp, Pseudomonas aeruginosa
atgaagatcaccccgccgtacagcgcggtgaggaagatcgcccgcgggatcaccctgccggcgtcgcgggtttcctcggacagcgtagtcaccgcgtcgaaaccgaggaaggaaaagcagaggatcgtcgcccccgccaccatcgccgagagatgcgcgtgctcggagaagaacggctgggtactgagcaccgtggcggtcccctccccgttgttcaggccgtga

SEQ ID NO: 355479 - DNA, 810 bp, Pseudomonas aeruginosa
gtgatcggcctgttcggcatcggcgagatcctctgcacggtggaggaaggcctggtgtttcgcggcgagcgcgcacgcatcacgccgatggtgatcctgcgtacctgggccaggctgccgcgctactggctgacctggctgcgcagcgcgctggtcggctgctggatgggcgtcactccgggcggccccaccgccgcctcgttcatgagctacagcctggcgcggcgcttctcgaagaaccgcgagaacttcggcaagggcgaggtggaaggcgtgatcgctccggagacagccgaccatagcgccggcaccagcgccctgctgccgatgctgacgctcggcatccccggctcggcgaccgccgcggtgatgctcggtggcctgatgatctgggggctgcatcccgggccgacgctgttcgtcgaacagcacgacttcgtctggggcctgatcgccagcatgtacctgggcaacgtggtcagcctgatcgtggtactggcgaccgtgccgctgttcgcctcgatcctgcggattccgttcgccatcgtcgcaccgatcatcgtcatggtctgcgccatcggggcctactcggtgcacaacgccatgctcgacgtggtcctgatgctgctgttcggcgcgctcggctacctgttcaagaaactcggctaccccatcgccagcctgcgtctggcggcggggtggatttcttgtcaccctgggtctccccgccgccagcgagatacgccatgtcccggattcccgacgccagcatcatccacagccgcctgcgcctgcgccagttgcgcctga

SEQ ID NO: 355480 - DNA, 399 bp, Pseudomonas aeruginosa
ttgctcgagtcgcgcggggcgcagcccctgctggagcacatcgaggtcgaggacacaccgaccaggcccggcgatgtcgcggcggaccagggcttgctgcggaagctttccgcggtggaggggcgcgagcgcttccagttggtcgatgactatgtctgggggcagtacgccaacctgctgggtgtgaaggtcgagcaggtccgggccaagctcgaggacggaggcagtctcatggactacggactcgattctctgttggtgatggagatggtggcgcgttgccggcgcgacctgaaggtgcagataaaggcccgggaattcctcgagtgccccggcctgatgtggccggatttcctcgccaggtccatcgaacaacaaggagtgctcgacgccgtatag

SEQ ID NO: 355481 - DNA, 771 bp, Pseudomonas aeruginosa
atgagtttcgatccctttggtgacttcgaaacgactggctacctgcgcaacagcttgggtctgaaagatccggcggaagtgaaggaaaatgaacacttctccttcgaaatggggctcgatgaagccctttcctatctcgaacgcacaaagaacctgaactaccaggcccttttgcaggtacacaggttgttgttcgagaaattctacccctgggccgggcgtgaccgtctcgagctggtccctcatctttctgtctggaaaggtcccaagggcgctcccagacgtaccttcttcgaaagtcccgcgatgatcgaacgcgcggtggactatgccctgagcctggcgagcaagaagcagggattcatgcagaagcccggtgaggtcatgggacttctttgctttgcgcatccctttctagacggcaacggacgctcgattctgctgttctacatggagctcagttatcgagccggctttgccatcgactgggccagcacacgcaaggacgactatctccaggccctggacgatgagattcacaatcctggcaagggtcacctggaccgctaccttgtcccattcgttgtgcctatccacagccgtgatcagtggcctgagatcatcgggcaaatcaacggactcgatggtatggatggtgagaacattacctacgaaaacctcgatgatcccgaggttcagaaagtctatgcggcgtatcacgccgagcatccctacccagccaaagatggcacacccgactccgaaccctaa

SEQ ID NO: 355482 - DNA, 744 bp, Pseudomonas aeruginosa
atggcgcggctcgctgcgggccaggctggcgagcaggcagcaggcgaagaccaggatgcgtccggtcgaggtgaactgtgcgtagtcccaggtcaggctggcgttgagtttgctgcgccagtcgtgggagtcgaggctgtcgcgctggttctcgctggggtagtcgtcggactgcttgtagtcgtgggacaacaccagggtgtagccgagggtcgaggagaaggcgccgtagtcgccggcgccccagcggatgttgctgcgcaggtcgatgccgctggtgcgctccttggccgcgttgatggcattgacgtagaccttgttcaggcgattcgggtcgacgctggcgtcgccggcgttgcgctcgacccgcgccagggtgtcgcggcactgcgccgagtccggatcgagcccgccgctacggcaggccgcctcgtcgcgcagcagtttgtccggatcgagggtggtcagcaggtcatcgatctggatgtggtagtagtcggcggaaaagtcgaacctgctcgacggcgaccagacgaagccgtagctccagtagcgcccgcgctcggacttcaggtcgggcgtgccgctctgcacgtagtcgacccggccgttcttgcaggcgccgtcgacgcctttctcgcaaccgtagtagtccttctgcgccgggtagtagccgttggcgtcggcctggtagatgtagttcaggtccggcgcgcggaagctggtgccgtagctgccgcgtag

SEQ ID NO: 355483 - DNA, 594 bp, Pseudomonas aeruginosa
atgggccaccagttcgtcgagtatcctgcggccgcccgtgtggaatatgaaaaagtcgcaacgggcgcatacctggtcgaaatgctcgcggctgagccgctccatctccggcgccaccgccgagatcgccttcattaccgccttgtccaggcgaaaatgaaaaccggtatcgagtacctcgtagcgaatgtagtgctcgctgtcaggcagaaagaaggagccggtggcttcgaccctgaatcccttcgccccatcgtcggcacgcagcacgcaggcggagacggcatcgccgaacagcgcgccggcaacgaaggattgcaattgggcatcctgcggctggtagcacaacgaggaaaactccagggacaccagcagcacatgacggtccggtccctgcctggagaaatcgtaagcgcgggcaatggcggctgctccggccacacaccccaactgagcgatgggcaactggacggtggagcccggcaagcccaggtcattgatcaggtgagcggtcagcgacggcatcatgaaaccggtacaggaggtcacgacgaccatgcggatatcctgcgggcgcaggccggcgttacgtaa

SEQ ID NO: 355484 - DNA, 156 bp, Pseudomonas aeruginosa
atggcgctgatgcccgccaccgagccgatgttgatcacccgcgccgggttctccgcgctggccgagcggcgcagcagcggcagcagttgctggatgcaggaaaacaccgaggtgacattgagctgcatgaccttttcccagccggacaccggatag

SEQ ID NO: 355485 - DNA, 459 bp, Pseudomonas aeruginosa
atggagccgcgctaccagcccggcgaaggcatcacccggttcctctgcggcacccagccgatcacctcgctggccctggtcgaatgcggcctggatatcttcgcccggaccgacatgcagcgcctgcgcgacaagtcgctggccctcgccgatctgttcatcgaattggtggaaagccgttgcgaacgcttcggcctgaccctggtgaccccgcgcgagcatgcccggcgcggcagccatgtcagcttcgagcatgcccagggctacgccatcgtccaggccctgatcgaccggggggtaatcggcgactaccgcgagccgggcatcctgcgcttcggcttcaccccgctgtacacccgcttcgtcgaggtctgggatgcggtgcaggcgttgctggaaatcctccagagcgaagcctggaaagagccgcgctaccaggtccggcacaaggtgacctga

SEQ ID NO: 355486 - DNA, 285 bp, Pseudomonas aeruginosa
atggggctggtcgaggaagccctggcggcaccccgtctggcgactccccggcaacgcatcgccgccggcagcgtcggcatcgccgagcgccagacggcggtctatccgcaggcctcgccaggcggctggaacctgctcgggcgctgcccggtgcgcctgttcgatctcaccctggacggctacagcctgctgcgcgccggcgaccgggtgcgtttcgaacccatcggacacgccgaattcgtccgtctcggcggcgacgacacgcccctggaggtccaggcatga

SEQ ID NO: 355487 - DNA, 621 bp, Pseudomonas aeruginosa
atgcgtgaccagcagcccgctaacaatctcctttcgatagcgagcgccgaatggatacaagccttgcagaacttctgccaccacggacgagtgtatgacgggtccgccgccaatgcctggctattggatgcctgcctacttgttcccagcgctgccctcatccacggtgtcatcgagtacattcttaacagccgtgaggacataccatacggagggctacgcccaagctgggtggctcagcggctcgagcaggagggattgattagtcaccggtgcggggcagtcttgcactggcaggagcacggctatcgcttttccacggtggtcaggatcgaccccgaacagatttggcccgataagcgctcgagacccgaagcattcgttaccggaccactagatagccaggagcttggggtaattgaaatcctggcgcatccgaacgccagacgtcgtagtccgtccccggtgcgcctggcagcactggttcgatcttcgctagccatacctgctgagcctcttcatcccattgcaaatccgccagttcttcatgcagtgctagccacctatcccgaattggcatctcccgaatggtttccagtggccaggagtagcgacgcatga

SEQ ID NO: 355488 - DNA, 726 bp, Pseudomonas aeruginosa
  misc_feature (494)..(503): n is a, c, g, or t
atgtggagcgggcccaattccccccacaaaccgaccctggggttcgtcgaagaggctcgccaccagcaggaaacccgctacaagatcctcaccggcatggttcgcgattttcccaaccggatcgctatcgcctactcgcccgaagacttccgacggctggccatggaaggcaagttcgccgtagtcatgagcatgctcaatgcctatccgcttggcgacgacctttcccaactggaccgctgggcagcccgaggcgtccgaatgttcggcttcaactatgtcggcaacaacagttggtccgatgcagctcgccccctgccgttcttcaacgactcgccggacccgctgggcggcctttcgccgctgggcaagcaggcggtacaacgactcaacgatctgggtgtgatcatcgacgtctcgcagatgtcgggcaaggcgctggaacaggtagccgcgctcagtcgcgcgcccatcgtcgcgtcacactcggcccnnnnnnnnnngacacaatctcagcgaccggcagatgcaactgatcaaggacagcggcggtgtaatccaggtagttggtttccccgcctatctgcgcccactcagcaaacccaccctggaaaagctcaatgcgttgcgtatccgcttcgatctgccccccctggaaagcctggactatgccctgatgccgggcgatccgatcatcgctatctggccggagtcgaagttcggtga

SEQ ID NO: 355489 - DNA, 690 bp, Pseudomonas aeruginosa
gtgctcgacgccgatgacgacctgcgcggccagttgcgcctctccgcgccgctggccttcactccgcgctacctggcgccgctgctggcgcgcttcgccgagcgccatccgcaattgcgggtggacgtgcaggccgacgatcgtttcgtcaacctccaggaaccgcgcttcgacatggccctgcgcatgggccggctggacgactcctgcctggtggcgcggccgatcaccgccaaccgccacctgctctgcgccagtcccgactacctggcgcggcatggcgtgccgcagcatcccgaggaattacaggcgcacgacgggctggtctactacaaccgcgagcccggcggcatgctctgtctgccggtggacggcgaaccggcctcgttccgcatccgggtgaggatgcgcaccgactccgggcaccagttgctcgaaggtgcgcgcgccgggctcggcctggcgatcctgccgagcttcctggccgccgatgccttgctggccggcgagctgctgccggtcctgcctggctactcgccggacggcgggcaggtttccgtggtctaccgcaagacccaacggacgccccggaagatcctcgtcctcggccagttcctcgaagaggaaatcggcgatccggcaccctgggaccgcgcgctcatcgagcgtggcctgttgccgccgggctga

SEQ ID NO: 355490 - DNA, 423 bp, Pseudomonas aeruginosa
gtggtcggcgcgcagaacccgttgtcgcaggcacgcaagctggactggggcgagttgcaggagctgacctgggtgttgcagcagcaccccagcccgatgcgcgggatcgtcaaccaggccttccacaatgcgcgcatcgacctgccgagcagtatcgtcgagaccacctcgatcatgaccctgctctccctgctgcaacagaccgacatgatcggcatcactccacgctcggtgatcgaggactacccgggcaagcacctgctggcgatcctgccgatccagctggagccgcgcctgccgccctacggcctgatcacccgacgcaaccgggtccactcctcggccatgcagaccttcatggccagcgtacatgccggcactagcacaaatgagctaatagccgcgagccggctggacctctaa

SEQ ID NO: 355491 - DNA, 693 bp, Pseudomonas aeruginosa
atgaagggtaccctcggcggcggccgcatgatggtggtcggggcttccgccgaagagctgcaacccatgcttggcccgtcgctggaaatctcggtggtcaacagccacgtctcctgcgtggtatccggtgaggcgggcgccgtggccgccctggaacagcgcctgggagaagccggcaggttcaccttcctgatgccggcaccctatgcgttccattcgtggcagatggagccgtgccttgccgacatccaggccagtctcgccgacatcgagccggatgccgcgaaaattccatggatttccagcagcgccgctaacctgcagggcgaatgcgccgacgccgcctactgggtgcgcaatgctcgaggacggcgcacgcctgttcgtcgaattggggccgcacgcggttctggcgcagtcgatccagcaactggcggtgcgcgccgggaaagcggcgcgggtgttcagcgccctgcagcgcgagggcgatggatccacggagctggcggctatcctcgccggcctttacgaaaacggtgtggcgccggactggaaggcataccagggggacgctggcttcgtcgaactgcctacctacccctggcaacgcgaggcctactggttccaggcgacgcagggcgtgccggcgcgcgcgcaagccttgcatgccagggtgcaggtgttcgacgctga

SEQ ID NO: 355492 - DNA, 282 bp, Pseudomonas aeruginosa
atggacgagatcatcgccgacgtcctcggcgatggtgagtttggctacctggaccgctctggccggcagatcggcaatgctgcggtgatcgtcgaggaaggcgtggaacgcatggaagccggcgccttggatcggtaccggaccattgcgtgccgcaaggcgttcttgcagccgcttgatcgcaagggggcgttcctcgattccgatggccaggtctggcgcatcgacggcatccatgccgacgacggcgactggatcactttctacgtggtgcccgaatga

SEQ ID NO: 355493 - DNA, 849 bp, Pseudomonas aeruginosa
gtgaagaacatcgccatcgccgccggcgatagcgccaaggccatcgccgagaagatggacggtgcgatcccgaacctgtcggctcgtgcccgtaccgtgttcaccgctgatgtcagcggcgtgaccggtggttcgctgaacttcgacgtaaccgttggcagcaacaccgtgagcctggcaggcgtgacctccactcaggatctggccgaccaactgaactccaactcgtcgaagctgggcatcactgccagcatcaacgacaagggtgtactgaccatcacctccgctaccggcgagaacgtcaagttcggtgcgcagaccggtaccgctactgccggtcaggtcgcagtgaaggtccagggttccgacggcaagttcgaagcggccgccaagaacgtggtagctgccggtactgccgctaccaccaccatcgtgaccggctacgtgcaactgaactcgccgaccgcctactcggtcagcggtaccggcacccaggcttcgcaggtcttcggcaacgccagcgccgcgcagaagagcagcgttgccagcgtcgacatctccactgccgacggcgcccagaacgccatcgcggtagtcgataacgccctggctgcgatcgacgcccagcgtgctgacctcggtgctgttcagaaccgcttcaagaacactatcgacaacctgaccaacatctcggaaaacgctaccaacgctcgtagccgcatcaaggacaccgacttcgctgccgaaaccgcggcgctgtcgaagaatcaggtgctgcaacaggccggtaccgcgatcctggcccaggccaaccagctgccgcaggcggtcctgagcctgctgcgctaa

SEQ ID NO: 355494 - DNA, 225 bp, Pseudomonas aeruginosa; identical to SEQ ID NO: 326155

SEQ ID NO: 355495 - DNA, 387 bp, Pseudomonas aeruginosa
ttgcagtcgtatctgttgcgcaagacccgcgatccgcacctggcggcggaccttgcgcaggagagcttcctgcgcctggccgagcagcggcacaaggagccgatcgagcatgtcgacgcctatctctaccgcaccgcgcacaacctcaccatcgaccattaccggcaggaacggcggcgccgcaccgagacccggcccaacgacgacctcgccgggttcgtcgccgaccagcccccgcgcacccgtgagatcttccgtctcaaccgtctggaggggctgacccatgccgaggtggcgagacgcctggaaatctccgatagctcggtgcagaagcacctggcccgcgccctggcccatgtgatgcaggcactcgaggattcccgctga

SEQ ID NO: 355496 - DNA, 654 bp, Pseudomonas aeruginosa
atggcgaagtaccgccgcagttgcacctggtcaagccgaatgcgctggtcgactggcagcgctccagcctgcgggtggcaacttcccttgagacactgccggaaggaccgcgcctggcaggcgtcagtgcattcggcctcagcggcacgaatgtccacctcatcctcgaaggggcggatagcgctgaagcgccgccggatgctgtcgacattcagcggacctgggtgctgccggtgtcggcgaagacggaagcggccgtacgcgagctggcgcggcgctatgcccaggcgctgccggaggaagacgcggccctgcgcaccttcgtcgcccgggtggccagctaccgcgaccaccatgtccggcgcgcggcgctggtcggtggcgacgccgcgagcctccggcaacagcttgcgtatcttggcggtggaacgcttgctgtcagcgagatacgcgacggcaagccggccgacgggccggttttcgtctataccggccagggcgcgcagtggctcggcatggccaccggcctgctgcaacgcgagccggccttcctcgagacgatccgcctgtgcgatcggcacatgcgcgagtggtccggttggtcgatcgaaaccgagttgctcaggccggcgggggagtcccgcctgcacctga

SEQ ID NO: 355497 - DNA, 183 bp, Pseudomonas aeruginosa
gtgtccgccatcagctcgatctccaccgccgggaaggtttccgtgaccctggccaccaacgggctcagccaggtgtggatgaccgtgtccatggcgccgatgcgaatccgtccctgggtgctggcgccggtgtcgagcgactgcttcagcgcgtgcatggtgtccatcatgcgctcggcgtag

SEQ ID NO: 355498 - DNA, 219 bp, Pseudomonas aeruginosa
gtgaacgccctggcgcccggctacgtgatgaccgacctgaacgaggccttcctggccagcgaggccggcgacaagttgcgctcgcgtatccccagccgccgcttcagcgtgccggcggacctggacggcgccttgctgctgctcgccagcgatgccgggcgggccatgagcggcgctgagatcgtggtcgatggcggccatctgtgcagcagcctgtag

SEQ ID NO: 355499 - DNA, 237 bp, Pseudomonas aeruginosa
gtgacgctccaggtctacagcggcacgacgctgaagcgcacctatgccggcctcacatccagtaactggtcctatccgctggccgaagacgtcgctgacggcccgctccaggacgtgcgcctagtcctgcgcagcgtccgcgacggaatccaatcctggcagcaacacgacatcaccatcgaacgacacggcctgggcttccgcttgggcgaagaccttggaggcgtttccgcatga

SEQ ID NO: 355500 - DNA, 243 bp, Pseudomonas aeruginosa
  misc_feature (106)..(106): n is a, c, g, or t
atgtccatcgtcggcatcccgaagggtcccgagacagaaagcgtcaagagattgcgtcgttccgagttgaaggacgccagcggcgacaccgcaatgagcctgcgcnaatgctcctgcgccagctccacgacctcagcattgcgcttcgccatgcgggagttcttcttggccgacatcagcaagacgtcgaacaccgtcattcggctggcccggatacgctttgcggcttcagatacccaatag

SEQ ID NO: 355501 - DNA, 180 bp, Pseudomonas aeruginosa
atggtcgaaggcggcgatccgttcctcgcccgcatccgcgaacgcctggcgtctcgggagtgggactgggactaccaggaactggacccggacgtgttcgccgaagagttggacagccccgcctaccgcgaagccgagcggatcgccgtggtcggcctgcgggtcactcgttccgcctga

SEQ ID NO: 355502 - DNA, 471 bp, Pseudomonas aeruginosa
gtggacttcgcccggcacgccgccgccctggccgcgccgacgcccttcccggaactgctggagcactggcgcgacggtcgcatcaagcagaccctgatcgcccgcgtgctggggctgcggcggatgcagccgggcctgttccgcgacggcgactacctgcccttggaggtcagcggcgagcatgccgagcgggtcctggccttcgcccggcgcagtcgtcacggttgcctgctggtggtggtcccgcgcctggcctgcgccctgctcggccacgccacgcagccgcaggtgccggccgaggcctggggcgacacctgcctgctgctgccgccgagtctctccgaatgcacctacagcggcctgttttccaccatgccgctgcccagcgacgggcacctgagcctgtccgaagtgctcgccgactttcccgtcaacctgctttaccgcctcgcccaggaggacaccccatga

SEQ ID NO: 355503 - DNA, 309 bp, Pseudomonas aeruginosa
atgcgcgaaggcgagggcgagccgaacagcgagacgcgcatcgaggtcgtcgagcgcaacggccgctggtggcgctaccggctgtatccggtgaccggcaagaagcaccagctgcgcgtgcacctcgcggcactcggcgcgggtatccagaacgatgggttctatcccgagctgctggacgccgagggcagccccgacgactacctgcggccgctcaagctgctggccagggggctgcgcttcgacgacccgctgagcggggagaggcgtacgttcgaatccgggctgcggctcgattggcaggtgtag

SEQ ID NO: 355504 - DNA, 489 bp, Pseudomonas aeruginosa
gtgatccgtaatgccggcaacatcgtccccggctacgggccgcagcccggcggggtcagcgcctcggtggaatacgcggtggcggtgctcggggtcggcgacatcgtggtctgcggccactcggactgcggcgcgatgggcgccatcgcatcctgcgcctgtctcgaccagttgccggcggtggccggctggttgcaccacgccgaggccgcacgggcgatgaacagcgcccacgaacacgcctccgaggcggcgcggctggacgccctggtgcggcacaacgtgatcgcccaactggccaacctgcgcacccacccctgcgtcgcccgcgccctggaacagggtcggctgaacctgcacggctgggtctacgacatcgaaagcggccgcatcgacgccctcgacggcgccagccggcgcttcgtctccctcgccgagcatcccgaagtgcgcgcggtaggcggcgcacccgggcaggcggtcacctga

SEQ ID NO: 355505 - DNA, 363 bp, Pseudomonas aeruginosa
gtgatcgatgcgcaggccatcgagcagaccgtcctcgagcaactggaagaccttgccgtgcacggcctcgaacacctcgccgcgctcgacccgcaggccgaccagttcgctgatgtcgaagaaacggcgccagttgatgtcgtccgccgcggtgcgccaactggccaggcggtagtgctgcgcctcgagcaggcggtgcaggcgttggcgagcctcctcgtggcgttcctggagttcgcccagcgtgcgctggagggctgcgcgcggagcgctctcggcgagcgcagccgccagtcgacgctgcatctcgcgcaaggcctcgcggtcctgccggcactcgcggaaaccgccggccagggctga

SEQ ID NO: 355506 - DNA, 144 bp, Pseudomonas aeruginosa
atggtcgggcagcaggccgatggcgtggccgccgaaggagtggccgatccagtacagcggccgctcctcccggccgagcagctcgacggcggcggcgaggtcccggtaggcccagtccaggtaggacatggcgaagccctttag

SEQ ID NO: 355507 - DNA, 195 bp, Pseudomonas aeruginosa
gtgctactgcccctggaggacgccctgggcagcctggagcagccgaacctgcccggccccggcgacgcccacccgaactggcggcggcgctggccggaaaacgccgcgcagatgctcggaacgccgcaggtcgaccggcgcctgcgcctgctcgaacgcagccgccgggatgccgaggaggccgcccatgattga

SEQ ID NO: 355508 - DNA, 303 bp, Pseudomonas aeruginosa
gtgcccggtggcgcgtctctgaccatcaccagccagttcgtcggtcagaaagccggctccgccgtgtgctacgagaacacactgttcaacgatgccctggtcggtcgcatcaacgccatcgttggcaacatcatcgtgcgccagagcgtcgcaccctgtacgcgctgccgcgccggctaccgccagctcgcccagaacggaccacgtactatcgtcgtctccagcgatgacggctacgacggcgcccccgacaacaccatcttcctcttcgcacccaccgggctggtgttctaccgacgctga

SEQ ID NO: 355509 - DNA, 342 bp, Pseudomonas aeruginosa
atgctccctccgccctggtccccccgccgcagcgccatcagcgcgcacctgctgatccagttcggcatcgaccgcggcctcggcctggagcagtgcctggcgggtagcggcctggatattcgcctgctcggcgatccctccggggaaatcgatgcggcccaggagctgagcgtcgtgcgcaacctggtccggcacctgggcgacgcttgcgcgcccttcgccttccatggcatccgcctggaggtacacggcgacgaagcgcacctggtgctcgacgacaccggcattcccgaagacctgcgggctttcctcctcgaacgcgacgcagggtacgcacggtga

SEQ ID NO: 355510 - DNA, 306 bp, Pseudomonas aeruginosa
atggctgtgctcggcgtccacgccgacggcgtcgatggcgcggtccacgccgatcccggcggtcagccagcgcagggcctggaccggatcctcgcgctcgaagtcgatcacttcggcgccttgctggcgggccatgtgcaggcggtccgggtggcggtcgatggcgaacaccctggcggcgccgaggagcaacgcgctggcgatggcgaactggccgaccggaccgcagccgaacacggcgacggtgttgccgggggcgataccggccagttcggcgccgaagtaaccggtggggaagatgtctga

SEQ ID NO: 355511 - DNA, 399 bp, Pseudomonas aeruginosa
atgcacctgctggtgccgctggagcgccggcatggctgggacgaggtcaaggatttcgcccaggccatctcccagcacttggcgcgcctgatgccggagcgtttctcggcggtttccgggccgcgcaaccgggtcggcaagatcttcgtcgactacctgcgcaacagccgcggcgccagcaccgtggctgcctactcggtgcgcgcccgcgaagggttgccggtgtcggtaccggtgttccgcgaggaactcgactcgctgcagggcgccaaccaatggaacctgcgcagtctgccgcagcgcctcgacgaactcgccggcgacgatccctgggccgactacgccggcacccgccagcgcatcagcgcggccatgcggcgccagctcgggcgcggctga

SEQ ID NO: 355512 - DNA, 240 bp, Pseudomonas aeruginosa
atgcaggcgcgccaggttggcgccaagctgcgccgccagctgcgcccggccctgggtgccggcgccagcgctgagcaagcgaccggcggcgacacccggcacgtactccatcaggaagaacacccgcccatgcacgcgcatatcgcggcacagccacagcgggcgcggtactttcacaccggcctgatgaaccacttgcagcacctcgaactcctgttcgcggtcaaggctggcgggtag

SEQ ID NO: 355513 - DNA, 189 bp, Pseudomonas aeruginosa
atgaacatgtgttccaggccgatccgctggctcatctcgacgttggcgccgtccagggtgccgatggtcagcgcgccgttgagggcgaacttcatgttgctggtcccggaggcctcgagcccggcggtggaaatctgctcggagaggtccgccgcgggaatgatcgcctcggccaggctgacgttgtag

SEQ ID NO: 355514 - DNA, 183 bp, Pseudomonas aeruginosa
gtgaagccgatcggcgacgccatcgaggccttcgaagccttcgaccgccgcgagaccggctggatcaaggtcgaactggtgccgcagaagcgccaggtcgagggcagcgaggaacgcctcgacgaacgcgcggtggacgaactggcgcgccggccgacgccggaaagcggcgcccgggggtga

SEQ ID NO: 355515 - DNA, 207 bp, Pseudomonas aeruginosa
atgctgcattccacctcggtggcgttcaccgccaccgtgccggacctgctcaaggtagcccgcgacgtcaattccgccacctatgcgccgttcctgtccttcggcatcgccggcgcgctctacgccggcaccgccttcctgctgatctggctgttccgccgcggcgagctgcgctggctggcctacctcagaccgcaaacccactga

SEQ ID NO: 355516 - DNA, 342 bp, Pseudomonas aeruginosa
gtgtcggacttgcgcaaggccctgctcagcgccgaggacacgccggctggaaacctggctatccgcgacgcggtgggggtggcgatctccaacctggactcttcgaactcgcagatcctcacgggccagggacgcatcggcgcgcggatgaacgtcgccgaatcgacggaaaccttcatcgacgacgtgaccctggtgaataccgccgtgatctcgcagatccaggatctggactaccctgaagcgctgtcacggctgaccctgcaatccaccatcatggatgcggcgcagcagagtttcgtcaagattcgcggcttgagcctgttcaactacctgagttaa

SEQ ID NO: 355517 - DNA, 270 bp, Pseudomonas aeruginosa
atgaccagcccgggattggtacagaactggccgcagccgagcaccaccgaggcactcagttcgtcggccacggcctcgccgcgcttcttcagcgccgccggcagcagcaccaccgggttgatgctgctcatctcggcgaacaccgggatcggttgcgcccgggcggccgccatgtcgcagagggcgcggccgcccttcagcgaaccggtgaagccgaccgcctggatcgcggggtggcggaccagccgctcccctactccgccgccgtag

SEQ ID NO: 355518 - DNA, 222 bp, Pseudomonas aeruginosa
gtgatcatcaccctgatcgtcatcgacgtcggtctgtccctgctcaagctgcgccatccgaagctcgacaccctgatcgagggctccccgacactcatcgtcgagtacggcaggccattgcacgcacgcctggccgaggcccgcctgcgcgaggaagacattctcctggccgcccgcgagacccagggcctgatctcgatcattcccgatcgcggcgactga

SEQ ID NO: 355519 - DNA, 228 bp, Pseudomonas aeruginosa
atgcacccggcgcagcggcgcctgctcggctggttcggcatccgcggcatcggcagcctgtactacctcagctacgcgctgaaccaggggctgcctacggcgctcgcgcataccgccagcgacctggtgctgagcctcgtcgccctgagcatctgcgtgcacggcctgagcatccagccgctgctgatgcgccaggcgcgcagcgtcagtcgccgcgatcgggaatga

SEQ ID NO: 355520 - DNA, 192 bp, Pseudomonas aeruginosa
atggagcatcggctcggagaagagtccgttcgcttcgacgaggtctgcgtggtggcggatcggaagagcttttccttgctggtcgagtgcatcaagggcaacggctatcacttcaccgcccatcccgactggaacgtgccgctgcggcccagcttccaggaggcgctcgactttttccaacgtaaggtctga

SEQ ID NO: 355521 - DNA, 141 bp, Pseudomonas aeruginosa
atgggggttccgccgcaggccggcctgcacatggaccaggacaccctggccgccctggtgaccgcgatcattcggcacgaaaacgggcagcagccctacagcgccgagcagatcgcccaggctgtgcgggaggtgctgtga

SEQ ID NO: 355522 - DNA, 267 bp, Pseudomonas aeruginosa
ttggccaagctgctgctgaactaccgcaaggtctatggcctgcgcaccgtcgaatcgctgatcgcacgctgggcgccgtcgaacgagaacaacacccgcgcgtatgcctcggccgtggcccgagcgatgggagttccgccgcaggccagcctgcacctggaccaggccaccctggtcgctctggtgaccgccatcattcaccaggaaaacgggcagcagccctacagcgccgagcagatcgcccaggccgtgcgggaggtgctgtga

SEQ ID NO: 355523 - DNA, 345 bp, Pseudomonas aeruginosa
gtggccagtgtgatcaatgacctgcacagccagttcgacctgaccgccagcagcctggccaaggtgcgtgcctatgagatggcggtggcggcggcgcgcgaacaggtgacggcgacgcggcgcagcgtcgccggcggggagcgggtcaatcgcgacgtgctggacgccgaacagcagttctacggcgcccgccgcgacctggcggaagcgcgctacgcctacctcaacgcctggctgcgcctgcgccagctggcgggggtgctggaagaccgcgacctggcggtgctggccgcctatttcggcgccggcgaaggacgcgcgcaggtcgccgctgccatcagatag

SEQ ID NO: 355524 - DNA, 363 bp, Pseudomonas aeruginosa
gtggatggcgacaccttcatcgagaatcgctcgttcgaacgctttctccgcgctgccgccgggcaggcgggcctgatcggcgtctcgcgctacaccaccagcgatggcgtgcgcgttctgctggacgcgggtggcgaggcggtcaccgctttcacccgcgagccgcagcacgcctacgaatggacgggtatcgcgattctccggccggacatggtggtggaccggccgatatacgtgtaccaggcgctcgaaccgtacctgccgctgcccgcgcaggaactcgacgccttcgacatcgataccgccagcgacctggatatggcgcggcgcgtgcacctgaataactggaacctgaatgattga

SEQ ID NO: 355525 - DNA, 225 bp, Pseudomonas aeruginosa
atggtcgttgcgcgcgagccggcgcaggcccacggcattgagcacgttgagcacggtctcaccggcagccgccgcgacgggctggccattgaggtggatggtcatgtctgcccgcgagaggggctggatatcgtgttgacgttcaagaaggtgcattgccctttcatccgtgagagagagtcgggagccggcgacactaggagtcgggccgggcgcggacattga

SEQ ID NO: 355526 - DNA, 234 bp, Pseudomonas aeruginosa
gtggtggtcgacgacggcggggcggccatcggcatggtcgggcagggcggccaggtctatgcgcgcgcggaaaaccagcggggcaggttgctggtgcaatggggaacggcgcgcaaggagcgttgcgagttgccctacgacctggccggtgtgtctcgcgaccaggcgctgatccgcctgcgcggcacctgccgggcagccaccaccgactccaacctggagaacgccagatga

SEQ ID NO: 355527 - DNA, 234 bp, Pseudomonas aeruginosa; identical to SEQ ID NO: 339257

SEQ ID NO: 355528 - DNA, 234 bp, Pseudomonas aeruginosa; identical to SEQ ID NO: 325921

SEQ ID NO: 355529 - DNA, 174 bp, Pseudomonas aeruginosa
ttgcgcgcctatcgccgcggcatcatcagcgtcgccgacgacgcggcggcgctgcgcgtcagtggcatctacccgctggacgacagcggcgcggcgctggcattgctggagcagagcctgccgatccggctcgactaccacgggccctactgggtcagcatcgccagccgctga

SEQ ID NO: 355530 - DNA, 138 bp, Pseudomonas aeruginosa
atgggcaagctgctggccttcatgttcgtcgtcaacatggtcatggccatgaccgtgctgccggccttcgccgtatggctggagcgggcgttcccgcgcaaacgtcccgtgcgcatgatcggcgcgctggtgcactga

SEQ ID NO: 355531 - DNA, 210 bp, Pseudomonas aeruginosa
atggcccgcctcgatcctgccctggccgaagaaatacgccgtctgccgatcagccggcgtctggaactgacccaggcattgctgcatcgcgccggccccgaggtggagcgccaatggctgcgagtggccgaggatcgcctcgccgactgccgggcgggcaccgccgatgcgctgccgctggccgagatgctcaagcgactggggcgctga

SEQ ID NO: 355532 - DNA, 162 bp, Pseudomonas aeruginosa
atgggcctcgccagtccggccgccggctggctgtacgaaggcctgccgcagtggtcctatctgatcatggcgctgttcgccctcggcggcgcggtcctggtctggcttgccctacagagtgcccgagatgcatcgactagcgttttcagccgttctgtttga

SEQ ID NO: 355533 - DNA, 132 bp, Pseudomonas aeruginosa
atgctgtgggtagtgaccccgggttgcagttgcctgagcgacgccgagaccgccgccgacaacctgctccagcgcatcaccgacatcgccgccgacggccgcgtgcgttacgcggacggcggcacgctgtaa

SEQ ID NO: 355534 - DNA, 1272 bp, Pseudomonas aeruginosa
atggcagagaaagaccgtttcgctgaccagtgggaggctgcgggcaagaggcctggctggcgggctaatgccgtaagcgccgcctcgatcaagcctgtagcgatccgctggctctggcctggctggatcgcccagggaaagctacacatcctcgctggcgcagggggcactggaaagaccaccttgctccttggcttgatcgctacgatcaccagtgccgggcgatggccggatggggagcgctgcaaggaagcaggcaacgcgatcatctggtcatccgaggacgaccctgccgataccatcgtgccgcgcctggccgctgctggcgctgatctgaggcgagtccacatcatccaaggccggatcaaccctcaaggtgaggtcgagccattcgacccggccagcgatatcgacctgctgcgcgagaccgccgaggccatcggcggcgtctccctgctgatgctcgacccagtggtgagcgccatcaaaggcgacatgcacaaggcaaatgaggtgcgtcggggactgcaatgcgttgtggacttcgccgaggctcatgcctgcgccgtggtgggcgtttctcactttgccaagggcacggcagggggatcgcctgctgagcgtgtggtgggctcccaggcgttctcagcgctggcgcgtacggtgttggtggcggccaagcaggaggactccgatctgcgcgtgctggccagggctaaatccaacatcagcgtcgatgagggcggggtttcctacaccatcgggccggcgagcatcgagactgagcatggccccatcgagaccacccgcgtgctgtggggcgacaagctggagggctccgcacgagacattctcggtgacgttgaagcgactggagaggacggggatcgatcggagctggacgaggtatgcgacttcctgcgtgacctactgcgagaaggtcccgtgcaaaccaagcgcatcaaagcggaggcgagcgacgccgggcactcatggatgacagttcgtcgcgcgcaaaaactcgttgaggcagttgcgttccgcaaaggcgaagaagggcgaaaagggggaggcaactggtactggaaattaaggtgttcacctcaccttgatcaccttaaagaatcggaatttgaacaccttaatgaaacccactggaatcaagggtttcagccgtattccgatgatgaaaacgaattaacgtgctcacccttgggagtgaacaccttaatcgaaaacccggtgattggaccggatgaggagggaatctga

SEQ ID NO: 355535 - DNA, 294 bp, Pseudomonas aeruginosa
atggccgccatcgacttcctccgagaccagggtttcaccgttcggaaggtgggagcccgagtggtcgtcggccccagaggcaagatcaccgacgacatccgctcctacgtcaagcgctaccgattggcgctgctcgccgaactggccgccaacgatggcatcgagcgtcggtcgcactggcgggtatgcctccccggtcgccgccccttcgtcatggttggcgagccctgcactcatgccgaagcgctggcgcacgcgcaggggatatggcctgacgccgaggtagaaccatga

SEQ ID NO: 355536 - DNA, 234 bp, Pseudomonas aeruginosa
atgtccaatgttgaggtgtacctgccagccgtcgatggctcggcatactggccagtctccaaggatgattcgtgcaaagaagccgtgcacgtcttgttcaccgacgactttgccgccccgcctcaccggctcgtgattgaggtcatcaccgagtcaggcaagaaagtagaggtcagcatcccctactccgatactggcaaggccaccgtgagagtcgatggcaaaccggtgtga

SEQ ID NO: 355537 - DNA, 1329 bp, Pseudomonas aeruginosa
atgaagcccatcaaagtcggttatatagccctactgctgattctcagcgcgttgtggctgctggccgatccgctgctgccgcccaactatggatttttcgacgtacgccatgtgctggtgacctacaccggcatcatcggcatcggcgtgatgagcgtgggcatgctgctggcgctgcgcccggtgcggatcgagccctttttcggcggtctggacaagacctaccggctgcacaagtggctaggcataaccggcttggtggtctcgatcatccactggttgtgggcccaaggcaccaaatgggcggttggctggggcttgctgaccaaaccgcacaagggaccgcagcccgagcagacagtagaactgttccgcttttttcgcagccagcgcggcctggccgagagtatcggcgaatgggccttctatgcactggtcgtgctggtcgtcttggctctgctcaaacgcttcccctaccggcattttttcaagactcaccggttgctggcgctggtctatctggcgctggtcgtgcattcggtggtgctgatgccgttcgatttctggagcgcacccatcggcctgttgatgctggcgctcatggccggcggcacgatcgccgcctttgtctcgctattccgccgcgtgggctacaagcgccgcgccgtgggcgaaatcgaggaagtgctgcaccaccgcgacaaccgcgtgctgaagtttgccatcaagctgaaagaccgctggcccggccaccaggctggacagttcgccttcgtgaccctcgatccacacgagggcgcccacccgtacaccatctcctcggcctggcatgacgatggccgcatgttcttcctggtcaaaggcctcggcgactacacccaaacattgcctgacaaggtgaaggtcggcgatctggtcagcgtggagggtccctatggccgcttcgacttcagctgcggcaaatcgcggcagatctgggtagcgggtggtatcggcatcaccccgttcattgcccgcctgcaggctctgatcaaacagccggatggcaaggccatcgatctgttctacagcaccaacgagcctgacgagggttttatcgagcgagttcgccagctcgccaaacgcgccggggttcgactgcatgtgctggtcacggctcgcgacggtcgactgaacggcgaacgcatccgtcaggaagtgccggaatggtcggcggcaaatatctggttctgcggcccggccggctttggccaggcgctgagcgaggacttcaatgcccacggccttagccctgccgacttccatcaggaactgttcgatatgcgctga

SEQ ID NO: 355538 - DNA, 438 bp, Pseudomonas aeruginosa
atgaaaaccatcagtgtgcaaggcggcatgggtaacggcttcgccatcgaaatggcctgcggcaatcattcggtgttcatcgaccagccgcgtgcggcattcggcaccgataccggcccgagcccgctggagctggtcctggcggcgttgggtggctgcctcggcaccatcgcccggttcctcgcccaccagcgaaagattgaacttcgcggcatgcgcttcgagatcgaggcggattacgacccggccggtctgctggggcgtgataacaccgtgcgccccggttttgaggaggtgcgcttgcgcgtcgagattgatgcggacctgagtcctgaagagaaactggcgttcttggaagaagtcgagcgccgctgcccgttggtcgacaacctgctgaacggcacccacttgcacaccgagctggctgagccgtcctga

SEQ ID NO: 355539 - DNA, 189 bp, Pseudomonas aeruginosa
atgaaaaccaacgtgggaacccttgatcgcggcctgcgcattgtcgttggcgtggtgctcatcgctcttagcctgttcggcgtgatcggttggtggggctggctcggcgtgctgccgctggccaccgggctgttccgcttctgcccggcgtatccgctgttgggcatcaacacctgcaaacgttcctga

SEQ ID NO: 355540 - DNA, 417 bp, Pseudomonas aeruginosa
atgcgcaaggtgactgcttttgccgccggattgatcttcggtatcggcttgttgttgtcgggcatggccgatcccgccaaggtcatcggctttctcgatctggccggccagtgggacccgtcgctggcactggttatgggtggcgctgtcgccgtggcctttttacccttcacctgggcgcgtcggcagacccgttcgctgctggacgctcccatgcggctgcccgagaagcgcgagctggatcgtcgcctgatcggcggcagtttgctgtttggcatcggctggggaattgccgggatctgtccggggccggccgtggcgctggtgctgaccggctactggcaaatcctgctcttcgtgtgcgccatgttcgctggaatgtggctgttctccgcgctggaacgccggcgcccctga

SEQ ID NO: 355541 - DNA, 435 bp, Pseudomonas aeruginosa
atgatcattgattgggctcatttcacaccctggacttcgctggccggcggcatgttgatcggcctgggcgccggcctgtttgtggtcctcaatgggcgcatcgccggcatcagcgggctgctggccagcctgttggagcggggtggcgaggggcgcggcgaaaaaggtctgtttctgctcggggtgctgctcgcgccactgttatgggtggtcttctccacgctgccagtgccgcaattccagaccaacgggttgggcctgttgatggccggtctgctggtgggcgtgggcacgcgctatggctccgggtgcaccagtggtcatggcgtatgtggcatttcacgcctgtcgccccgctccatggctgcaaccgctgcgttcatggccagcggttttgtcacggttttcatgctacgtcatctgtggggaggctga

SEQ ID NO: 355542 - DNA, 327 bp, Pseudomonas aeruginosa
atgaatacccatcccattcccctggacatccagaaactgcgcgccaatgccgacagcgcaggccagttgctcaaggcgctggccaatcccgatcgtttgctgctgctctgtcagctgtcacagggcgagcgcaacgtgagtgagctcgaagcgttgctgggcattcagcagccgacgctgtcccagcagttgggcgtgttacgccgtgaaggtctggtggagacccggcgcgagggcaagcagatctattaccgcatcagtagccccgaggcgctggcggtgatttccacgctctatcaactgttttgcgcaaaggagtcgacatga

SEQ ID NO: 355543 - DNA, 3114 bp, Pseudomonas aeruginosa
atgaccgacaagtccaagcaacaagaactgcaggatgccggccggcgcaaagtgatcacccagggcgccgccgtcgccggtggtctggcggtgttcgccgcaggctacagtgaaaccgtcagccgggcggtgaccgggctggtgcacggcaccgccggcacgcccaccgccgacgcggtgcgcggcaattccctgaccccggaatttcgcattgacccgctaactggcgcgctgtccacccagccggggcagacagttagcccgtcggtgtgcctgggctgctggacccagtgcggcattcgcgtacgggtggacaacgaggccaaccgcatcattcgtgtggccggcaacccttatcacccgctggccaccacccagccggcggacatgcagacgccggtgcgcgatgtgtacgcagcgctgggcggcgatgccggaatcgaaggccgcgccaccgcctgcgggcgcggctcggcgatgttcgagcagctgaccagcccctaccgcgtgctgcaaccgctaaaacgggtgggcaagcgcggcgagggcaagtggcaaaccatttccttcgatcagttggtcgaggaagtctgcgagggtggcgatctgtttggtgaaggtcatgtggacggcttgcgcgcgatctatgaccgcgagaccctgatcgatccggccaacccggagtacggcccgctgagcaaccagttgctgttcaccgatgccggcaacgaaggccgcacgccgttcgtgcgccgctttactcagcagtcgtttggcagcgtcaactttgccaaccacggctcgtactgcggccagacctaccgggtgggcaccgctgccgcgctcggcgacctggccggcacgccccacggcaagccggactgggacaacgcccgtttcggcctgttcatcggcactgcgccggcccaggcgggtaaccctttccagcgccagggccggcaactggccgaggcgcgtacccgcaccgacaagccggtgttcgagtacgtggtggtttcgccgacactgccggccacctccaacgtgctcagcgatggcagcgagtggctggcggtcaagccggccggcgacctggcgctggtgatgggcatgatccgctggatcctcgacaaccgtcgctacgacgccggcatgctcgcccagccgggccaggcggccatgcgggcggcgggcgaagtgtcctggagcaacgccacccatttgctggtcaatgatccggagcatccgcgcttcggcagtttcctgcgcggcgccgacctgggctggagcgatgtcgatgcctacgttgtgcagcgcgccgacggcgagttggccgcgcacacccaggccgaaccggcggagctgttcgtcgaacgcacggtgacgctggacggtcagccggtgcgggtcagcagctcgctgagccgcctgcacgctgaagcccggcgcatgagcctggaggaatacgctcgcgaatccggcgtgccggtggagaagatcatcgggctggccgaacgctttaccggctacggcaagcaggcggtggccaactcccacggcggcaccatgagtggttccggcttctacaccgcctatgccatcggcatgctcaacacgctgatcggcaacctcaacgtcaagggcggcctggtggtggacgccggccagttcccgccgttcggcccggggccgcgctacaacatcggcggtttcgccggcaaggtggaccccaagggtgtggccctgtcgcgccaccgtttcccctatgaaaagagcagcgaataccgccgcaagaaagaggccggccagtccccgtaccccgccaaagcgccctggtatccggcagtcggcgggctgagctcggaaatgatcgccgccgccctggatggctacccgtaccgcgccaaggtgtggatcaaccacatgggtaatcaggtgtacggcatcgccggctggcggcacgtcatcgaggagcgcctgcgcgatccgaaactgatgccgctgagcatcgcggtgaacccgttcatcaacgaaaccagcgcgctggccgactacatcgtgccggacaccttgacctacgaaagctggggtgtctccgcgccctggaacggcgtggtggccaaggcctccagcgtgcgctggccggtggtcgagccgcgcgtggcgaagaccgccgaaggtcagccgatcagtctggaaagtttcctgatcgccaccgccaagcgcctcggcatgccgggctttggcgccggcgcgattcgtgacgtccagggcaaccgccacgacctgaacagcgccgccgacttctacctgcgtggctttgccaacatcgcctacgccggcggccagccggtgccggaagccagcgatgacgacctggcgctcaccggcgtgatacgtcacgccgagcagttgcagcacggtctcaagcccgaggagtggcggcgtgtggcgctgttgatgagccgtggcggacgctttgcgcgcgtcgaggatgcctggaacgaggatggccagctgcgccagggttacgcaaatccgcagcagatctggtacgaggacctggccaggatgcgtcactcgctgaccggcgagcgttacagcggttgcccgacctggtatccggtgcgcatggccgacggtcgtccgatgcgcgagttgtacggcgaggcgcagtggccgctgctgatgatctccttcaagtcgcacctgatgagcgcgttttccatcggcgccgaccggctgcgtcaggtgcacccccataacccggtgtatctgcatcgcgacgatgcggcgcggttgggcatcggtcatggcgaccgagtgcgcctggtcactccaggtggcacgcgggaaggggtggcgctggtgcgtgacgggctgatgccgggcaccgttgccgttgagcacggctacggacacaccgagctgggcgctcgcacccatcaggtgaatggccagcccatgccgcacaacccggcgctggcggcgggggtcaacctcaacgacctcggcttcggcgatccgacccgtccggacaccaacgtgtggatcgactgggtctcgggtgcggcggtacgccaggccctgccggtgcgcatcgaacgggtctga

SEQ ID NO: 355544 - DNA, 1038 bp, Pseudomonas aeruginosa
atgcagatcgttgagctgctgacccccgagtacgaggctgcctggctgccctgggcggtgcaatatttcttcttcatcggcatcgccgccaccacggcgctcaccgccgccgtcctggcattcggcaagcccggctcgccctcggcgcgcctgatgccggcggccgtggtggtgctgctggtcaccgccatcgccgcgccagtgtcgctactggccgacctgcaccagccggggcgcttctggcacttctatgcgcatttcacgccctggtcgtggatgtccattggcgcctacctgctgccgccgttcgtgatgctggccctgggtttttgcctgctgtggtggctgcgctgggaacgcccgctgcgtcttgtcggcctggccatggcgctgctggcggtgggcatcctggtctataccggcgccgaagtgatggtggtgcgcgcccgcccgctgtggaacacgctgctgctgccgtggaacttcgccgtcaccggctggctggccacgctgggcgccatgcttttggtcggccgctggctgccgggcggtctggccgccatgccgctggaactgctgcgtcgcctcggcctcagtgcgctggcgctggtggtgctgggcgcgctggtctgggtggtgaccggcagtctgggcctggatccgtcgttccccgtggcgctgcgcctgttcgaggacttcccggtatggcgcctgagcctgctcggcgcggtactgagcggcttgctgttgctggccatgctggcccgccccgctgcgcgactgggcggcgccggctactcgctgctggtggcgctggccatgctggcttcggcctgggtgttccgctgggtggtgttcatgagcgtgcagggcgtgcccaagtacggtgccggcctgtacctgtacagcatgccgctgggcggtgacggactgctgggcattgccggcatgttcggcctgtgtctggcgctgctggttgccgtggtattcgtgctggaacgctttccctcttttaacccggcccgggccggtcactga

SEQ ID NO: 355545 - DNA, 771 bp, Pseudomonas aeruginosa
atgagcaagtcaccctgtgatcaacctccatccgcaggccggcgcggcctgctcaaggatctgctgggcctgagtgccgccgtgagcctgctgcccctggccagcaccgcccaggccggcattggcgaccagccgccccggcggccgggcattgagggcaagcgctacggcatgctggtggacctgcgcaagtgcatcggctgccaggcctgcacggtgagttgttcagtggagaacctgccgccgatcggccagttccgcaccacagtactgcagtacgaagtcaccgaaacccccgacgccccctcggcactgatcaacctgccgcgcttgtgcaaccactgcgatgagccgccgtgcgtgccggtctgtccggtgcaggccaccttccagcgcaccgacggcatcgtgctggtggacaacgagcgctgcgtgggctgtggctactgcgtgcaggcttgtccttacgacgcgcgcttcatcaatcacgaaacccagaccgccgacaagtgcaccttctgcgagcatcgcctggaggtcggcctgctgccggcctgcgtggaaagctgcgtgggcggggcgcgcgtgatcggcgacctgaatgatccgcaaagcgagatttcccgccggctggaaacccacaaggacgagattcgtgtcctcaagccggggatgaacaccgacccgcacgtgtactacatcggcctgcccgaggccttcgtcaacgaagtggacggccaggcgggtatccgtctgatcgccaagcattaa

SEQ ID NO: 355546 - DNA, 597 bp, Pseudomonas aeruginosa; identical to SEQ ID NO: 341575

SEQ ID NO: 355547 - DNA, 606 bp, Pseudomonas aeruginosa
atggtcaatctcataggttctccccgcgacaggcgcggttacgcctcgcccgtcacgatcaatgcaaattcatggatgaatgggcaggcagccgggttgacgcccgacaccgggaaacacagaatgagaacgtctggggttcaacctgacgtttctcgaaaggcctgggggcgcaatccccaggccttttgcatttccatggcctgtaacgctacgaatcagtcagggctcatggtgtttctcctcgctgttcaggttatccagtggtcgggcacgtgctcagacgtcgctcgatggcattggttgatcgcacgcaccatcaggttcgttgctctgcacagcgtggcgctgacaggcaatccaggcggcaatgtctttcgccagcgcgaacctgccacgtcgattgggcagtataaaaaacggcacatcgatcatccctctcgacagcgccacgcgaaatgcggccggcgagcgaaaacccaattcccgccacagggcattgctgcccagcatcaccccatagcgcgccgtcaagccatgctccaattcattagccagacgctggatagggttctgttcgttcatgacgctcgccgtttcgcgtag

SEQ ID NO: 355548 - DNA, 1071 bp, Pseudomonas aeruginosa
gtgactgaatttcaacgcatcaatgcgctgctcgtgagttttcgcgcgagcatgcgaaacaaaaaccgccgagcagctccgcccgccaagcgcgatcaagctgacgttttgcgcgtgcggtattggtatgaaggactgcggcaccgcaccgggttggctacggcctataagctcgagcagcacttcgagccggagtcatttcgcaagcaggacgggatcaccagtaaccgctgcaaatggcagcgctatgcggctggccggcataccccgcaggccaagctggcagcccgtattgatgcccaagtaccaggctcattgcaggagctgcagcatcccctttgggccatcctgaaacatcagccatcccgcaccacgctaagcgaggcgtttctgcagcgcttgaagccggatgtgcaggcggtgctgttcgagcccgtcggtggtatcgaggtttactggcagcgggccagagtcaccgtcgtgctgatgagaaagctggagcgcattgccagcctggatgctctggcggcattgacctggctgctgcgagaagccatcgcgcagggcggccataagagtgcagagcgcctggcaaacagcatttatacagtgctgttaatcatgggtatcgagtggcaaaacagggagctggcagagccgctgctcaagctatttgcacaacgcattttgccgctgggttcgccatcccatcggcggttctgcatgagcggaaaggacatgcttgaatgctcggcagcgctcaatctgattgtgtaccaaaccaccgacggcaggcgtcgcagcctgacctggctgcagcgggtgcacatcatgcgccggttactggctggcatgacgggcttcgatgtggtgcatgccctggcgccccagtacatgcccgtgggaaccgatgtgccggcggaaataatgcatcggctcgaacaagatgagcgctggcgacaatgggggtggagcagcattaactccgtccagccagagcccttcccgccgcctgaactcttgattccgcggcgggagacaactgctgtcccatcaacctcgcctgggtga

SEQ ID NO: 355549 - DNA, 486 bp, Pseudomonas aeruginosa
atgaccgagcaagcgctaaatctgacggatgtcagaatccttactgccctgcagcaggacggcaggatcaccaaccagaccctggccgaccacattggtatgtctgcttcgccctgctggcgtagggtcaggcagttggaggaacatcgcttcatccagggttacagggcggtgcttgaccggcgcaagatcgggctgggagtcatggtgttcatacggattaacatcgatcgccacagtgaagccgaggcaaggaaattcgagcaggaggtcatgcagctggaggatgttgtggcgtgctacagcatcggcggcgacgccgacttcctcctgcaggtagtggcgcgtgatctcgattcgtttgctgacttcgccatgaccgttattcggcagttaccgggcatcaaggaaatgcagagtatgttcgtgctcaaagagatcaaacccttcttatcgttcccggtcaaacgcccccacacgggttaa

SEQ ID NO: 355550 - DNA, 423 bp, Pseudomonas aeruginosa
atgaatttcgatgcaactattcacaagtgtgtaatcgtagtcgacagcgcattgggggtcggacatgccgccaatgcggccagcgtcatcggcgtcagtctagggcgttcggtgagtggcttggtcgggccggatatgcaaagccgtgacaatgtgaattacccaggcgtcatctacgcgccgttgccgattctgctcaccagcaacgagcatttgcagtctctccaagagagggcgctgacggatgaggaaatccacaccatgccattcagtgccttggcgcaatcctgcaaaacttatcaggagtatgaggcccgtatctctggcaccgacagctcgggcatcgaactagttgccattgggctaatcggaccgcagaaaaaaattagcaagttgacagggaatcttccgctgctcaaatga

SEQ ID NO: 355551 - DNA, 621 bp, Pseudomonas aeruginosa
atgctcgatttgacacaagtacttacctattcagtggcgctgggtattgccgccgcaattcccggccccggtatggcagcgctggtagcgcggagcgttagcggtggcacattatcgggcttttgcctgctgcttggattgatcctaggtgacttgacctatctgtcgttcgcagtctttggtctagcaatgatcgctgaacacttcaacgcgctgtttcaactggttcgctggggagcagcactgtatctctgctatctggcttggcagttctggttcgccaaccaccaagctatagaagtgggcaagcccgcgaagaggaaggaactactgtcggcggcaatatccggactgaccattaccctaggcaacccgaagaccatcgctttttatctggcacttctgccgctggcgattaatttggagacggtctcgttacagacctgggcactggtgctggtaccgctgaccattctggtgttgctgagtgtcggagcgttgttcattttcgctgccatgcgtatccggcacttgctgtcgggtcaacgtgctcaacagcagttattccgcggcgcggcgacaatcatggtggctgcagcggcatcaatgttgattcgctga

SEQ ID NO: 355552 - DNA, 195 bp, Pseudomonas aeruginosa
atgcgctttatgtacgcctatctcgacgagataacctttaggggcttcgttgaaaaatttactggcgctcttggcccacccttctttgttgtggtcgagatcttcatttcgaggaggcaggtaagcaaggccgtccccaaagagctttttctgtttggcttttcgctggctctcgacgtagtcaaggaaccctaa

SEQ ID NO: 355553 - DNA, 867 bp, Pseudomonas aeruginosa
atgtctgattttcgtgggatttgggtggccttggtcactccctttcgggccggagagatcgatcttgcttccctacaaggcctggtgggcaagctgttggaggacggggtttcgggcttcgttgtctgcggctctaccggtgaagcggcagcgctgagccaggaagaacagctcgtggtgctggatgctgtactgcggtgggtaccgccgcagcaggtcatcatggggttgtccggcaacaacctccgcgagctgctcgaatttcagcatgagatccagcggcgcccgctggctggcctgctggtaccagcgccttactacattcgtccatctcagcaaggcctggaggctttcttccagactgtggcggacgccgcgaccgtgccgttggtgctttacgacatcccttaccgtaccggcgtgaggattgagcgcgagaccttacgacgtatcgttcgccacccgcgtatcagggctattaaggactgcggtggagacccggagaccaccatggcgctgatcgccgatggcaatgtcgcagtgctgtccggcgaggatctacagatgtttggtagccaatgcctgggggccgtcggagcgatatccgcttcctctcacatccgcaccgaccttcatgtgctgatgcaacgccaggtggcgcagggcgagcttggtgctgcacgccgcaccttttaccgcttgctgccctggatgcaggtggctttcgctgagccaaatccagctgtcatcaagagcgcactggccttgcagggcttgattgccgatgagcttcgcgaaccgatgcaatcatgcacagtggctacacgggaaaagctgagcgcagtgctagctgccatgggggaatag

SEQ ID NO: 355554 - DNA, 219 bp, Pseudomonas aeruginosa
atgcaggcttgccaggtattcagtgatcaggatgaaatcgccgcccgtcttgaacagttgagtctggagcgcgagccactgcgtgaggctatcaatcaagctcacctacagcgggttcgcctgactcctaaccatcccagcatttttcccggccttgaaatgtggggctggttggtaggagcggtgcgcgatcagctgcgcccactagggatggtctga

SEQ ID NO: 355555 - DNA, 1911 bp, Pseudomonas aeruginosa
atgagcgacgacacgaaaagcccccacgaagaaacccacggcctgaaccgccgcggcttcctcggcgcctcggcgctgaccggagccgccgccctggttggcgccagcgccctgggcagcgcggtggtcggccgcgaggcccgggccgcgggcaagggcgagcgcagcaaggccgaggtcgcccccggcgaactggatgagtactacgggttctggagcggcggacattccggcgaagtacgcgtgctcggcgtgccgtcgatgcgcgagctgatgcgcataccggtgttcaacgtcgactcggccaccggctggggcctgaccaacgagagcaagcgggtcctcggcgacagcgcgcgcttcctcaacggcgactgccaccatccgcacatctcgatgaccgacggcaagtacgacggcaagtacctgttcatcaacgacaaggccaacagccgggtcgcgcgcatccgcctggacgtcatgaaatgcgaccgcatcgtcaccattcccaacgtccaggcgatccacggcctgcgcctgcaaaaggtgccgcatacccgctacgtgttctgcaacgccgagttcatcatcccccatcccaacgacggctcgaccttcgacctttccggcgacaacgccttcaccctgtacaacgccatcgacgccgagaccatggaagtggcctggcaggtgatcgtcgacggcaacctcgacaacaccgacatggactacagcggcaggttcgccgcctccacctgctacaactcggagaaggccgtcgacctcggcggcatgatgcgcaacgagcgcgactgggtggtggtgttcgacatcccgcgcatcgaggccgagatcaaggcgaagcgcttcgtcaccctcggcgactcgaaggtgccggtggtcgacggccggcgcaaggacggcaaggacagcccggtgacccgctacatcccggtaccgaagaacccccacgggctgaacacctcgccggacggcaagtacttcatcgccaacggcaagctctcgccgacctgcaccatgatcgccatcgagcgcctcggcgacctgttcgccggcaagctggccgacccgcgcgacgtggtggtgggcgagccggaactgggcctcggcccgctgcacaccactttcgatggccgaggcaacgcctataccacgctgttcatcgacagccagttggtgaagtggaacctggccgacgcggtgcgcgcctacaagggcgagaaggtcgactacatccgccagaagctcgacgtgcagtaccagccggggcacaaccacgccaccctgtgcgagaccagcgaagccgacggcaagtggatcgtggtgctcagcaagttctccaaggaccgcttcctgcccaccggtccgctgcacccggagaacgaccagttgatcgacatttccggcgaggaaatgaagctggtccacgacggcccgaccttcgccgaaccgcacgattgcatcctcgcccgccgcgaccagatcaagacccgcaagatctgggaccgcaaggacccgttcttcgccgagacggtcaagcgcgcggaaaaggacggcatcgacctgatgaaggacaacaaggtcatccgcgagggcaacaaggtccgcgtctacatggtctcgatggcgccctccttcggcctcaccgagttcaaggtgaagcagggcgacgaagtcaccgtgaccatcaccaacctcgacgagatcgaggacgtgacccacggcttcgtcatggtcaaccacggcgtctgcatggagatcagcccgcaacagacctcgtcgatcaccttcgtcgccgataagcccggggtgcactggtactactgcagctggttctgccacgccctgcacatggaaatgtgcgggcggatgctggtggaaaaggcttga

SEQ ID NO: 355556 - DNA, 1005 bp, Pseudomonas aeruginosa; identical to SEQ ID NO: 333004

SEQ ID NO: 355557 - DNA, 483 bp, Pseudomonas aeruginosa
atggtaaaggccaggacggcgtgggcgctcggtgcccccaatctgctgcgggtgttggcttatcgcatgggggtgatgacagggctcaatcccgtccggcgtttgcaggagagagcgccgtccggtgatttcttcctgccgacgccgccccgtccctcggtagtttcctggctcgacaagacgccctggctgggtcgttacttcggctacgtgccttatgccgctgattccgttcccgattggcacagtaatctgctgactggagtgggaatgaccaattctgatcggaattggtgggagatccccgatttcgatctggcagtgggagacatcaaggctgtctgggaggcgtcgcgtttcgactgggtgcctgctttggcgcaaaaagctctggctggtgagagtggtgcgctggacaaactgaatgcctggttgaacgactggtgcatgaataatcctcctgaatcgccccggctttcctag

SEQ ID NO: 355558 - DNA, 1944 bp, Pseudomonas aeruginosa
atgctcggcggtctggtgccggcgttccgtggcgtaaccactgggttctattccggcctggtcaccgccatgaacccctacccgaagacctgggaaattctgcgtcgaggcgggaaccgcctgtgggacggcaacccctggtatcccgaaaagcaatttatctggctcgcggacggtcagatcaaagcgatgaacccggcgcacatcctttatctcgtctacaccggccgggacttccgggggctggcccgcacgcagatggacgaggcgagctggcgggtcgctgccgacaagctgtatgccgagggtttcgggctgtgctttgaatggaccaggtccgacacgttcgccaacttctgcgagacggtgaaatcgcatatcggagccgaggtctacccgaaccgccagactgggcagatcagcatccggctcctgcgtgacgactacaacgttgctgacctgccgctgttcgacgaagacagcggcctcctggagatcacccaggagaagaccggctcgacgtcgctcgcgccgagccagcttatcgtgaagtacatcgaccagaccgacggtgcgcagcgccaagtcatcgtcaacaacaacgcggtcgccgcgtcgcaggggcggcggtcgtccgaggaagtcgagttcctgggcgtgccgactggcgagctggccgggcgagtcggtgagcgggaaatgcgtctgaagaccaccggcctgaagcgctataagggcgtattcgaccgccgtgcccgtagcctgaacccaggccagccgttccgcatccgttcgacccggcgcggcatccctgaaaccgtcgtccgggtcggccggatcgaggacaacttcctcggcgacggcaagatcaccctgaccgtcgtccaggaccagttcaatctgccggcgactaccggcgtggcaccaccgccaccgggctggaccccgcccgaccggacgcctcgggcggtcaccgtgcggcgtctgatcgaggcgccatatcgcgagctggccggcgtgatcgatccggcgaatctccagctcctggacgtgagcgcgtcctacctggccgcgctggccgaggcgccgaccagcctgtcgcagagctacacactgaccgaccgcgtcggcagctctggcgcgttcgttgatcgcggaaccggcgactggtgcccgaccggactactcgccgccgagctgccgctggcggccggcccgagcgtggtcacgctgacgaacgccagtcggctggaggacgtcactgtcggccaggcggctgcggtggacgacgagatagtccgggtcgatgcggtcaactacgccagcggcgcggtcaccctcgcgcgcggctgcgccgataccgtaccagccaagcatctggccggggctcgggtctggttctacgacacgttcgaagcggtggacgagacggtatacagccagggcgtgacgctccaggcccggctgctgaccaacaccagcgagggccagctcgccccggcgctggccgccaccgacagcctcactctgaccgggcgccagggcaagccgtatccgcccggccagttccgaatcaacggcagcgcgtacccgacgaaggtctacggggcgctgtcggtgagctgggcgaagcgcgaccgcatcggccaggccgaccagttgatcgataccactgtcggcaacatcgggcccgaagatggggcgacggtgacgctccaggtctacagcggcacgacgctgaagcgcacctatgccggcctcacatccagtaactggtcctatccgctggccgaagacgtcgctgacggcccgctccaggacgtgcgcctggtcctgcgcagcgtccgcgacggcatccaatcctggcagcaacacgacatcaccatcgaacgacacggcctgggcttccgcttgggcgaagaccttggaggcgtttccgcatga

SEQ ID NO: 355559 - DNA, 1944 bp, Pseudomonas aeruginosa
atgcttggcggcctggtgccggcgttccggggcgttaccacgtgcttctattccggcctagttacctcggttaactggtacccgaagaagtgggagattctgcgtcgaggcggcaaccgtctgtgggatggcaacccctggtatcccgaaaagcagttcatctggttagcggacggtcagatcaaggcgatgaacccggcgcacatcctatatctcgtctacaccggccgggacttccggggactggcccgcacgcgaatggacgaggcgagctggcgggccgctgctgacaagctgtatgccgagggtttcgggttgtgctttgaatggaccaggtccgacacgttcgccaacttctgcgagacggtgaagtcgcacattggcgccgaagtctacccgaaccgccagaccggacagatcagcatccggctcctgcgggacgactacaacgtcgcggacctgccgctgttcgacgaggacagcggcctcctggagatcacccaggagaagaccggctcgacctcgctcgcgccgagccagcttatcgtgaagtacatcgaccagaccgacggtgcgcagcgccaagtcatcgtcaacaacaacgcggtcgccgcgtcgcaggggcggcggtcgtccgaggaagtcgagttcctgggcgtgccgactggcgagttggccgggcgagtcagtgaacgggaaatgcgtctgaagacaaccggcctgaagcgctataagggcgtgttcgaccgccgcgcccgtagcctgaaccctggccagccgttccgcatccgttcgacccggcgcggcatccctgaaaccgtcgttcgggtcggccggatcgaggacaacttcctcggcgacggcaagatcacgctgacggtcgtccaggaccagttcaatctgccggcgactaccggcgtggcaccgccaccaccgggctggattccgcccgaccggacacctcgggcggtcacagtacggcgtttgatcgaggcaccctatcgcgagctggccggggtgatcgacccggccaacttgcagctcctggacgtgtccgcgtcgtaccttgccgcgctggccgaggcgccgaccagcctgtcgcagagctacacactgaccgaccgcgtcggcagctctggcgcgttcgttgatcgcggaaccggcgactggtgcccgaccggactactcgccgccgagctgccgctggcggccggtccgaacgtcgtcacgttgacgaacgccagccggctggaggacgtcactgtcggccaggccgcagtcgtggacgatgagatagtccgggtcgatgcagtcaactacgccagcggcacggtcaccctcgcgcgcggctgcgccgataccgtaccggccaagcatctggccggggctcgggtctggttctacgacacgttcgaggcggtggacgaaacggtctacagccagggcgtgacgctccaggcccggctgctaacgaacaccagcgagggccaactggccccggcgctggccgccaccgacagcctgacgctgaccgggcgccaaggtaagccgtacccgcccggccagttccgcatcaacggtagcgcgtacccggcgaaggtctacggggcgttatcagtgagctgggcgaagcgcgaccgcattggccaggccgaccagctgatcgataccacggtcggcaacatcggcccggaagctggggcgacggtgacgctccaggtctacagcggcacgacgctgaagcgcacttacgccggcctcacatccagtagctggtcctatccgctggccgaggacatggcggatggcccgctccaggacgtgcgcctggttctgcgcagcgtccgcgacggcatccaatcctggcagcagcacgacatcacgattgaacgccacggcctcggtttccggcttggcgatgaactaggaggggtttccgcatga

SEQ ID NO: 355560 - DNA, 1218 bp, Pseudomonas aeruginosa
ttgctgctcgatgcgctggacggcatcggccacggctacagctgcattgagctggagtgggcgctacaggggcgcgagtggatgccgctggcgttccaccaccggccgcagagctggttccagctcaatcccgaagaccagaacgagctgcggctgcgcgacaacagcccggccggcgaagccttgcagcccttcggctggatcattcaccggccgcgtgcgcgctccggctatgtggcccgcagcggcctgttccgcgtgctggcctggccgtacctgttccgccactacgccacctccgacctggcggaaatgctggaaatctatggcctgccgatccggctggggaaatatccgccaggtactgccgacgaggagaaggcaaccttgctgcgggccgttaccggcctgggccatgctgccgcagggatcatccccgaaaccatggccatcgacttccagcaggcggcgcagggcagcagcgagccgttcctggcgatgatgcggcaaagcgaagacgccatatccaaggcggtcctgggcggcaccctgaccagcaccaccagccagtcaggcggcggtgcttttgccctgggccaggtgcataacgaggttcggcacgacttgctggcatccgatgcccgccagttggcggccacgttgtcccgcgatctgctctggccgctcctggtgctgaatcgccctggtagtcccgacgtgcgccgggcgccgcgcctagtcttcgacctgcgcgagcaagccgacatcaccagcatggcccagtcgattccggcgctggtcaacgtggggctggagattcccagtgcctgggtctatgacaagctcggcatcccgcagcctgccaagaatgagccagttctgcgttcggctgcgcagcctgcgatcctgagccgccagcatggacaacgggtggcggccttggccaccatcgtaggcccgcgctatggcgatcagcaggcactggacaaggcgctggccgacctgccggcgaaggacatgcaaaaccaggccaacgacctgctcgccccgctcctggaagcggtcaaccgcggagacagcgaaactgaactactcggcgccctcgccgaagcgttcccggacatggatgacagcgccctgacggacgcgctccaccggctgctgttcgccgccgatacctggggccgcctccacggcaacctggaccggatcgactga

SEQ ID NO: 355561 - DNA, 438 bp, Pseudomonas aeruginosa
atgccgctgctctggattgccctattgctcgccctgctcaccggaacctggctgagtgtacaaagcgaccacgcgacctcgagcgccgaactggccgaggtcgataccctggccaggagcttgctgctctaccgctccaggctggcggagtacgcacacgccaaccccggtttcagcggctcgccggcggactccgctcttggtttaccggcctggttccgcaagccagcgcggcttcagggctacatcgccgccggcaccagctacgctttcatcgcctcgccgccggcggggctggcggcggccgtggatgctggtacggaatccgacctggttggcgtcaggcgcaacggccagttagtcacgcgccgcctcggtgccactgccattgcgctccctgctcccatccccgagggcgcggtggtcgcggtcaaataa

SEQ ID NO: 355562 - DNA, 447 bp, Pseudomonas aeruginosa
atggccaacctgctcgccgccctggaggtcgcactgggcaacgtagcagccctggctattgtcgaccgggtacggcaggtcgcagaccgaatttacccaacttcaaacctctcccctgttccgcaggcctggctcgatgtacaggccgagcgccggcgccagatcgccgtcgaaggcttcgataccagcaacgacgacgctagcgctggccagatcgccctggcagccggctgctacgcgctccatgccggcggcatcggcaccgactggccgggcggcattcggaatggctctgcactgttctggccctgggacgaagagtggtggaagcctaagtcggcgcgcgaaaacctggtacgcgccggcgctctggtgctagccgagatcgagcgcctggaccgctccgccaccgagcagggctcaacctgctgcaaggggagcgcgtaa

SEQ ID NO: 355563 - DNA, 342 bp, Pseudomonas aeruginosa
atggcacgccagaactctgcggccaagaccaccgccaaatccaagaccgatccggcgaccgaaaagcccaaggacgaagctctgccgggctccacggatgccacttcgtccaccgcacccgaggcgcccaccgccaaaccagccaacacctcggacgagatcgagggcgtcttcattcgggccaccgttgagcgccgctgtcgagcgggcttctgcttcgacaaggaaggccaaggcttcgctgaaggcgtgctgagcgacaagcagttggaggctctggagtcggacccgctgctcaaggtcgagcgctgcaccttttccggcaaccaggagggcgagtga

SEQ ID NO: 355564 - DNA, 195 bp, Pseudomonas aeruginosa; identical to SEQ ID NO: 344396

SEQ ID NO: 355565 - DNA, 186 bp, Pseudomonas aeruginosa; identical to SEQ ID NO: 323741

SEQ ID NO: 355566 - DNA, 168 bp, Pseudomonas aeruginosa; identical to SEQ ID NO: 350166

SEQ ID NO: 355567 - DNA, 195 bp, Pseudomonas aeruginosa; identical to SEQ ID NO: 346025

SEQ ID NO: 355568 - DNA, 1116 bp, Pseudomonas aeruginosa; identical to SEQ ID NO: 322561

SEQ ID NO: 355569 - DNA, 243 bp, Pseudomonas aeruginosa
atgtgcctttggcttgccgtgactgtgaacggtgaatgcatcgattgcgcgaccgataccgacgagctcgccgcagcaattggctgccagattgcggatctggtttccatgtctggcgatgccatggagggccagcagtgtctttgcgacctggatactgaaaagaccgccttgaagttcgggttctcggtcaattgggctccagagttcggtgaggtcgaaatcttcaaggtgacgggatga

SEQ ID NO: 355570 - DNA, 204 bp, Pseudomonas aeruginosa
atgagtgacatcgttgatcttgcaaacgactacgccgagcgtgaactcgctgaactcctgtactcccgagtcaagtacgtcggcgagagcctgtccgaatgtgaagactgcggcgaggagatcccgctagcgcggcgctcgatcatcccaggtattcgtaaatgccgggactgtgcggaactggctgagcggaggaatgtgtga

SEQ ID NO: 355571 - DNA, 201 bp, Pseudomonas aeruginosa
atggatatcgaaaataagattttggacttggagaaaagtctgggctggacccgtgaagaagctgagtcctgtggctgcaatttccatcctgagggcccctgttcgaattgctgttcacttggctggggcattggcgggatagaagttgtcgcgcaagcgttcaccaaacccgagcacatgaagggaggcggccatgagtga

SEQ ID NO: 355572 - DNA, 234 bp, Pseudomonas aeruginosa
atgagcgaaaacgtctacatacgaactgccgcagacgcaaagaagcacgtcgggcagcaggtatggtgggaggaggatgctcgcagagcttgggttcttcgcaccggcattctggatgatgtccatggaagcgaagtcatgatcgatggcgactggaagcagcgcagataccttaccaatttgcgcacattcaaggatggcggagctttcaagccaggatatcaggagtactga

SEQ ID NO: 355573 - DNA, 192 bp, Pseudomonas aeruginosa
atgaaaaatccactggaactctactgtgacgcgatgcgccacggtgcgactgagatttgcattcagatcgagcaggaaaccggactattcggctacccgccagagctggtcacgcttggactagcagccatccaagaaggaaaagacccgcacgaagctatcgacgcatacgtcgagggagaagagccatga

SEQ ID NO: 355574 - DNA, 642 bp, Pseudomonas aeruginosa
atgcgccgtaccaaagaagacgccgaacagacccgcctcaagatcatcgccgcggcgctggagctgttcagccgcaacggctattcgaacaccaccctggcgatgatcgccgaagccgccggcttcagccgtggcccgatctactggcacttcaagagcaaggacgagctgtacgaagcggtgctggcctactcccaggagccgctggagcagctgatcgagcagagtcgccagctggccggtagcccgcaggctgcgctggagcacttcgtcggcgaatggtttcgcctgctgctggacgagcgctggtatcggcagtccttcgagatcctgctgaacaagaccgaactcaccgcgcagatggcgagcaccctgaaacgcgaacgcaagctcacccgtgccatggtgcagttgctggaagagctgattgccaaggcgcacgcggatgaaggatcggcgcgatcactggccttgctgctctattcgagcctgatgggcatcacccatacctggctgctgtcgcccaagctcttttcgctgagggaacaggcaccgtttctcaccagacgtctgttgagctcgctggcgccgggcttggagatggcaggcgggacaagcggaacgggtcgatcagccgagtag

SEQ ID NO: 355575 - DNA, 1536 bp, Pseudomonas aeruginosa
ttgaactggcgtaattatggggtctttctgcgcggtaaggcctggtacgactacaccttgaacaaccgtgaggtcgaccatggccattcagccaatggttaccaggtgggtgccaagctcaacgatagcggcttcgacgatctggccaagttccaaggcgttgccttgctggatgcctatgtatttggtgacttcgaagtcggcgagcgaccgttgcacttacgcggcggtaatcaggtaattaactggggcgaggggttgttcttccagaatggcctcaactcgatcaacccagtggatcttgccgcgttacgccgcccgggctctcagttgaaggaagctctactcccggtgccactgctcttcgccaacttcggtatcaccgacagcctcaaccttgaggtgttttaccagttgcaatggcgtgagaccgttctggaaggttgcggtacctactttgctagcaacgacttgatccaggatggatgtttcggcttggccaggggcggtattgctgccaaccctaatgatgaggctggttatgccaagggcctctatgtgcatcggctggaggacgacgagccatctgacagcggtcagtttggtatggccatgcgctatttcgccgacagcataagcaccgagttcggcgcctatgccatgaatatccattcgcgcaccccgcagaaccgcgcgcgcaccgacttgcgccctgcggttggagcgggctggatcgcaggtcaggaggccaccaacgccaagtatttcatggccttccccgaggacgtccgcatcttcggtcttagtttttccaccagcctcctgggtgcctcagtgttcggcgagtacagctaccgtccgaatcagcccgtggggctttccctcggcgacaccatcccgagcaccttcggcaatcccaatctactcattcccggtgcaccgctggcaggggagatgaaggctgccgcccccggctcgctgatcaatggttatgaccgcctggaggtgtcgcagctgtcacttgggtttattaagagcttcccccgagtgttgggcgcggatggtcttgatgtaaccggtgaggtcgcgatgaagtacatgcatgacttgccggcgctgagtgagcgtcgttacgggaaaaccgaggcatacggcagcaacatggctgatggccaggggattggttcgccaggctgcaacgctggggtgccagagcaaagttacaaaaaaatcggttgtagccgtgacggctttgtcacggacctttcctggggctatcgcctgcgtgcccagttgaattattcgggtttgctggccggggtcaacgtatcgccatttatgaccttcggtcaggacgtaaagggctggtcccacgacggtaacttcgtcgaagaccgactgctgggttcgctgggggtaagggctagctacaagcaaaactattcggccgaactgtcctggtctggtaccggtaatacgccgctcgtagtgaccgaccgtgatttcgtcgcgttcaacctgcgcatgggcttctga

SEQ ID NO: 355576 - DNA, 2163 bp, Pseudomonas aeruginosa
atgaaaacggagacgaaggtgatcaagggacgccagggcatcgcccgcaatcggcacaccccgttgtgcctgggcctgctgctggcgctgagtccgctggccgcggccgtggccgacgcgcgcaaggacggcgagacggaactgccggacatggtgatcagcggagaaagcacgtctgccacccagccgccgggggtgactaccctgggcaaggtgccgctcaagccgcgcgagctgccgcaatccgccagcgtcatcgaccatgagcgcctcgaacagcagaatctgttcagcctcgacgaagccatgcagcaggccaccggggtcaccgtgcagccgttccagctgctgaccaccgcctactacgtgcgcggcttcaaggtcgactccttcgagctggacggggtgccggcgctgcttggcaatactgccagttcgccgcaggacatggcgatctacgagcgggtcgagatccttcgcggctccaacggactgctgcatggcaccggcaacccggcggccaccgtcaacctggtgcgcaagcggccgcagcgcgaattcgccgccagcactaccctcagcgccgggcgctgggaccgctaccgcgccgaggtcgacgtcggcggcccgctgagcgccagcggcaacgtgcgcggccgagcggtggccgcctacgaggaccgcgactacttctacgacgtggccgaccagggcacccgcctgctctacggggtgaccgagttcgacctgagccccgacaccctgctcaccgtcggtgcgcaataccagcacatcgactcgatcaccaacatggccggggtaccgatggccaaggatgggtccaatctcgggctgtcccgcgacacctacctcgatgtcgactgggaccgcttcaagtgggacacctaccgcgccttcggctccctcgaacagcaactgggcggcggctggaaaggcaaggtcagcgccgaataccaggaagccgattcgcgcctgcgttacgccggctccttcggcgccatcgacccgcagaccggcgacggtggccagctgatgggcgccgcctacaagttcaagagcatccagcgcagcctcgacgccaacctcaatgggccggtgcgactgttcggcctgacccacgaactgctcggtggggtcacctacgcccagggcgagacccgccaggacaccgcacgcttcctcaacctgccgaacaccccggtcaatgtctaccgctgggacccgcacggcgtgccgcgcccgcagatcggccagtacacttcgccgggcaccaccaccaccacccagaaaggcctctatgccctgggccggatcaagctcgccgagccgctgaccctggtggtcggcggccgcgaaagctggtgggaccaggacaccccggccacccgcttcaagcccggtcgccagttcacgccctacggcgggctgatctgggacttcgccagggactggtcgtggtatgtcagctacgccgaggtctaccagccgcaggcggatcgccagacctggaacagcgagccgttgagcccggtggaaggcaagacctacgaaaccgggatcaagggcgaactggccgacggccgcctgaacctgtcgctggcggcgttccgcatcgacctggagaacaatccgcaggaagacccggaccatccggggccgcccaacaatccgttctacatcagcggcggcaaggtgcgcagccagggcttcgagctggaaggcactggctacctgacgccctactggagtctctcggccggctacacctacaccagcaccgagtacctcaaggacagccagaacgactcggggacgcgctactccaccttcaccccgaggcacctgctgcgcctgtggagcaactacgacctgccctggcaggatcggcgctggagcgtcggcggcggactccaggcgcagagcgactacagcgtcgactaccgcggcgtgagcatgcgccagggcggctacgcactggtcaacatgcgcctgggctacaagatcgacgagcactggacggcggcggtcaacgtcaacaacctgttcgaccggacctactaccagagcctgtccaaccccaactggaacaaccgctacggcgaaccgcgcagcttcaacgtcagcctgcggggcgcgttctga

SEQ ID NO: 355577 - DNA, 1008 bp, Pseudomonas aeruginosa
atgagcttaaaagtaggcgctcactacgtacgtgatggggaagatggtactaagttttactggatgtctggagtatccacaaagaccaaagagggtaaggtagattggctagtcacaaagcttacccatgaagcgctagatgttgcgggaaaggtcaccgcagagattcgtgccgagctaaatgatagatacagtttggctaagtcggcaagtaatctgatagagatgcatgattatgaagcgcatctcgattctttgttccttgggtggggagggcatgcacataaactccaagtttttgctgcacaaaccattagggcaagattaaagcggtttatgctggctcataatattgactgggaggtcgcaccacaccaatttagaaggacgttcgctcgatatgtggctcgcagtcaactcggtgatgttcgttatcttcgtgatcatttcaaacattggacgctggatatgactgcgatatatgcagaggatcaagttagagataaagagctgtttgatgaaatctatgttgcaatgcgtcacgaaaagatgctggtgcttgaaagtgtttttgaagaagatgcattggtttctggtggtttggcagagaccattcgtatttttcgatcctctgatgaggcgattcggacgtacaaaagccgccgtgaaatggttcagtttgtatcggaggttgtgcatctgagaagtactggtattgcatggtgtactgcagatagtacgggctgctccggtggcagtgtattggataaaactcgatgcggtgattgctcgaaaagtcttatcgatgaatcgcggctgccacattgggtaggcatatatgctcaaatgttggagcttaaagctatcgctaatgactgtggtccaggtgcgggtgcacgaattgacagcgatattcgacggtgtgaagtcgtccttcaagagcttggagctgatattgaggagcttaagctcggtgttttacttgaaggggggcttcgtcatgcataa

SEQ ID NO: 355578 - DNA, 744 bp, Pseudomonas aeruginosa
atggtttccgaagcgtcagagccggtcgggcctctcaaagaggagcctgttcaatctacctcgcaaaatgttgaggctaatgggcttaaggtcgcggttgacgcggcgattattgagcatgcacagcagaatgccgccagtgaatacggcgaagctcgccgttacctgcaggtggatttcgacgggaatggcagcactgatgcagttgtgatgtacactcttgagccaactagtggcggtaattacagcaaccaatatcttgttcccctcatccataacggtgatgcgtgggaagctaagacacgcctcgatatcatgaactccgcctctgatttggctgacgaaggcaatggcgttctgagctatgtcgagctctcgcacggcccagatgatgcagattgctgcccgtccatggagacaaagcgtctgtataagtggaatggttctgtcttgcaggagtacaaaaatgatggtgcagtgccaacacaggcatcatccaaatctcttgctgaaccgcctttctactcagtgctcacgctgaatgattcatcggacgaaaaagaagtgacgaccaagcgagttttagagtgcagcatggcctcaaagcttgttgggcagttagagtcgatagacatcatcgcagataagattaatcggaccggcttggccaatactattaaccctaatccagaaattatggccgattaccatctgatgattaaaaagggcggttgcaggagctga

SEQ ID NO: 355579 - DNA, 954 bp, Pseudomonas aeruginosa; identical to SEQ ID NO: 325134

SEQ ID NO: 355580 - DNA, 213 bp, Pseudomonas aeruginosa
atggagcatcaggaaacgtcgctgcgcgtggcctacgcgatgcactccagctcgccgaccgcgtggggctgggaagtctccagccgcaccggatacggctggggaaccgcctcgacagagcccgaggcaatccttgacggactcgcgtacctgcagcgcgttgcgcagctcatacgcttggagggctcccctcacgtccaggcgctgcgatag

SEQ ID NO: 355581 - DNA, 705 bp, Pseudomonas aeruginosa; identical to SEQ ID NO: 8686

SEQ ID NO: 355582 - DNA, 462 bp, Pseudomonas aeruginosa
atgaaactcgttccgctcacctcagtaccaaacccggactggcttcatcttcggaaggcgctctggcccgacggttctgatgccgagcacgagcaggagatggcgcagtttgtcgccaacccgaacaggtacggtcagttcatggcgtgctccgacgacggaaccccgaccggcttcgtcgaggtgtccatcagatccgactacgtcaatggaaccgatacgactccagtcgcgttcttggagggcatgtacgtcgttccagaagcaagaaaacatggcgtagcgcgaaagatgttggccgctgtgcaggcatgggcgctggcacaaggctgcacggagcttgcctccgatacgcagctcgagaacactctgagccaggcagttcatgcgcgcctcggcttcaccgagaccgaacgcgtcgtctacttcaacatgcggttgggtcccgagaatgccgcctaa

SEQ ID NO: 355583 - DNA, 219 bp, Pseudomonas aeruginosa
ttgcaaggtcaacgcatcggctatgtccgcgtcagcagcttcgaccagaacccggaacggcaattggagggtgttcaggtggcgcgggtgttcaccgacaaggcttctggcaaggacacccagcgtcccgagctggaaaggctgctggccttcgtccgcgagggcgacaccgtggtggtgcatagcatggacggcactgttgcaaatagtcggtggtga

SEQ ID NO: 355584 - DNA, 453 bp, Pseudomonas aeruginosa
atgaacccattcaaaggccggcattttcagcgtgacatcattctgtgggccgtacgctggtactgcaaatacggcatcagttaccgtgagctgcaggagatgctggctgaacgcggagtgaatgtcgatcactccacgatttaccgctgggttcagcgttatgcgcctgaaatggaaaaacggctgcgctggtactggcgtaacccttccgatctttgcccgtggcacatggatgaaacctacgtgaaggtcaatggccgctgggcgtatctgtaccgggccgtcgacagccggggccgcactgtcgatttttatctctcctcccgtcgtaacagcaaagctgcataccggtttctgggtaaaatcctcaacaacgtgaagaagtggcagatcccgcgattcatcaacacggataaagcgcccgcctatggtcgcgcgcttgctggggtctga

SEQ ID NO: 355585 - DNA, 267 bp, Pseudomonas aeruginosa
atgcccaagcgccgcaagttcgccgctgcccagcaccaagccgtttacgacgagttgcgcaacatgcgccccgatcccgagcgtgtgcgcggcatgggtggcggcgggaacgcctacgctgttggctacaccaggcctgacgctcgtaattgcctgttcccgcgcggatcacgcgcctatgcccactgggcggccggggtggacaacgcccgcgacgatgccaaggtatccgataagaagaaggccgaatccaccgccactacatga

SEQ ID NO: 355586 - DNA, 1014 bp, Pseudomonas aeruginosa
atgtacaaccttcccgttttcatcgttgacacaacccctgcccgataccgtcacctcgtccagggcctggccgaaggcctcggccaggacaggttctacctcatcagtctgcagaacttcggcctgttcgatttcaagtacccccacggcctcaccttcaccgccctgccctttgttgacgaacctcaatggaagccccgtgagtggacacaccctgtcgtctacctcgccgcccgcggcgagtacgcagcacttgaggctgtcacgccgggcgacgtgctggctgatgcagccgaaatcatctgcgcgtgcagccccgatcccaccggggcgcacgctttccacgtcttgctttcgcagacgctgggcgttcaggcctcgcaggcgccgcatcgctggctgccgctgatgagcatgagccagagagggattgccgaggcctttgccgccgacaacttgaccacgcacgaccccgcttggcaggcgctgctacgccgcgcagaggccaagcggtttttcgagttcaacttcaacgtcaactcgttgatgctgttcggcaaggccttgcgcgccttgggcgtcgaggcgcctggcttcctcatgagcaagtggatgctccaggtcctgtactggtttgagtgcgatcagcggcatggccctttcacggcaggcaaagcgctgctgcacatggaagattggtcgggctgggttcctcatgccccgaagccgtctccaggcgtcctaggctccgctgcaagccgctaccagatcctcgaaaacctgctggcggtcgggctgctacagcgcgaccgccaggggctgtacagcatctcgaaactcggtagcgacttcatcgtgagcattcataccggctgccaggatatggacctgccgtggcgactgcgcgcctgggaagatgcttggccggagtcacgaccgaagatcgagcgctacctgcgaaccgttttcggccggcagaagcggttccgcagcccgttgcgggcaaagcggtag

SEQ ID NO: 355587 - DNA, 219 bp, Pseudomonas aeruginosa
atgcccgcttacactgtgacttggaccatcgacgtagacgttgagggggaccacaaggacgccgcgcagcacgtcgccgacagctatttccagggccgtatagcggccggggagcacggcagcgcttgcatgtttgtcgtaactggcccggacaatgcccccgccgaagttgacctggcggacagcctgtccgacttggaaggagacgacaccctctga

SEQ ID NO: 355588 - DNA, 408 bp, Pseudomonas aeruginosa
atggcacaagcagccaagaagaccgaaacccggaagcgccgccgttacagcggcccccgcctgacccgcgacgaggtacgcaagcaagcgctggccaacgccctggcagacaagagcgcggccaactacgaaacgatcatcgagggcttcatggataaaggcatcgagccggacgacatcatccctcgcgtcaacgtcttcacctacaacgcttggcaagagctggggcgtcaggtccgcaagggtgagaaaggcgtgaagatcgtttcaatggtccccgtccgtgcccgcaaggacggcgacgaggaagggccgcccgtggtggacggcgacggcaagccgcgtatgcggtcggtgacggcgaccgtcttccacatcagccaaaccgaccccatcgaaaaggcgtga

SEQ ID NO: 355589 - DNA, 171 bp, Pseudomonas aeruginosa
atgtcggaaagacaaatccgggcggggctcaacaccccgctcagcaagctgggagagctgccggacgaactgtttctggcctgcctgctgtcggtcccttcgcggctgcaggacgcgctagtcagcaagtggagcgcacagctcaacactaagaagcatcaccgccactaa

SEQ ID NO: 355590 - DNA, 774 bp, Pseudomonas aeruginosa
atgtcgaatgaagtattaagcgttgacacgttgaagggcgaaacactgccggcgctgttccgtgacccctccgctatcggggaatacggcgctgtagagtcgaacgcgaccgccctggacgagttttcgagcctgatggaacgcggcgccgtcacggcgctggccggcaagatcggcgagatcgtcacggcgctcggcgccgccgatccgcaaaagatcgcgcagaagcctacgtggcttgagcgtgtacttggtggcggcctggaaaagagcgtccgctatcaggtggcgcgcaagtccctggaaaagctgctggaggacgccgaagggcatgcccagcgggtacgcgacaccgtgcgcgccctggaccagatgctgctggcccacgccggccaggccgagcgcctgcgagtctgcattcaagcgggccgggagtttctggacgagaacccccaggccggcgcggtcactgccggcgccctggagttcgaccgaccgcgcgagcggttcgctcgcaaactggccaacctggcgaccctgctgtcatcccatgaaatgagtgtcacgcagatgaagctcaccagggcgcaggcggtggacatgctcgaccgtttcagcgaaacggcgagcgtgctagtccccgtctggcggcagcacacgcttgccctcatcacaaccaagaacatgagcccggcgatggtcgaggaagccacgaaagcgcatcgagcgctgatgcgcagcctttccaagagcctggaaggcatcgacggctaa

SEQ ID NO: 355591 - DNA, 1134 bp, Pseudomonas aeruginosa
atgaaacacgaactgcaaaccgccaccgccgcccgcttcgaccttaccccggccaacctgcagggcctcggccttcaagagtccgatgttgccgaggtccgggacgtggccttgcgcatccaacccagcaacccgaccaccgttgccgagttcggccgtgacgtggccgagcacacctcgcgctatgccgacagcctgttggaccaggtgcgcagcgcggaccttgacgaggccggcgccaagctgactcaggtagtcagcattgcccgttcgctgaacatcggcccgctgtccgacaagcgttcgcgggtgcctctggtcggcccgtggatcgacaagctgcgcgtccgctcggtcaacttcatgggcaagttcgacaccacccgcgagcagatcgaggccttgattggagaagtccagaccacgcagggcaacatccaggcgcgcaacgccgggcttgaagatatgttcggcgccgtgcgtcaagagcaccgtctgctgggcatccacatcgctgccggccgcgtccgcctcggcgagctgcgtacccaggccgaggcactgcgcgggaacatcggcaacgacccggcgcgtgtgcaggagcttgccgacctcgatgcgatcattgccaacctcgacaagcgaatcggcgacctgatggccctgcagcattcggcaatgcagagcctgccgaccattcgcatgatccaggcgaacaaccagatgctggtggacaagtttcacaccatccgcgaaatcaccgtgccggcgtggaagcgtcaattcatgctcgcgctgaccctgaacgagcagcgcaatgcggtcgagctggcgacaacgatcgacaacaccaccaacgagctgctacgccgcaacgccgacctgttgcaccgcaactcggtggagactgccagagcgaaccagcgcctggtgatcgacgttgacaccctcaaggacgtgcagaacacgcttatcaagaccgtggaagatgtgatccgcatccagcaggacggcgtgcaacagcgcaaggaagccgagaagcagattgaagccatgcgcggcgacctgcgggcgcgcctgacccgccagccggccgctggcgagctgatcggcaaggagggcgcagccgtatga

SEQ ID NO: 355592 - DNA, 936 bp, Pseudomonas aeruginosa
atgagcttcgaccagatcaacgacgacataaagggccagatcatggccctggagctgcgagagaaggcctttacgaagcgcctgcggcagttcgcgccggcaggcgcggccaactgcctggccgccgccgtggcgctcggcgtggccggtttcctggggcctgatgcctacccgtcaagcgtggatattcccgcccatctgctggggctgttctccgacgctgctccaggcggttctagcggctcaggattggcgggcgtcacctcggcaacgggtagcctggcgtccatgattacgccgatggtcattggtatggccggcatattcggcgtcttcaatgtcgtcacggggatgttgcacggcgacatgggaagagtcgtccggggcgctattgctccggtcttcctcgtcggcaccgtaatgatggcgagcagcctgctgggcctagagggcgacggcggcgacgatggtggcttcggcccgagccctcgaacagcgttcgtcgctgcggtttccgaccggaagtatcaggccgtggctgccgccctggagaaggtcggccagaaggattccgccgagggcctttatgtcctggcccaggtcgtactgtcgaaagacgccctgcgcgcgaccaaaccgctggcgatcaacgccgagctggccaagaaggtcgcggagccatcgaaggacttcaagcccaaggccgaggcgctttacgccatcgagctggctgccctcggcgcgccgcaatcgccgcaggcggtggcgtaccgtgacgaccacctggccaggcagaagaccgcgagaggcatcagcagcgggcttgccgtcagcggcgcggcgctgggcgcagtgggcattgccttcggcctgctcggcagagtcgtatcgcgtcgaattaaacgaatccaccagatgctaggactgacctcatga

SEQ ID NO: 355593 - DNA, 255 bp, Pseudomonas aeruginosa
atgaccagccttgaacaggaaatcatcgccatagcccgccaggaactggcgggcgtcctggccttctacgagaagcaggccggggaccatgtgtccgaggaagaccgaaccaattacctgatccatcaccacgcactgaccaccgtgctgatgctgggccacctgcacaacagcggcatgagcctggaggcccgcgccgccttgcagcagatcgaggacgagagcgccgcagcgttccgcgcctcgccgaactga

SEQ ID NO: 355594 - DNA, 255 bp, Pseudomonas aeruginosa
ttgaagtccatcacccgcaagacggtcacagcatccatcgccctggcgtttctggccttgaccggctgcgcgcagcagccgcccgagccgcgcaacgcttcgccggtacagctcaagaagatcaaccagcagctcgaaaccatgaacgccacgctcaagcagatcgaggcgaaccaggccgaggcgctgacgctgcagcgagcgcagtacacagccgaggtcgaaggcaacagcatgcggcagtccaagaaatag

SEQ ID NO: 355595 - DNA, 345 bp, Pseudomonas aeruginosa
atgaatacccgcgagattgaaaccgcgatcatcacccaggcagccaaatccctgatcgaggccggccacttcatccacatcttcgacggcgccgagctggtcggcgagaagacccaggacctggaggcgatcatgcgcgagtgcttcgccaccgacatgaccgccttctacgtctacggcgtgccctccccggccagcgccgaggcgccgagcctgaacaagctgactgccctcggatgggtgcagttcgtccacggcaacggcgtggacgtgatggccgaccacaccgtcaacctccaaagcctcctgcaggcggccagcgacctggccgacagctacgagtag

SEQ ID NO: 355596 - DNA, 465 bp, Pseudomonas aeruginosa
atgaaccaggcaatcgtcactatccagacgctcggcggttcggtgctgttctacaccggccgcgctggtcagggctggctgtccgaaagcgaaggcgaggccatcgccctcggcgagggcgaggcggagaagatcgccgcgcgctgcaatcgccagtacctgaccattggcctgcgctttgtcgtggccgacaccccgcgcagctacacgacctgcatcgtccgcgatgcaggttcgtggaacctgtacctgctgcccaatggctctattcgctcggttccgaacgagcgggctcgcctggcggggatgcgggagggcttctacggcgaccgcgagcacctgcggatgctgatcgaggccggggagttcccctacctcgaccgcttcaccgatgccgggcttgagttcatggcaggcctggcctgcggcctgcgcgccgggcgcctgactttccgaccacagtag

SEQ ID NO: 355597 - DNA, 480 bp, Pseudomonas aeruginosa
atgagcaacgaggaacagaaggacgcgaccccggccgactacgtgtatacggggcgccgtgtgaccaccaaagggaaggtctgcgcggccatccagatcgtcggcgccgatggccagcttggcgaggtggacctgtacgacttggccgtggccaaggggaagaccatcggcggcatctaccggggcgcgtcgttctaccagggcggtagcaacggcttgaaggccgcgagctgggccagcgcctggcaagaccctaccgcgcgcgctgactggctcgcccgcgacgaggccgcaggcgtccacctgcgtatggccaagctggaggccgacagcaagaaggcccatgaaatcgacgagctgctgctgccgctgcgtaagctctacgcccggtatgcgcagacgcgggactatgccggacaggaggccctggaggccgccgttatgcgttcactgcgccgccgaccgagagccgatcaataa

SEQ ID NO: 355598 - DNA, 639 bp, Pseudomonas aeruginosa
atgcagcaccccaaccacgcagagccctgcgcctgccccgtttgcggggcggtcggcgtcaacatggcggcccttgtcgcccaagagtcgcgcgaaggcgactggtccggctccggtgccggcgtcggcctcggttcctccggccccggcatcgtcgtcggtagcgcctccggcgttcgccgtgaccgtactgcgcgtgccgaggccttcgccgaggcgaagccctccccgcgtgcgcgacaccctgtcaatgcgatcctcggcgccgccgtggccaccctcttcgcgggtatcgtcttcgccaagatgttttcgatgatggccgcgcgcgcggccacttcgaccgatcctacgacccagggcctggcagcagtcgcaccctatgcggctggagtcgtgctagtcgtctgcgtcgtgcttgccggcctcgccttctacaaggcgggcggctcgcccgatccgaaggcgctgcgcgcctttcacgcggcggaggcccgtgaccaggcgcgggaagcggcctactaccgccttcgctactgcgaaaacgaccacatcgttttcgacccgttgacgcgccggcacgcgcgcgccgaacaggcctggattgcccaactcatcgagcagcttgccgctgcctga

SEQ ID NO: 355599 - DNA, 279 bp, Pseudomonas aeruginosa
atgaatgacgttcaatccgtgatccatccaagctatgtcacctggctcgccgtgccgttggcgctgtatgccttctatcacgcgatccgcgtcggccgcatcgccgttaagcgtttccagtaccgcaaccacacgttcagcgatcccgcgctgcagcgcgctttcgaggcgctgcagccccggccaatctggagggatgccctgttcgcgctgctgtatgccctgatgggcttccttgtgctgctcggcctggcagacctgcactggaacttcctatga

SEQ ID NO: 355600 - DNA, 453 bp, Pseudomonas aeruginosa
atgatcccggaagccctggagctgcgcgacggcggcgtctacagccgcgagcacgtcgagcgctggcttgccgtcaatacttcgctgtccagccgtgcaagagcccgccgcgccttcctcgatggcctgcagcctatcgaggtcggcgacaagacctatcttctgcagccgatagaggacgcgcatgtgcgcgtcctctgcggcgacaccgacgagctgaaagcgctgttcaaaaccctggacgaggccgccgaggcggccggcttcctgccgcgctgggtggcttatgccttcggcggcggcctgctgttccttgtgataacgggcctagtgctgattctgatcgttccttacatcagccacatcgcaagatgggtgccaatggtcctgctgctggcgtctttccctgtcggcgccgtcagcgcctaccactacgagaagaaacaacgatga

SEQ ID NO: 355601 - DNA, 537 bp, Pseudomonas aeruginosa
atgaccaccaccgcaccaccagaagaccaagcgctgcgcagcgccctgcagctcttcatgcacatcatggccggcgtctacttcggctgtgctgtctacctgtcgatcatcacgcggtcagtctcgcccgccatcagcatcctgggcatcggtgccttctgcgccgttccaggagtcgcgggctggctgcgcaagcgctcggcggcccccgtccgccacctgggcaccgcggccgcgctcgcctggtgcgctgctctgctcttcggcctcggacgcgcggccgatcacctctacatggtcaacggcagctactaccccacctggctggccacgtccgtgaccatcacccccgagcaggtcggcgtcgtgggcggcgccgagtcgctgtgccatgaccacgggatcggcgactacttccagaagagcaacggcacgttcctgcgctgcggcgtctggtccggcgtcccgaaaaccttctatatcgagaactaccgcgaggcctatcaagcctgggcgaagaaggagggcgtgcaatga

SEQ ID NO: 355602 - DNA, 312 bp, Pseudomonas aeruginosa
atgatccgtcctatctggctgatcgctccggccatgacggccgccgctgccgtgctcggtgcttaccatgcctcgcaggaggttgagcccagcacatacatagccctcaccgaggcctggccgcgactgtcggtgtatgttcgcagcgagctgcgtgatgcgatggtggatggccacctgtcttcctgggagttcgcgggcctcaatcgcaaggtgatggacagcgcgggttacatgacctggactatcggcggcaagacgccggcagagaaggacgctcgggcgaagttcgccgagctgctgcagcagtag

SEQ ID NO: 355603 - DNA, 1626 bp, Pseudomonas aeruginosa
atggctgccaaagaagttaagttcggcgattccgctcgcaagaaaatgctggtcggcgtgaacgtgctggccgatgccgtcaaggccaccctcggcccgaaaggccgcaacgtggttctggacaagtccttcggcgctccgaccatcaccaaggacggcgtttccgtcgccaaggaaatcgagctgaaagacaagttcgagaacatgggcgcgcaactggtgaaagacgttgcctccaaggccaacgacgctgccggtgacggcaccaccaccgcgaccgtcttggcccaggccatcgtcaacgaaggcctgaaggccgttgccgccggcatgaacccgatggacctgaagcgtggcatcgacaaggccaccgtggctatcgtcgcccagctgaaagagctggccaagccctgcgccgacaccaaggccatcgcccaggtaggcaccatctccgccaactccgacgagtccatcggccagatcattgccgaagccatggaaaaagtcggtaaagaaggcgtgatcaccgtcgaggaaggctcgggcctggaaaacgaactgtccgtcgtcgaaggcatgcagttcgatcgcggctacctgtccccctacttcgtgaacaagccggacaccatggctgccgagctggatagcccgctgctgctgctggtcgacaagaagatctccaacatccgcgaaatgctgccggtgctggaagccgtcgccaaggccggccgtccgctgctgatcgtcgccgaggacgtcgagggcgaagccctggccaccctggtggtgaacaacatgcgtggcatcgtcaaggtcgcggctgtcaaggctccgggcttcggcgatcgccgcaaggccatgctgcaggacatcgccatcctcaccggcggtaccgtgatcagcgaagaagtcggcctgagcctggaaggcgctaccctggagcacctgggcaacgccaagcgcgtcgtgatcaacaaggaaaacaccaccatcatcgatggcgccggtgtgcaggctgatatcgaagcccgcgtcctgcagatccgcaagcagatcgaggaaaccacttccgactacgaccgcgagaagctgcaagagcgcctggccaagctggccggcggtgttgccgtgatcaaggtaggcgctgccaccgaagtcgagatgaaagagaagaaagcccgcgtcgaagacgccctgcacgctacccgtgcagcggtggaagagggcgtggttcccggcggcggcgtagccctggttcgtgccctgcaagccatcgaaggcctgaagggtgacaacgaggagcagaacgtcggtatcgccctgctgcgtcgcgccgtcgaatcgccgctgcgccagatcgtggccaacgccggcgacgagccgagcgtagtggtcgacaaggtcaagcagggttccggcaactacggcttcaacgctgctaccggcgtgtacggcgacatgatcgagatgggcatcctggacccggccaaggtcactcgttccgctctgcaggctgcggcctccatcggcggtctgatgatcaccaccgaagccatggttgccgagatcgtggaagacaagccggccatgggcggcatgggcggcatgggcggcatgatgtaa

SEQ ID NO: 355604 - DNA, 1482 bp, Pseudomonas aeruginosa
atgaaatcggtactccaccagatcggcaagacctcgctggcagccgcgctcagcggcgccgtcctgctctccgcccagaccacccacgccgccgccctgtcggtcagccagcagccgctgatgctgatccagggcgtcgccccgaacatgctggtgactctcgacgactcgggcagtatggcttatgcctatgcaccggatagcctggtcaacagccgcaacaacgtctatttcgcgtcgaacagctacaacccgatgtacttcgacccgaatacccagtacaagctgccgaaaaaggtgaccctttccaatggccagatccaggtgcaggactattccaagcccagcttcaccgcggcatggcgcaacggtttcactcaggaaggccgggtaaacctttcccgtgactacaggccaacggtgcagtaccagggcggatcgggagcaggcaccgagtccagcatcgactggtacggggctcctgccttctactaccaatacagcgggggccgcggttgcagcctcaccacttcgagttgctacacccgtgtggaaatcagcggcgcggcccagcagcagaacttcgccaactggtactccttctatcgtacccgcgccctggccacccagaccgccgctaacctggcgttctacagcctgcctgaaaacgcccggatcagttggcaactactgaacagttcctcgtgcctgatcggcagtggctccagtaactgttacaacaactacctgagagacttcaccgggcaacatcgggtgaacttcttcaactggctggagaacctgtcggtcggaggtggtactccgctgcgtcaggccatgactcgagcaggggagtttctcaagaagaccggcgtcaacggcccctatgcctatcgacctggtacccagacctcgccggaatacagctgccgtggcagctatcacattctgatgaccgatggtctttggaacaacgactcggccagcgtaggcaatgccgacagcacgagtcgtagcctccccgatggcaagagctacagcagccagacgccttacagggatgctgcgtccaataccctggccgaccaggccttccattactgggccaccgatgcccggccggatatcgacgacaatatcaagccgtacattccctacccggaccaggccaatccctcggcggagtactggaatccgcgcaacgatccggcgacctggcagcacatggtgacctataccctgggcctgggcctgaccaccagcctcaccagcccgaagtgggagggttccacctactccggcggctatgacgaaatcgccgccgggcgcctcagctggccgaacgcttcgaataaccatagcaacaacgtctatgacctgtggcacgccgcagtgaactcccggggcgagttcttcagcgccgactcgccggaccaactggtcgcggccttccaggacatcctcaaccgaatttcgggctag

SEQ ID NO: 355605 - DNA, 1239 bp, Pseudomonas aeruginosa
gtgctggaagccgccaccgaagtcgaacgctatatcgaaaaaggcaccccgcagttcatgcgcacctcgctggcgctgttctccggcggtttcgccacctttgccctgctctactgcatccagccgatgatgccggtgctgtccaaggcgttttccatcagcgccgcggaaagcagcctggcattgtccgtcgccaccgccatgctcgcccttggcctgctggtcaccggcccgatctccgacgcgatcggtcgcaagccggtgatggtcatctcgctgctggccgccgcgctgttcaccctcggcagcgcggtgatgcccacctggcatggcgtgctgctgatgcgcgcgctggtcgggctgtccttgagcggcctggccgcggtggcgatgacctatctcagcgaagagatccatccgcagcacatcggcctgtcgatgggcctgtacattggcggcaacgccatcggcgggatgagcggacgcctgatcagcggcgtcctggtcgatttcatctcctggcatgccgcactggcggtcctcggcggcctggccctggtcgccgcgctggtgttctggcgcgtgctgcccgaatcgaaacacttccggccggcaccgctgaagccggcgaccctgctcaacggctaccgcctgcacttccgcgacgccggactgccctggctgttcctgatcggtttcctgctgatgggcagcttcgtcaccctgttcaactacatcggctaccgcctgctggccgagccctaccacatgagccaggcggtggtcggcgtgctctcggtggtttacctctcgggcatctacagctcggcctgggtcggttcgctggccgacaagctggggcgacgcaaggtgctctgggcggtcatcctgctgatgctcggcggcctgctgctgaccctgttcgagccgatcccgctgatgctcgccggcctgctgctattcaccttcggcttcttcggcgcgcactcggtagcgagcagctggatcgggcgccgcgccctgcgcgccaagggccaggcctcgtcgctctacctgttcagctactacgtcggctcgagcctggccggcaccctcggcggggtgttctggcattactacggctggaacggcatcgggctgttcatcggctcgctgctggtggtcgcggtattggtctcgctgcacctggcgcgcctgccggccctgcctggcaacaccctggcgcaggccgcccactga

SEQ ID NO: 355606 - DNA, 207 bp, Pseudomonas aeruginosa
atggttgcgatagccctggcggaaatcgccctggccctgcgcgacgtcgctgtcgatcgactcttccagtacctgcggctgccgcccttcgtggagaacctcggtaagcagccagagatcgttccattcgccgcggggatgcgcggacagcgtcaggaagtgtccgctgagcagcgccggttcgtcgctttcgcccctggcctgtag

SEQ ID NO: 355607 - DNA, 690 bp, Pseudomonas aeruginosa
gtgagctctaccaaagctgcggaaatgaccaaattgctggaaaatattcatcgcgcggtgaatatcggcctggtcaatgagatgaaagtagtcgcggaccgaatgggtatcgatatttttgaagtggtagatgctgcagcgaccaaaccttttggatttaccccttattatccagggcctggtttgggagggcactgtattcccatcgatcctttctacctgacctggaaagcacgcgaatatggcttgcatactcgcttcatcgaactttctggtgaagtcaacaaggctatgccggagtatgtagtcagtaagctaatggatgggctgaatgaaagaggtaaggctcttaaaggcagtcgcgtcttggtactgggtattgcctataagaaaaacgtagatgatatgcgtgagtctccttcggttgaaatcatgaaactgattcaggccaaaggaggcattgtctcttatagcgatccccatgttcccagtttccccaaaatgcgtgagcatcactttgaccttgctagtgagcctctgactgccgaaaggctttctcgtttcgatgcggttgtgttagcaactgatcatgatcggtttgattacgatcttatgcatgctcacgccagcttggttgtagatagtcgtggaaaatatcgggcgccatcgcagaaggtaatcaaagcctga

SEQ ID NO: 355608 - DNA, 723 bp, Pseudomonas aeruginosa
atggggcttttgtctttgctcgcaggacagcgaggagggtttgttatttctctattcatgctgctctgggcatatggaataaaccataaggtcagttggtttggcgtactggctgccttttctttgttttttctcagcctggttttgtttggctctttaagtgcaaggagtttggccgttaatttagatagtggttggttagggtttgtctccaagtttctatatgatcaggggatatccttgatggtctttgatgtttctactaaggtttctgactatcctctggtggctacgattcagaattttgtccctggtgcgtctaggcttgcatcaatcttctatgacttgcgcatgcaagacgtgagttatgcagactatcttgcatatcacctcgatcctgttacatatctcggagggctaggtttgggatggagcctacctagtacgttttatatatggtcgttcgagcaggtttttctattttctgccttttcagcatgctttggtttcttgttgaaaaccctagataacaagaccctttccagttcattttttctgggcctggcggcttgcctggtttcggtgattatcattcttcctagaagccagttctctaatgttattcctctggcgatatatttttgtgtattttttcccgttttttcggctttcgcaaaaaagtcaaaatatattatgagtagctcggttagcgatagaggataa

SEQ ID NO: 355609 - DNA, 252 bp, Pseudomonas aeruginosa
atggatcattcccttatcacgagacgccttggcgagcagatccggcagcgccgccagaatcgcggcctgacccaggccaaactggctgccttggggggcatcacccggcagaaggtcatcgccatcgagaggggcgacttgacggtgggtatgacggcctatgcgcgagtgctgggagctctggactgtgagttcgcattggtgtctgcggccatgccgacgttggatgagatccagggagtattcgactga

SEQ ID NO: 355610 - DNA, 633 bp, Pseudomonas aeruginosa
atgcctttcagcaaagagctacatcatttcctaacacaagaaatgtgcatcaatacccgggatctaacagagaaaattagtgcactagagcaacccacccacataaacgacatctatcggttactcgaagagttcttcatcgccacacaagaaaaagaggcagaggcgaaaatacagaaaacattcttaagctacgaacatctcttcgaaaacgaacctgcttacgcaatcattgacccaatgaggcatgcgtttgacggctttgcttacggcgggttacatcaactattcactagacaagagaatgaggcatggtatccaaaaatatgcttgaccagagagctaaaacccaatgacatcgcaaccctaggcaaaaccgtaaaaatctatcgtggttgcagcgctagtgaacacgcgtctaaaatctacggccaatcatggtccacctcgaaaaaagtagctgaagaatttgcctatatccactaccaaagtcagtcatggttcaatgcagaagatcgtgtagtactgcagtccacgatccctagatcagctattttttactcgaaacagcattgtgaattcgaagtagtggtaaatacaaaccacctaggcgccgtgcgagtacttgaatag

SEQ ID NO: 355611 - DNA, 1062 bp, Pseudomonas aeruginosa
atgttcgggaaaaattttttatacatcctttttagagagggcggaatctgccacaagatgggggtctccagcgacatttgtcgccgaataaacgatttaaataggcaatttggaccgttttgcccaaaccgctcattggttcttcgcaccgacagcaaaagcgaagcctatatgttggagacgttattaaagtgctcatactcaggctacaacactccgcttcctgtgaggctttatacggatggagaaaccgagtggttcgcagaagaatgctacgatgacatgtgcagttcattagccttatttgccaaagaaagaatgggcgatgggtatgacatttcccctgtggaccctcaaatcttcaaaccacttactgaaaatagtgtttctaagcaacacagatttcaacgtttcctggaaggaagaagagcgcagattaaagttctttgcgaaaatacaaaaaatgtcaaaaattttagaacagcaatcaagttgatgatgcctaaacttattggcgtcgtgaagcttgactccaatgaatttaacagtgcttacgagatattcttgagcggtgattcatcagcggagttgcttgatgagatttttcgggtctcacgcttaagcgcggataatgacgaggtttgggcgggagctaatttatgtgtgtcaacacaaagctcttccatctataaaaaagcttcattttcaattcctcatcgtggtgccccctttgaaaatagctgggaatcaaaggggaaactattaacttacatttcgatgctcgaagatttagcggtagcgtttcctatgcctccggcatatcaacaacatgtcgggcgttccttcctcgatgagctgtcgcttgatgaacttactttctaccgcagtgcgatttgggaagcgctgttcagtcatgcttctgacaatgatgtcaaaaatggcagtaaagtatcctgcaatacgaagagcactaagtcgacaacgaccaaagctttgaacggcgacccgccgggtgagaagcctagcgctcagcttagtcttgattttttgttacatgattaa

SEQ ID NO: 355612 - DNA, 351 bp, Pseudomonas aeruginosa
atgaccctgccgctcatcaccgagacggagcgcgagcaactgctggcgaacggccatgcctgggcggtgggccaggccgtcgacctgctgccggtggtgcgcctattcactcctgacgcgcacgcgacctggcttctggcttcgctcgatccgtccgacgagaacacggcttatggcttgtgcgacgtaggtatcggcatgccggcgttgggcaccgtgaagctgtccgagctagcgtccatcgtcggaccgctcaagcgtcctatcatgcgcgacctgtacttccaggcgacacgcacgctgtcggagtacacgcgaatagcgcagctcaacggctcgatcatggattga

SEQ ID NO: 355613 - DNA, 798 bp, Pseudomonas aeruginosa
atggccgatcgcaacgccgagcagtggtatcccaccgcggcctatctctacgccctgcacctggatgacctcgccctggcctgggagtacctgcgccggaacccggagtaccgacgcgactggcgggatcgccagcgtcagcccgaagcggcgcaacgctgggggctgcgcctgttggaagacccgcgcctggacgcgcgtgacgcgcatccggtctggtttcccgaccccccggaactgatccacctgtatcccgatgtcgaccccatgcccaactctgtggcgttcgacttctggcgcctcccaggcagcaaagccctggtccatgatggccggcgactgctgctgacgacacgctggccaggctgctgcctgcgcctggccgtggcgcccggtctggagcagggcatggcctatgtccacgccgttcgggcgtgcgccaggccctgcgcacgttactgctccctcgtggcagaactggacaagcgggctgtcgccgcctatgccgcaccgctcgcggtggcccggtgtcgacccagtccggctgcgctgctggatctgcataccctgcaagcactcgacgctaccctggcgggggcgtccttgcgcgaggttgcccaggggctgttcggcccggcggcggtggccgacggctggcacgccgatggcggcctgcgctcgaaggtgcgtcgtctggtacggcgcggccgggagctgatgtgcgacggctatcgccgcttggcacagctcgacgggcgcggggagggccgttcgacgtcgcccgcaaaacgaccctga

SEQ ID NO: 355614 - DNA, 834 bp, Pseudomonas aeruginosa
atgtccagctcggcaccggagcgggaacagctcgacctgttccgcgccttgccgggcgacatggcgccgcgcgacagccaggatctgatggcctacccgttcttctcgctggccaagtcgcggcgcaccacgccgatcgacttccgctccggcagcgtcaccgtgcgcgtggagggcacgcgggaacacggtattgccacgatctgggatgccgacgtgctgatctgggcggccagccagatcgtcgcggcgcgcgacgcgggcctgcacccgtcgcgcctgatgcgcgccacgccctacgagatcctgcgcttcatcgggcgtggggtgtcgctgcgcgactaccagcgcctcaaggctgccctggatcgcctgcagtcgaccacggtggccacctctatccgcgagaccagtggccggcgcctgcaccgtttctcctggatcaacgagtggaaggagctggccgacacccgcggtacgccgctgggcatcgagctgatcttgccggactggttctacgcgggcgtgctggacgccgccctggtgctgaccatcgacccggcgtatttccggctcaccggcggcatcgagcgctggctgtaccgcctggtgcgcaagcatggcggcaagcagccggacggctggcagttcgacttccgccacctgcaccgcaagtcgggcagcacggccaggctctgcgacttcgcctgcgatctgcgcgccctggtggcgcggcagtcgttgcccggctacgagctcggcatcgagcgcataccggaagccaacgtggagctgctgacgttccggcccgtgtcgcccacggcacggggataa

SEQ ID NO: 355615 - DNA, 1980 bp, Pseudomonas aeruginosa
atgaccgagcggcgtgacgacgatttccgcattcggccgaatgccccgaagaaccagggcaagggctttgtctccaaggtgctcaagcaggtcggcaaggccggtggcaagtcggctgtgcggcgcccagcactcgccagtggcaaggggcagcacgccggtcaacgacccggctcgcgcctggggcgtgggcacacggcggcgcgcttcgcgggaacttcccttacgccactctcgcgccgggtggccatcaagaccctgctggtcaatcagcgccaggccagcccacggtcgctggccaagcacctgcgctacatcgaacgcgacggcgccggccgcgacggcgaaccgggccgcgcttatgggccgcaagcggacgatgtcgaccttggtgcattcagggagcgctgccaggacgaccggcaccatttccgcttcatcgtcgcgccagaggatggtgccgagttggacgacctgcgcacctatacccggcatctgatggggcgtatggaggccgacctgggcatgcgcctggactgggtggcggtggatcactggaacaccgacaacccgcacacccacatcgtcctgcgcgggcgcgacgacaccggcaaggacctcatcatcgccggcgactacatcgcccacggcttccgccaccgggccgccgaactggccaccgagtggctggggccacgcaccgagttggagatccagcagaccctgcagcgcgaggtggagcaggagcggtggacgagcctggatcgcacactgaaacgtgaggctggcgacgatggccggatacatatcgaacgcctcaacgagccccgtctgcaacgccagcgcctgctgctgatcggccgcctgcaacgcttgcagcgtatggggctggccgacgagattcggcccggcatctggatactccaggccgacgctgagaagaccttgcgcaccctgggcgagcggggggacatcatccgaacgatgcagcgcgccatgaacggccggccgcgcgagctggcggtgttcgagccgggagaggaggggcgtaccgtgatcgggcgagtggccgccaagggactggccgacgagcggcgcgaccgcggctacctggtcatcgacggcgtggacggcaaggcccactacgtcgcgctgaacggccgcgacgagctggcgaactatcccaccggagccgtggtggaggtacgcggttccaccgaggtgcgggcggccgacaagaacatcgccgcgctggcaagcgatggcctgtaccgcaccgatcatcacctggcgatcgaacaaggccgggccaagcccggccgcgatccgcaggaagtcgtcgcggtccacgtccgccggctggaagccctgcgccgggccggcatcgtggagcgcgtggccgaggggttatggaaggtgccggacgacctggccgaacgtggacgccaatacgacgcccagcgcctcggcggtgtcgccgtggagttgaaatcacacctgcccatcgagcggcaggcgcgggtgattggcgcgacttggttggatcatcagttgatcggtggcggaatggggctgtgcgacgtgggctttggaggcgacgccaggcaggctatgcagcagcgcgccgacttcctggtcgcacaagggctggccgagcggcgcggacagagcgtgatcttcgcccgcaatctgctggcgacgctgcgaagccaggaactgactcagactgcgaaggacattgccgctgataccggcctggagcatcgccctgcggctgacggccagcgtgtggtcggcatctaccggtgcagcgtgatgcttgccagcgggcgctacgcaatgcttgatgacagcattggcttcagcctggtgccgtggaaaccgctgattgaacataggttagggcagcagattgcggcgacggtgcgcggtggtggggtatcgtgggagatcggccggatgcttggagtttctgtttga

SEQ ID NO: 355616 - DNA, 1251 bp, Pseudomonas aeruginosa
atgaagacttacgatttccagtcctccaacgcttttgctgaacgttttgagatagcgccctatacatctggcgcattggatggtttgtgctttgcagttaaagacaacattgatatccgtgatcgatttacctcctatggtagtaagccatggcgtgaagcacatccacgagctgcctacaatgcggtttgtgtagaacaactgttgatggctggagcccgttgtgtcggcaaaacaatagccgacgaatttacctatagtctggacggcgagagctacttctacggtacgccagtgaatccacgcgccccggatcggatcccaggcgggtcttcgagcggctcggcatcggcagtcgcgtgtgggttggtagacttcgcgctgggtaccgactgcggcgggtcaatccggattcccgccagcctttgtggggtgttcggcatgcggccaagcatgcaccgcatctccgaagccggagtacttccttttgcacctagtgtcagcactgttggcgtattagcaaagaatcttcctgttctgcgccaaacgatgcatgtacttcttcgcagccatgacgttgcactaccaccagtaaaaaatatctatttggtgaaggaggccttcgcactagccgaccccgcgatccaggacgccttgtccaagcgtattgcgcatttgaatactttccctaatattactgtcgcctctatttctctgcacgacatcaccggcctggacgtcagccttaaatcttgcaacgaggatgcgcttcgggtactccagacggcggaaattgccaacaccattggaggatggattcaggaaagtcgccccgaacaagagcctaacttccgggcaggatatcgcaacgtcgaacagttcaatcgcagcacgatgagcgatgccctgaagttatgcgaagccctcttttcacgggttgctgcattcactcggccgggcgatgttttctgttacccgacggcacctgtacttgccccgaagaaaggcacactcacaggtagcaaccttaattctctactcgattattacgaccgaaccatggccgtcacatcgtttgctggtgttgcccggctacccgagatcacccttccactggctcaggctaatggtatccctgtcgggctttctctggcagctggtcactatcaagatgagttcctacttgacgcgagtctgcgcctgtggggttcgcaaccaatggggttagacttatgctccacaactacgtga

SEQ ID NO: 355617 - DNA, 648 bp, Pseudomonas aeruginosa
atgcagcagttcttgatgattgtcgcagcccactttctggcgctgctgtctcccggtcccgattttttcctgatcgcgcgcacctccatttcctctggttggcgtgtcgccagcggcgcctgcctgggcatcgctctggcaaatggcaccttcatcgtcgctgcattcgcgggcttctcggtgttgtacccgggaagcctcccattcgtcaccttgcagcttgccggttgcctgtacctactctacttggggtggctattcatccgccatgccggcagcagtcccctgcacgccatgccagccgcgacagtgcagcgacctgccatacccgccaccgcatcctggttccgcagcatgggcatgggctttctgtcgggcatcctcaacccgaagaacgccctgttctatgccagcctggcagccatgctgaccggcacccaagccagcacgggctggaagatcgtctatggcacctggatgttcggcgtggtgctgctttgggatttgctggtggctgtgttgatcggaaatcaggcggtgctccgacgctttgcccgcgcactaccgtggctggaacggatttccggcgcggtgctgatcctgctggccctaggcgtcatcgcggcactggtactcgacgcgggctga

SEQ ID NO: 355618 - DNA, 558 bp, Pseudomonas aeruginosa
atgttgcacctggatgcagagtggctgctggctatccgacaggaaggcgcggaagcgttggatcacccgaaggagacacccattcgcataacgcgcgagccttcactttatgccaggttctgccggctcaatgggctgttgttttctgacgccactgtccacgataaagaggccacgcttatcgagttcgtcggcgactgcgataacgcggcgggacaacggattgctgctccgaccgatgcggccgcgcatcgccagaggttgcaccccctattggagatgttgcgcaacgaaccttcctgcatagcgtcggttggtgaactggcgcaaatggtgggcatgagccgctatcagatgattcgggccttccgcgcggcgaccggcctgacgccgcatgcgtggcagttgaaccaacgcatcaaccacgcacgcgaacagttgcaagcaggggatgacctcgcagacatcgcgtatcgcctgggctttgccgaccagagccatttccagcgcatcttcaaggcccatgcgggcgtgacacccggacgctaccggtcataa

SEQ ID NO: 355619 - DNA, 954 bp, Pseudomonas aeruginosa
atgagcgtgggaatgggattaacctttgcgctggcggtgcatgcggctaccggagacacggtcgcaactcttggtgttgcggcgcatcagctcgcccgcaccgacgggtcttttatctcctactacttgaacacgcgcgacccagcccggcaagcggagttgctgctactggtgattcagggttccgactgtaatagcgtcgcccacagcaaggctgtgccggtattggcgaatcgcgcgctcccgcaagcggatgtactaaccgtggagaagtacggcatcgacgccagcctgccctacgacaacagtcgcggtgtcgatcgcccagactgcccacccacctatctgaggcacgacagcccaacgcagcgcgggcaggatctggccgccgtggtggccgcggtgcagcgtaagcacgggtatcggcaggtcattgccatcggcggcagcgaaggtgccgtggtggcgcacctgctggcggcacaatcgccctacattgccgcagtcatcgcctttaacggcggcggccagtggttcatggacgatttactgcgtagcgtgcgcagcgaacccatgcccgccgtgcagagaaagcaggcagaaaaaggtatgcgagacttcgtccaccatattcagaccaaagagccaaaaggcttgacggccagcgaccacggctactcctggtggcgcgacatgctggcactggaccagcttgccctgctcaagcggatatccacgccgatgctcatcatccagtccggccgcgacacctcagtgtcgccgtcctccgtgcagactatggtggctaagctgcgcatgtcgggtaatcgtaatatcgaataccgcacataccctgaactggatcaccggctctctggtccggacggaaccgaccgcatgcccgaggtcgcggacgacatggctgcatggttgagtttggtgctaggcgaatag

SEQ ID NO: 355620 - DNA, 216 bp, Pseudomonas aeruginosa
atgctcgagtttgtcgatcatcatcgcgagaagggttttgccgattccccggccttcgtacgcgggaagcagagccaggacaactatctctccggtatcccgatctccaaagcaatagccaatcatctgaccatccatgcaggccacgaagccaggacaactgccgtctcggatacctgtactccaggactcggtagtgataccgagtgcacctag

SEQ ID NO: 355621 - DNA, 618 bp, Pseudomonas aeruginosa
atgcatcatgagcagctacccccctctcaacacaggccgactcccggccgcccacgtagccaagaggtgacagccatcgccttgaaaactgctttggcacttgcctgtgaagaggacctgagcaagacgacaatcgagcgcatcgctcaagcgagcggaatttcgaaggccgcactctatcgacgctggccaaatgcctggacgattgtcatggaggcgtttttcaacgatttagcgccctcattgaagtacgaccacacaattagcatcacgaatgcgttcaaactagtgaccagcagactcatcgatgagatcaatagtccaaagggggttcttttgccgaagctattcgcagcagcgcagatggatactgatttgcaacgcgcctttctgaacaaatggataactccaaggcgagatgcagcaaaggaagctattgagttagcaagaaaacgcggcgaagtacgacaggacatcaatccagacttgatagtcgatatgatttacggcgcaatctactaccgaatggcaattccatattcaccactggacagagaatactcagcaaaacttgttgacatggctttctctggtagtttgatgacgccttgcacttag

SEQ ID NO: 355622 - DNA, 165 bp, Pseudomonas aeruginosa
atgcgcagtcttctcgtgctctcgatcatcttgctggcggcctgcggtcggccgccctgcgaggatctggccgaaaggctggccgccaaccccgcgcggctcaaggtgctgcgcgcagagtgcgtggccgactggcgggttgtcgtcaaggaggacacaccatga

SEQ ID NO: 355623 - DNA, 2373 bp, Pseudomonas aeruginosa
atgtcgtttgagattactgcaaggactattctgcacttgggcgctgacctgatatcgtcagatgctgttgctttgtacgagcttataaagaactcgatagatgcaaagtcaactactggtgtcgacgtatcttttgagatcgtgattagatcatctgatatttctagtgtgctagatatgatggtgagtcgcgttggaattacacttgatcagttaaaatctgaaatagctaatcgcgtattggctaacgctccagaagagcttaagtctaattttctattcgcagtgcagagcagtaagactattgaggattttaagcaaaaagtaactgaggcttacaggtggtgtaataggatcgttgtctcagactctgggcatgggatgtctcgtgatgacctcaagaatgtattcctaaccattggaactacgagtcgggcaaaggcagtaaatcagtctttggtggatggtgatgttaagtcaccttatcttggtgaaaaaggagtcggtcgtctttctgctatgcgcttaggtcggcacctgcgcgttgaaactgcgactgtggatgatgataaagtcaatgtattagtaattgactggagcgaatttgagcgcgcatatgataagccggcgagcagcgtaaaaattgagcccgagtatggtggctctaaagagcttggggtttcgtttacacgggtaataatttcagatatttctgcagcctggacttttgaacggctcatggatatagcgaaatcccaaatttctaggatgatggacccgttctcttgggctgagaaacgacgctttcaagttaggcttgagttcaatggtattgcagtcgaccaagttaaggttgttgccaaaggtctattggaaaacgcccatgggaagtgtcatgggaagtatgaggtggtttctggtcagccaaagttaacggttaaccttgagtccagtttatatgatggcccaaaaacagaacatatttttgacttgagcgatctatattcgcagtcgggtttgaagcaaagtgggcagccgcattcgatactcaaaacgctaggtcccttcacttttgaattttactggtttaatcggcagcgattaaaggcgatggagggagtgggtgatcgtgaagcggtaaggtctttgatcaaggcgtggacaggtatctgtctttttcgcgatggatatcgggtattgccatacggtgatccgggagacgattggcttggtttggatcgagaggcacttgctgccagcgggtataagttaaatactaagcaactgattggtcgtgttaatatttctagaaataataatcctcaattattagatcaaaccaataggcaagggttaaaggattgtccagaaagcgaagtgttggttcagcttttgaatgtagtggtctctagatggtggcatgattatctcaatgatgcaggtaaggttcaaaagcgacaagccgaattgacatttgattctctgaaagaaagctctgcggtagatacattggagcagagaacaaaagtaagtttaaaagctatcagaaaagactttagtggtgatgcaaggctgttagaggaagtaaaagacgcctttcttgaggtcaaagatgctcatgcgcgagcagttctgaggattagcaccattgaagaggaaaaggagcggctgacccagttggcgggtgttggtttgatggtcgaagtaattgctcatgagttaactcgtgcgactgagttgacccaggttaccttgaaaacgattggtaagaaaagtatcgatggagagactgcagcagcattcaaagttcttgcgcagcaaataaaagttattcaaaaaaggctccacacactagagcctctgtcagtaagtgccaggcagcgacgaagcaatgttaatgtctatgatgtattgacatatgttctggatgctcacgctgctcagtttgatcgacataatatagctcatgctatcgtttctaagtcaaaggttgttaacgcatttattgttgaagggcatgtagtacaaattttagaaaatctgattaacaactcgatctattggatcgatgttttcaggtgtgaacacaataattttgaggggaagattgttatagaggtcttggagtctcctctcaggattcagtattcggataacggaccgggtatacctgtggggcgtcaggagtctgtatttgaaccattttactcgactaaaaatacttctgccgcacgacgtcaaggcctaggcttatatattgcaaggcagaacgcggagatgctcgggggcagcctttctctagttgatgaagggcgttatcgaaatggtcggtttaatacatttgaattggagttgaaggagtcaatggaatga

SEQ ID NO: 355624 - DNA, 1956 bp, Pseudomonas aeruginosa
atgagcctgtcggagctttttgcaagcactggagtaaaaaccgcacatttcattgatgacgcttttgatttggctccgactaaagggctatctcaagaggacgtgcagcactttatcgatagaattgacctgccagccctcgagcgaattggcgagcttacaggtattgcggatattactgatgctgacgcgatagaagcgttgcagatgctagaacatacacgttcggtgttccatgcacgagcggaatttggtgaggcgggagaggcgttattttccgattttttttcagatcgcagcggaaaaaaagcagatcttgaaactttgatagcgttcttgaagaaagctggtgtggagtctgagcgctttggtgttgatggctatcatggttgtgagtctgagccgcaactggtttttattgacttgcgattacgtgagaacggtgatcctatcgcgatagctgatgccgttgacgtatataaaaaaatccgagaaatgtatccgtcatgcaagccgtttgttttcctaatgtcgactttgacggctccactcaagaatcttagggagagcttctttttggaagcgcagatatttgcctcgcagtttgaggcgatatcaaaacatcattttcgtgatgaggaggaaatgcatgcgatttttgcaaattacattcgattcatgccggagcttcatcgcctgtatgacaggattggatttattgaaagtgcaataggtaaggctgcaaaaagtgtgggaaatactttgaggagtttggatctgcccgactattttgttcttcatcataatactgctgcaatagaaaaagttggcttaggaacttatatatctgatctattgttagaatatttagtcaacgaggtagagtcttctccagagctttggagtcttgctgctgagcttgataagtggaatctgcaaaaactgcctcgctctcgttttggtttgacctatgcagcaggtaaaatttactctggaaacatgctgcattcaaatttccgtctggaaagtgaagccgggcgagggcttgggccgaaagatggatatttctacttgggagatgttttctttttaaaaaatgaacacgcttccgggaatcctaagaaagcctatgtaattgcgacgcctgcttgtgatttagtgcgcccagataaacttaaagaaaggactatttttgtttgtgaggggcgtgtcaagaaggtcactctagcgaccacgccgtctggcgatggtggcataccgacgactattatcagcagtcctaaagataaactgaaacaattttcgattgattggaataagaagcggcttcatacatggcacgttgaagaaatgtccgcttttgaaaaagatgagtctgagtacgttcgggttgggagattgcgtccgctttacgcaatacaactccagcatgcgattacggcggatcttagccgtattggcgtgcagcgtgcgccaaatatgcttcagcccatgggggttggtatatttgtatcaaacggcactaaatgggtggcagtggactctgatgatgtcggggagccgtgtgctgcggctgtggccgactcagaggatggcaagcaagctttgtacatcatatctgatgccacagtccggcgtattcgtagaaagataaaagcgtggctgagtcggaactcaacattgccttcttatgtgactcttaaaaaaatagtcgactctgatacttttgaagaaagacttatgtatatgatccatacgcgagcagaaggtgttgctccagaggatgatattgtaagtccgatgcagggtgtggagggaatcagcgaagaagagagcgcaaagatagtccttgtgcgaccaaactctactactgtatatgcgaaggtaaatggggggcgggatgtgagtctcgaacaggaggcgtttctagtgatttctctatttagggttaagtag

SEQ ID NO: 355625 - DNA, 1932 bp, Pseudomonas aeruginosa
atgaggattgctcttatttcgtaccatgccgatactattgtgcgtagaaggccgggcgacgatggactcaaaagagacaagtatctgatggagcttggacagtattacgaaggacgtggcctagcttctgcgaaagatttcatcgaagagctgcgggtagagcttttaaaaattgactctggatatgtgcaaattcactccgttgtgcctcaaatggtttccgcacagttttcgccggaacagcgaatttcaggggtcttttcagcattagacggagtcattcggcaaacgcttaaggacgttgatacaaaggcagtagcgagtgccggtgtaatggggcccaatcgaaatttaacggacgtaaacggcaattcctacgacccccactccgtaattcacgggctatcagtggccagtggagacgttttaatgctggaggcacataaaaacaaatggttcgatgacgaaggtcgaattgtgcttcctggattagtgcctgtgaccggaagcgtcattgaggcggtgggtgcgaacctagccaacgccaacacatggcgtctatggaaaaatattgatgagcgagtccggtatctcggtggaagcctggagcaattttctcaggaccctccggactgggtcttggatcttaagtcgcgctttccagcaataaatactgttttcgaattcaagccagaaattgcagaagagcaatttgacattttggcaaacgagcgtttcgacacgatcgtgcagcaaaataccttaaagctgttcagagaaacgaatgctgcccaaaaggtctacaacactcagggctccataccacttcctccacaaggattggtgtcattcgacgaagcgatttccgcaatttcgctaagccattttacaaaaattgataccttgaagagcctcgctggaggcttgctactgtcagaaaggctgcgagggtacgccgtactgaggctactcgttgtcgaactagaaaaagagcagaacaccttttttccgcgtgtgccgtttgaacgtttgctccatgagcttgaacgctgcggactcacttcagaggttgcaacgacatttatcaaaaaggccacgttcggtaaagcaagtaaagatctttatgatcagcccctcatcaagacgctcgacgggaattatttcttatttgggtgctccttaatacttgcagaccttaccaagacgatgctctctgccttgtcaatagaaggggcatctttcgaagaaaaaggtaaggcttttgaacaagccacaatcagccttctgtgtgatctgggattcaaggcgcgaactcttaaggtcaggcggggagcgaataacgagcacgaattcgactacgatgttgcgtttacatgggatgattacgttttcttcattgaatgcaaaaatcgtggaattccaatgggcaatcccattctgacttaccgtttcaacgaagagatgggagaacatgtcaagcaggtcgagcgccttcgccaaggattgacagactaccctgatatcttaactaacgacttcccagaagccgtagggaagaaaccagtcttctgtatattaaacgccttgccatactcgatgggcgagcttgaaggtatatacgtcatcgacgattctatcttgagcagattcttcacgtcccctactttcggagtcactgtcggtcgactggacggcaaaggcccccaagcccgagatgatctaaagcgcatatgggcaggcacttccccaaccgtgtcggactttctcaaatacctatctgaccctcctcagctcaaaattgcaattgaatactatgaggtcgctggagaactgaagcagatttcgctagatacagcggcagtggtctacgattttagaaggaaggatctaaacggcgaggcgctatctgacatactgaggaagccagactaa

SEQ ID NO: 355626 - DNA, 264 bp, Pseudomonas aeruginosa
atggccctggaggacgccttcctgctggcgcgcctgtggtgcctggcgccgcgcgccgagacgctgatcctgttccagcagcaacgcgaggcgcggatcgagttcatcaggaagcaatcctggatcgtcggccgccttggtcagtgggaatcgccctggagcgtctggctgaggaataccctcgttcgcctggtgccgaatgccagtcgcaggcgcctccaccagcgtcttttcaccggtgtcggtgagatggccgcgcagtag

SEQ ID NO: 355627 - DNA, 342 bp, Pseudomonas aeruginosa
ttgcagaacgcgacccaatatctgcaacgcctggaaatcgcccacaaggtcagcgtcatggacggcaacttcagcaccaccgatctctccaccgggcagcgcaagcgccttgcgctgatcaatgcctggctcgaagagcgaccggtcctggtcttcgacgaatgggccgcagaccaggacccggctttccgcagggtcttctacaccgaactgttgccggacctgaaacgccagggcaagaccatcatcgtgatcagccacgatgatcgctatttcgaaatggcggaccagttgataaggctctcggcaggcaaggtcgtcaaggaaaccgagacggcgtga

SEQ ID NO: 355628 - DNA, 165 bp, Pseudomonas aeruginosa
atggtaggggacgccgctaggaagagcctcaagatgcaggacaaacgcgaaaaggaagctaatagaggcgtgcgtaagtccatgaaggaatgtattaagcccggaaatgttatcgacgatggcgtgaaagaatgtatggaaggattacgagtcaaagagtggtaa

SEQ ID NO: 355629 - DNA, 873 bp, Pseudomonas aeruginosa
atggtgcgctgcttctgtcgcaaccgggccgccgccatcgccgtgcgggtcgaagagctgttccgcgagacctacgggcaactgcttggcggccagccaagccgctacctgctgcagatccgccagcagtaccacctgctggaaatgtcgccggaagcggtcagccacgagagcctgcccgacctgccgagcctgctccagcacctgggccgcgagcgagatggctacagcgccctgaagctggatcgtcacgccctggagggcgaggacctcgggccgatcctgtccatggggcggccggactgcatccaggtgttctaccggcgcgacttcgacagcgccgagatcagcctgctcgacgaacgcaacgccctctggcgccagcgccaggcattgcgtgacgaacgcagcctgctcgcaccgctgcagcgcttcctgcaatcgctgctgtaccggcgcaacgccctgtcgctggcggaacaggtgccggccgcgctggatatccgctactacgagttgctctccaacgacggcagagtgcatgtcgagcctcgcgaggcgccggaggccctggccgggcccgcgctgtacgagctacaggcgctactcgagcgcggcgaacgcaagcgcgtgcaggtcaccctgtactgcgaccaccaggagttttccgaactggagtacggcgccggcctgttcaaggcggtcgcccggcatatcctggcgcatcgcgcggaaagcgaaccctacccctgctacctgaccgacctcgacctgtcgcggctgttcgccgacgaacagccgcaaacgctgcactatctgcgttataaaagcgtcctggaaacggcgctgaaccaggcgctgctggaacaatga

SEQ ID NO: 355630 - DNA, 2298 bp, Pseudomonas aeruginosa
ttgcgccaactggaggagggcggctacctgcgcgccgagggcgagggctggctgggctgcgccgagcgtcccgcgcagagtccggaggacgcctggacggcgttcgccggctgcgcgccggcggcgctctggccggccgagctggtcgcctacctgcgtgacagcgcgcaatccctcggcgagcaactggccgggcggatcagcccggcggcgctgatgttcccgcagggctcggcgcgcatcgccgaggccatgtacagccagggcctgcatgcccaggcgctgcacgaggccatggccgaggccatcgccgccatcgtcgagcgccagccgcaacggcgctggcgcctgctggagcttggcgccggcaccgccgccgccagccgcacggtgatcgcccggttggcgccgctggtgcagcgaggggcggaggtggactacctgttcaccgacgtttccagctacttcctcgccgccgcccgcgagcgcttcgccgaccagccgtgggtacgcttcggccgcttcgacatgaacggcgatcttctcgaccagggcgtggcgccgcactcggtggatatcctgctcagctccggggccttgaacaacgcgctggacaccccggcgctgctggccggcctgcgcgagttgctgagcgccgacgcctggctggtgatccaggaactgacgcgcgagcacaacgagatcagcgtcagccagagcctgatgatggaaaacccgtgcgacctccgcgacgagcgccgccaactgttcgtccacaccgggcaatggctggagtggctggcggcacagggtggcgacctggcttgtggggtggtgccgccgggcagcgctctcgacctgcttggctacgatgtcctgctggctcgctgcaagaccgaccgcgcccgcctggagccggccgagctgctggccttcgtcgaagcgcgggtgccgcgctacatgctcccggcgcagttgcgcgtgctcgaacgcctgccggtcaccggcaacggcaagatcgaccgcaaggccctgaccggctttgcccgccagccccaggcggaccttcggcatggcgtcgcgcaggcaccggccgacgaactggagaatgcgctgctggcactctggcgggaggtgctggacaacccgtcgctgggcgtcgagcaagacttcttcggggctggcggcgactcgctgttgatcgcccagttgatcgcccgtttgcgcgaacgactggaaagcgcccgccggcatccgttcgatcgcctgctacgctgggcgctcagccagccgacgccgcgcggcctggccgaacgcctgcgcagcgcgccggaagagggccgtgggccagccctggccgcggcgcgcggcgtcgccccggcgcagaccggcatgtcgcgcgcaccgctcgccgagggcgcggtggcgctcgacccgctggtgcgcctggtgcccggcgagggcgtgccgagggtgctggtccacgaaggcctcggcacgctgctgccgtaccgcccgctgcttcgcgccctgggtgaggggcggccgttgctgggcctggccgtgcatgacagcgacgcctacctggcgatccccgccgagcatctcaacgcctgcctcggccgccgctacgctgaggcgctccatggcgccgggctgcgtgaggttgacctgctcggctactgctccggcgggctggtcgccctggagaccgccaagtccctggtccagcgcggggtgcgcgtgcgccagctggatatcgtctccagctaccggattccctaccgggtggacgacgagcgcctactgttgttcagcttcgccgcgaccctcggcctggataccgcggcgctcggcttccccgcgccggaacgtctcggccaggcggtgcaggcggcgctcgcgcagacaccggagcgcctgggcgccgaggcgctggcggggctaccgggcctggccgatctcgtcgccctgcgcggccgcgtgctacaggcggccagcggtagcgccgacgccgccagcgtcgaacgcgacaccctctaccggctgttctgtcactcggtgcgtgccagccaggccgaggcgccggagccctacgtcggcgcgctgcggctgttcgtgccggacgccggcaacccattggtgccgcgctacgccgaggccctggagacccaatggcgggccgccgcgcttggcgcgtgcggcatccacgaggtgcccggcgggcacttcgactgcctgggcgaagccctggcgcaatccttgtcgaaacccatgccagaggaggcgagccgatga

SEQ ID NO: 355631 - DNA, 198 bp, Pseudomonas aeruginosa
atgacctgggctgcgcgcgatcagcgccagccctttaccgtcatgcagcagttgcttgtgaccggggatgcgccagaacgcgaaggtcgccgcatcctgcgacggatcggcatcggggtagagctgcaccacggcggcatggccgggcagccaagccggatgcgcgtcgcgcgcatcgagcgccgggtcttccagtag

SEQ ID NO: 355632 - DNA, 780 bp, Pseudomonas aeruginosa
gtgccgtgtacgaccagcaggcccgactctgcgtcctgttgtttcgcgctgccggctgccttcccgttcgcctggagggtgccggccacggccggcgccacgcagaacgtctcggatgcgaagtcgttccgaacgccatgcgcggtcagggcgccggcctggaatagagaccggctctggttctccccaccgaaggcggggacgccggtcattacttcgacagcaggcccttcgtcgccctcgcaattcgggcaaccccactggccaaggctcaggtcgaagaggtacccgcagccgcactggagcgcagtgccgaaaggagcgtgtccggcaatgtcttgcccctcgcctcggcgcggcggagtatcccggcgcatgccttcgcgctcaaaaagtacttcgcatggatcgaatcctgctcgagcacttgcgataacgaacacacgacggcgtcgttgggccaggccgaaatattgggcatccagaaccctccacgcggctgttcgcttgggtccatacacacaaccagcgtccttccatttgccccctggcggctggagttcttcggattcgcccaccagggcgccgaggaagcagccgaaggcgttgtccttgctggagaggactccggggacgttttcccagatgacaacggtctcgtcatcgcctcgggcatttcgaacatggtcaactgcatttgccaattccacatatttgattgtgagcgccccgcgtgggtcggacagtccttcacgcatgccggcaacgctgaaggcttga

SEQ ID NO: 355633 - DNA, 858 bp, Pseudomonas aeruginosa
atgtcatctacccaacaccaactgatcgagcagtgcgccacccgcctgcgcggcatcgtcgaagccctggacaacatccacgacaccagcccgcaccgctggtcgacggacctcgacgatgttcactcctcagccgagagcctgctggccatgatcaaggaccaggcgccgacgcaagccgcccagggcatggccggcgccgccctggcgcaaccctccccggcgcaggccgagcaggcagaggcggagcggccggaaatgtcgccagaacgggccgcgtacttcatgcgtcgcttcaagtccgaagagaagttgctcggccccaatgagcaagccgccgtggactacgtgctgtcgctgctagcccagcacgagagcatcgtcggggcactgcgggctgaactggaatcggagcgcaaccgcgtcaacatctatgtaaacaacaatggaattcgccaggataacgaacgactacgagcggagttgcgcgccgccctggccagggtcgcggagctggagaggcaggagccggtggcatggatgcacgatcagccaaaccgcgtcgatgtcatccatcgagacgtcaaggatctgctacagcgcgtgccgggcagtagtagaggaatccatcgcccactcgatgtcagcgagcattacacgattccactctacaccgcccctgtagcccaggctcagcacagcgtgccggaggtgtcagggatcggacgagacttcgcctatccgcgctccgtagttctgtacctgcgcacagagccgaccgacgacgacctgcgagccatccatgatggtctgcgatctctcgccgccgcgcccggcaaggaggtaggtcatgagtga

SEQ ID NO: 355634 - DNA, 336 bp, Pseudomonas aeruginosa
gtgctgccgctgttccgggtcgcggcgctgctgatgaccatgccggtgatcggcacccagttggtgccggtgcgggtgcgcctgtacctggcgctgggcgtctgcgtggtgctggtgccgaacctgccgccgatgccgcaggtggacgcgctgagcatgaaggccatgctgctgatcggcgagcagatcctggtcggcgccttgctcggcttttccctgcagttgctgttccacgccttcgtgatcgccgggcagatcatctcgatgcagatgggcctgggcttcgcttccatgatcgatccggccaacggcgtctcggtgccggtgctcggctag

SEQ ID NO: 355635 - DNA, 132 bp, Pseudomonas aeruginosa; identical to SEQ ID NO: 335553

SEQ ID NO: 355636 - DNA, 1158 bp, Pseudomonas aeruginosa
atgctgattctgcaagacacgacggagttctcgtacaagcgagacaagcccgagttgataggcttcaccggcgagacgatcagtcgcaaggatccagccggccggtggaagaaacacaccgtctgcggcatcctgatgcactccagcctggcggtgacgagcgacggcctgccgctcggcctgtgcgcgatcaagttctggagccgcaagaagttcaagggcaccaacgccttgaagaaaaagatcaatcccacccgcgtgcctatcgaagagaaggagagctttcgctggcttcagaacctgaggcagtccacggcattgcttgaacagcctgagcgatgcgtgcatgtcggcgaccgcgagagcgacatctacgagctcttctgcacggcccatgagcttggcaccaatttcctggtgagaacctgcgttgatcggctggctggggacggtggccacacgatcgccgacgagatggccgaggtccgggttcaagggttgcatcgtgtcgagttcagagacaaaaggggcgcacgatgcgaagcggtgctggagatcaagtaccgccggatccgggtgttgccgcccatcggcaagcaaaagagctaccccgaactcgagctgacggtccttcacgcgcaagagcgcgatgcccctgaagacaggccaccgctcgactggaagctcatcacgaacttgccggtacgctcgcgcaacgaggccatcgaaaagctcgactggtacgccatgcgttggaagatagagaccttccacaagatcctgaagtcgggctgcaaggccgaggactcccgactgcggaccgctgagcggctggtcaacctgatctcgatctactgcatcgtgagctggcggatcttctggatgacgatgatcaatcgggcctgctcggaagccagtccggccctggcgctgacggaggttgaaatcgatacgctggatcggctgatcgtggatgcagatatcgcagagccttcacgcaaaacactgcacccctacctgaacaagatcgccaggctcggaggctacctcgcgcgcaaaggtgatccgccgccaggcaacatggtgatgtggcgagggctcacgcgccttgctgacatcgtcttgggggccgcgatcgctaaaggaagttgtgggtaa

SEQ ID NO: 355637 - DNA, 159 bp, Pseudomonas aeruginosa
atgaagatcaacgccagcgtcgcgggtgccggcgacggcaagaccatggtcatcacgccggcacaagcgctccagccgggcgactatcgcgtcgaatggcgtgccgtctcctcggacacgcatccgatcacgggtaacgtcaccttcaaggtgaagtaa

SEQ ID NO: 355638 - DNA, 927 bp, Pseudomonas aeruginosa
atggccggggattggttgaccatcgtcctgcgcctggcgctttatctggacctggcggcggcgtttggcgtcgccatgttcggactctatgctttgggcaacgacgagcgatcctcgacgatctcgcgccgctatcgcgtactcattggcgcatccgccgccatcggcattgtcctgtcgatgtggggcatgacggtcatggccaaggccatgtccggtgcccagagctacgcggagctgtcaacgcacgtcttcgacatgctcattacgggcacgcacatgggcatcgcctggtgcattcgcatcctcgcgctgttggtgtgtgtgctcgtcgcaatgttgaaattgaacgctaccttgcgatttgcagtgatggcgctctccaccggcgtggcgctggcgacccttgcgtgggcaggccacggcgcgatggacgacggcgttcgcggctacatccatcttgcgtcggatatcacgcacctctgggcagcgggcgcttgggtgggcgcattggtggcgttcttgatgctggcatcccacaagcaggatgtcgcgcaagacccggtagcggtcctcagtcggacgtcgaatggctttgctcgcataggtacagcgatcgtggctgcactcgtcgtgagtggaattctcaattacctgttgatcgccggaccatcgtttgatccgctcatctcgacgctgtatggccggctgctgatggtaaagctcttgcttttcgcaggcatgctggcgttggctgctgccaatcggtatcggttgagcccgagcctggaggctgctttgaaggcaggcaatcgcgcacaggcagtcatcaagcttagacagagtctgttcacggaggcgaccttggccgttttggttctggcgagcgttgcatggcttggcatcttgtctcccactggaacctag

SEQ ID NO: 355639 - DNA, 285 bp, Pseudomonas aeruginosa; identical to SEQ ID NO: 324060

SEQ ID NO: 355640 - DNA, 159 bp, Pseudomonas aeruginosa; identical to SEQ ID NO: 355637

SEQ ID NO: 355641 - DNA, 927 bp, Pseudomonas aeruginosa; identical to SEQ ID NO: 355638

SEQ ID NO: 355642 - DNA, 285 bp, Pseudomonas aeruginosa; identical to SEQ ID NO: 324060

SEQ ID NO: 355643 - DNA, 891 bp, Pseudomonas aeruginosa
atggagttgcgtcatctacgatgctttgtcgtcttggcagaggagttgcatttcacgcgggcggccgagaggctgcatatagagcaaccccccttgtctcgcgcgatcaaggaattggaagatgagcttggggtcacgctgtttgaccgcgaccgcaggggcacacggctgaccgtggcgggggcggcattcttgcaggacacccgccgactcttcactgtcctggagcaagcgcgtgaaaatgccagagccattgccgcgggcctgaggggcagcctgcgcattgcaatttccgatggtgcgatggacccacgactatcggcgttcctagctcgttgccgcgcggaagagcccgaggtcgagatacgtctctccgaggtaccgctgaccgagcagatacggggcctacggtctggcgacttcacgatcggatttgcacacgcggcggatgttggcgaaggcatcgtggctgaaccgatctggcgagacccgattgtgatcgccgtgccagcgcggcactcgcttcttgcgcacaagcaagttccgctgaacgaacttcagggtcacccactggttctgtgcgacaaactggcctgcgaaggctactgccgagaattaaatcggctgctacaggttctggaacacagactcaacgttgtcgaagaagtgtcgtcgctggacatgatgctaacgctcgtcggcgcaggctatgggattggtttcatgacggcgaccaagattcccatcagccagaggccggacgtggtgattcgccctctggcgcaggacacggcggtaatcacaacctatctgcttcggccagaaagcagcaactcatcggtttcgctggatcgcttcatcgaacgtctgcgaggacctccggatgactaa

SEQ ID NO: 355644 - DNA, 243 bp, Pseudomonas aeruginosa; identical to SEQ ID NO: 324058

SEQ ID NO: 355645 - DNA, 819 bp, Pseudomonas aeruginosa
atgacgcccgcctccttcgtcacgcgcgcctcgctcgccgccgaccttgccagccttggccttgctcccggcgacgccgtgatggtccacgctgccgtcagcaaggttggccgcctgctcgacggccccgatacgatcatcagcgccctctccgacgccgtcggcccggaaggcacggtcctcgcctatgccgattgggaagcgcgctacgaggaactggcggacgagcacgggcgcgtaccggtgcaatggcgcgatcatatcccgcctttcgatccgcagcgctcgcgcgccatccgcgacaatggcgtgctgccggaattcctgcggacgacgccgggcgcactgcgcagcggcaaccccggcgcctcgctcgtcgcgctcggggcgaaggcggagtggttcactgccgaccacccgctcgactacggctatggcgagggcacgccgctggccaagctggtcgccgccggcggcagggtgctgatgctcggagcaccgctcgacacgctgaccctgctgcaccatgccgagcatctggctgatatccccggcaagcggatcaagcggatcgaggtgccgttcgcgacacctacaggcacgcaatggcgcatgatcgaggagttcgacaccggcgatccgatcgtcgcagggctggccgaggactatttcgcgggaatcgtgaccgaattcctcgccagcggccagggtcggcaagggttgatcggcgccgctccctcggtgctggtcgatgccgcagcgatcaccgccttcggcgtcacctggctcgaaaaacggttcggtacgccctcgccctga

SEQ ID NO: 355646 - DNA, 1110 bp, Pseudomonas aeruginosa
atggctctcatgttcccgcggctcgcccgcaatttcgccaaaaatgggtactacccgaccgacgaacccacgctcgaaagagccctcaacgcactgatgcccagcgacgggccgatgtgcatcctcgatccctgcgccggtgaaggcgtggcaatcgccgaagcctctcatgccctcgggcgcgaacagaccaaggcgttcgccgtcgaattcgacgccgagcgggcgcgccatgcccgcggcctggtcgatcactgcctgcacgcggacctgatggacacgatgatctccaagcagtccttcggactactgtggctgaatccaccgtatggcgacctgtccaaggacgtcaacggcaacatcggctatcagggccagggccgtgcccgcctcgaaaagctgttctatcagcgttcgctgtcgctgttgcaatacggcggcgtgctggtcttcatcgtccccggctacgtgctcgacgcggagctggtcggctggttgacgcgccactacaccgatctgcgtatctaccgagcggtggaaacgcagttcaagcaggtggtgatcttcggccgccgggtccgtcagcgggagctggcacccgatggcgtcaaggccgtgcgcaatctgctgctgcaggttgggcttggcgaagtcgaagccgaggaactgccgagcgaatggccgttcctgccgtacatcgtccccgccagtccggccgagccggagcatttcttccgcgtgacgatggagcccgaacagttcgccgacgaggttggccggctgcaaggcctttggccgtcgctggacacgcacttggggaccgcgcagcagtcgctgcgtccaccggcgcgggccttgtcccactggcatctcgccctggctctggccgcgggcgcgatctccggcgtcgtgcgctcccagacggggcgcgtgctcgtcgtcaaaggtgacacccacaaggacaagacgctccagcgggaattcaccgaacgcgaagacggctccatcgccgagacacgcatcctcaccgacaagttcgtgcctgtcatccgcgcgtgggacatgacgcctggctccccgacaaggggcgaggtgctgaccattcgctga

SEQ ID NO: 355647 - DNA, 1737 bp, Pseudomonas aeruginosa
gtgcccggggtgaagctccagttgccgctgccatcggcggtggcctggccgatcgggttgccgccgccatcggtgaggatcaccgtcgcaccggcctccgcggtaccggcgatcacgctgccgttgctcgggtcgatcaccggcgcggccggcgccaccgagtccaccgtggtgctggccgggccgctggtgttgccggcagcgtcctgggccaccgcattgaccaccgtgccattggacagcggcgtgccgggcgtgaagctccagttgccgctgccatcggcggtgacctggccgatcgggttgccgttgccgtcggtgaggatcaccgtggccccggcttccgccgtaccgctgatgacgactccattgctcggattgatcaccggcgccggcggggcgatggcatcgacggtgacgctggcgggaccgctggtgttgccggctgggtcctgggccaccgcgttgatcacggtgccgttggccagcggggtgcccggggtgaacgtccagttgccgctgccgtcggcggtggcctggccgatcgggttaccgccgccatcggtgaggatcaccgtcgcgccggcctccgcggtaccgcttatctcggtgccgttgctcggatcgatcaccggcgccgccggggccacgccatccacagtgatcaccgccggcgcactgtcgacattgcttgggctgcgcgccaccacgttgaccaccgtgccatccggcagcgggatgcctggagtgaaggaccagttgccgctgccgtcggcggtgacctggccaatcgggttgccgttgccatcggtgatgatgatggtgttgccggcgtccgcggtgccgctgatcaccgagccgttgctcggatccacctgcgggatcgacggcagtgaggaatccaccgtcgtggtagcgggagggctggtattgccggcggcgtcgctcgcggtcacgttgaccacggtgccgttgggtagttgcgagccgggcgtgaagctccagttgccgctgccatcggcggtggtctggccgatcgggttgccgttgccgtcggtcaaggtcacggtgctgcccggctcggcggtaccgttgagcaggttgccgttgctcggattgaccacaggcgtgttcggcgccaccgcgtccacggtagtgctgccctgcgggccggtattgcccgcagggtcctgggccacggcgttgaccaccgtgccgttggccagcggcgtggcgggcgtgaagctccagttgccgctgccgtcggcggtggtttcgccgatcgggttgccgttgccgtcggtgaggatcaccttggccccggcctccgcggtgccgctgatggtcgtgccgttgctcggatcgatcaccggcgccggcggcgccaccgcgtccaccgtggtggcggcctgcgggccggtattgccggtcgggtcggtggccgtggcgacgatcaccgtgccgttggccagcggcgtgcccggcgtgaagctccagttgccgctgccgtcggcggtgacctgccctatcgggttgccgccggcatcggtgagggtcaccgtggcaccggcctcggcggtgccgctgatgacgacgccgttgctcgggttgatcaccggcgccggcggcgcgctggaatcgacggtcaccgtcgccggcgggctgctgttaccggaggcgtcctgggccaccacgttgaccacagtaccgttggcgatcggcgtggacggggtgtag

SEQ ID NO: 355648 - DNA, 930 bp, Pseudomonas aeruginosa
atgggtaagctagctggcaagattgtcgtagtgacggggtcggtttcggtcatccccgggttcgattccattggctcggcaacggttcgcgaagccttggccgaaggggccgatggggttgtcatttccgacatcaacgatgagcagggcgaggcattcgccaagagcctgaacgaggaatatggtgaggggcatgcgctctatgtgcataccgacgtgactgatccgaaggatgttgagaaacttttcgagatcactgagaagacctatggtcgggtggatgccatcatggccaatgccggcgtggcgacggctgaggatttcgataaggatcccgaggaggttctgaagtcgaaaaaattcatccagagcgtcaacgaggacggagtgttcaataccgcgctctacggctcgcggctgatgatgaagcacgggaccaagggctcgatcgtgctggtatcgagcatccacggcgtcgccggtcgcccgaaggtggtgaacacggagacgggcgaggtgctgattgaacgcttcaatctggtccagtatacgatggggaaacacggcgttgtcggcctgtcgaaggccctcgcgctgcagttcgcggaatacggaatccgagtgaacaccgtgaatccgggatatattatgacgccgctattccaggccgctgtcacgactgacaaagagaagttgtcgcatgagaaatccttggaaacggatgcctttgacttcacccagctggcggcgctgcacccattgtgcaacgatccggtgaaggatgcagatattgtcccgcgtgggaaatttggtggccgtatgggtgttccggccgaaatcgccaagccggcggtgttcctgatgtccgacgagtcttcctttatgaccggtcagaaactggttgtcgacggcgggtataccgcatgctga

SEQ ID NO: 355649 - DNA, 690 bp, Pseudomonas aeruginosa; identical to SEQ ID NO: 328389

SEQ ID NO: 355650 - DNA, 609 bp, Pseudomonas aeruginosa
atgaatcagaaagcagattgctcaggtgccgcggatgtccacgaccccgaggcggggcagatcgcgcacctgctcgaacgcctccaggctggtgaggccgaggccctgtccgacctacttcccctggtctactcgcagctgcgggcgatcgcccgccgcctgcgccgccgagacgagctcggcagccccaccttgaacaccacggcggtggtgcacgaggcgtatctcaagctcgcccgcaacgatcagcgattcgccgaccgcgtccacttcttcgccgtggcctcgacggcgatgcgccagctcctcgtcgacgccgcccgcaagcggggccgccacaaacgaggagccggagtcgtgccggagcccctcgaccagcggcagatctcgatcgacgaccagagcgccttcgtgctcgagctgaacgaggcgctcgaggtcctcgggaaagagagcccacgcctgctccgggtcgtcgaatgtcgttacttcggcggcctgagcgaggaggagaccgccgaggccctccaggtgagtgtccggaccgtgcggcgcgattggacccgagcgcgggcccacttggccgtggcctttgctccgcagcgatga

SEQ ID NO: 355651 - DNA, 306 bp, Pseudomonas aeruginosa
atggcatcgcatcgcatcgaaacctactgccagaggctggcgttccccatcggggcgctcatcttcagccgaggcattgatcgccttgtccgcgcgggtcgcctggacccgattccgtacttcaggcgccacacccgtggcgactggggtgacgtcaacgtctgccaatggcacgccaacggcgttgcacttcaatcgggcgcgtcgctggaatcgcactatgtgatccacccgggactcgccattcgcatcatcaccgatgcggggcgcagcgtcactgccatcgtgctgccgtccgaagactga

SEQ ID NO: 355652 - DNA, 1125 bp, Pseudomonas aeruginosa
atgcgcctggccggaaccggccagggtcgacgtctgctcggcggcgccggagacttcgctcatggtccgcaccaggtcgcgcgaggtggcggcgatctcgcgagaagtggcgccgatctccgtggtggtcgcggcggtttcggtggcggtggcctgctgctgcttggaggtcgcggcgatctcggtgaccgaggtggtgacctgcaccgaagaacgctgggcctgcgacaccaggcccttgagctcttcggccatgccgttgaaaccggtctcgatggcgccgaattcgtcacgccggccgaggttcaggcgtgcggtgaggtcgccaccggccatcaggtcgaggctgcggacgatcttctggatcggctgggtgatcgcccgcaacagcaggaacccgcagatgccggctaccaccaccgccagcagcagggtcaccagcatgctcagttcggcatcgtccaccgcgtttacgatgttgtccgaggcgcggtcggcgatgtccttgttcagctcgatcatctcgttgaggtacttgcggccctcgcgccagtgctcggtcaacgggccggcgacgagcttgccggcttcctcgaagcgcttctcgcggtaaagctcgagcaccttgtcgtgctgctccaggtagttcttgcgcacggcctggaaaccggcgagcaactcgtggtcgcgggcctcgtccgggttcatggtcttctggtaggaggcgatctgctggtccaggcgctcctcgctggcgaggatactgtcggcctcggccttgctcagctcgtgatcgtcggtgatgccgaacagttcctgggtctgcaagtagttgtcggtccacgaactgcgtaccagggtgatgaagtacatccccggcatggcgtcgtcctggacacggtaggcgcccttttccaccgtcaacatcttcacgtacgcagtagcggccatcagcagcatgatcgcgatgatcacggcgaaacttgccaggattcgctggcgaacagtccagttcttcacatttttccccaagactcgagtccggattcgttcctgccgccacaacggcccgtcaatcgcgcggactgtataggccgtccccggcaccggcaagcagcgccatag

SEQ ID NO: 355653 - DNA, 939 bp, Pseudomonas aeruginosa
atgcagttgcttgaaacggtccggatcggagtcgcgcaggcggttgcggaggaaatcggcgaacagcaggtggaagcgataccactggcgttcgcgatccagcggcaggaggaacaattgcatggactccaggcgttccagcagcgcctggccgtcctggcgcccggtcagggcgttggccaggtcgccgctcaattggctggcaacgccaagggccagcagcgcttcctgcaggtcgccaggcaagcgttcgaagaccgccgccagcagataggcgctgaccgcctgcttgtcgccgtcgagcagggccatttcctgcgcctgcggttgctggcgcagccacaggctgacgagatgcacgcccaccacccagccttcggtctggccatagagcgccttcaggcagggctcgtccagatagagaccgctgcgctcgaggtattcgcgggtttcctcgaagccgaggcgcagctcctcgaggccgatttccagcaacagtcccttggcccgccaggtagccaggctcagcgccggctgcgaacgcgtgcccagggccaggaccagcccgggcggtgcgtactgcaccaggcgattgaggccggtgaagatgtccgggttgctaaccaggtgcaggtcgtcgagcaccagcagcaacggccgcgcatagcgatcgagatcgccgagcaggctttcgatcaccgccaccaccgggacccgcatggtgttctgcaggtaggtctgggcgtcgtcgccaagctgcggcacggcttcgcccagcgcctcgatcagctgccggcagaaacgggcggggtcgtcgtcttcttcggccagcgacagccaggccaccgcctggtctgctacagtgcgctccctggccagggcggcgagcgcgcaggtcttgccgaagccggcaggtgcggaaaacatcagaacgcgtga

SEQ ID NO: 355654 - DNA, 144 bp, Pseudomonas aeruginosa
atgggctggctggacttcacctggggacgcaacgccaatccctacggcggtgccgagagcggcacgggcttcagcagcaccagttcgtcgcgcagcaacgagtggatattccgcaccaacctgaacatcggctactacttctga

SEQ ID NO: 355655 - DNA, 1113 bp, Pseudomonas aeruginosa
atgaacagtaattttagcattcgtttgatggaacctaagcccttgatttggtggaaatcgagaaaaaataagattgatatgcaaccgccttatcaacgacgggggcgactttggtcaaaaaccgataaagcttatctaatagattctattttgaacggctatgatattcccaagttatatatggcggacttcactgtaggacaaaactccaaactcaataaaagcaagctgccgtatgccattattgatggcaagcagcggctagaggccatatttgattttttcaacaatgaggtgacgcttaatgatgattttgttttctcgcagtcgcctgatcttaagcttggagggttaggatacaaggatcttgcgcttaactatccagatatagcagagatatttgaaacatacccgctgacgataatgacggttcatgcggagacagaagacccgataaatgaactatttgttaggctaaaccgaaacaaaccattaacaggcgctgaaatacgaaatgcaatgagcggaccagctccagaagttattcgaaatatatcgagccatgaattttttgtacacaacacagctttttctgtaaagagaggggcggacctaaacacagctgcaaagttgcttatgtttgagtttgaagggaagccagcagaaacaaagaaaaagacactagatgcatttgtggaagatgtaaagcttggtggtccgcgtgacaagctggaactagtcgcacgtagggctcaagagaaccttgacataatgtcagaggtttttctgccgaaagataaattactttctagcgcaggcctaatacctgtttactattggttttgccgtcaaaacaaagactattattatatgataagagagtttttggttgattttgaaagtcaacgcaaggtgaatagatcgttttccgcggaagggccgacaaagaaagggcttcaagagtcctatgtaattttcgataactacaaccgaagtacgaatgaccagcaaagtcatacggggcggctagacatattgaacaaacatttccagcgatggatggcagccgaaagtaagcaaaaaaagatagatagcttccaaagtcagcggtga

SEQ ID NO: 355656 - DNA, 723 bp, Pseudomonas aeruginosa
atggaaaatttgattgacataaaggagttattgatagcagtcggcgcccaagaatctgaaattgagcctgaaattgatggtggtagctttacattagtagatgtaaatatctcaccaattgatttcttatctcaagcggagatagattttgaggaaaacaccaagacctcgcttgccaattgcttaacaaacgcaaaaagggcagttgttagccaaatagatcaaatattgatttcagttggctataaatcttttaggtttaatgtcccgcagaagctagagaaactaaaaagattgggcgttctatcaccatccgcattaagaaagatagtacaagccaggaatcttttggaacacgagtatgaagtttttacaaaggatgagatagaggggtatttagatacagcctctttgtttgtcttgggcatggcagccctattcaaaccttacagtgacaccttgcacataaagctaaggaaagatggagaaatagtaggatacttggattgcggcatacatgaaagaaagagcggggttttttacagtatctatgggtttgaattaataaaagagacacccgtaaatagaggccacgcttatgtcgatataaacacaagcctgtttccggccttaatggctttagggccggccttggaatataattataaagttgcggaagctattgatagggttaaactttccatacatgatctgattaaatag

SEQ ID NO: 355657 - DNA, 255 bp, Pseudomonas aeruginosa
atggcgtacaacgcgcttgtccaccagcctgcaccggcaaggcatcggcaggttcgccaggtaaagaccgccgacgcgactgtctttcgtagcgaacctgtgtctttcgtagcgaacctggcgccctcactcttcttcgacgtcctcttccggcaggccgaacaggtcggccgcgcgcagcagcgcggccagcaggccgtggcgctcccactcgggcaacgcggcgaagcgctcgatcacgtactccggcaatag

SEQ ID NO: 355658 - DNA, 300 bp, Pseudomonas aeruginosa
atggcaagacaagcaaccccaatgaaacagacccgcacccgccattcccaagcctacaaggacgaagcgctggctttggccgagcgcattggcgtcagcaaggctgccgaacagctcggcctgcatgcttcccagctctacggctggcggagcaagaagcaccagactcaggccggcagcgagcgcgagcagtcgctggccgacgagaatgcccgactcaagcggctgttggccgagcacgccgaggagctgaccatcgtaaaaaaggccgccgcgtactttgccaagagcctcaagtga

SEQ ID NO: 355659 - DNA, 462 bp, Pseudomonas aeruginosa; identical to SEQ ID NO: 333904

SEQ ID NO: 355660 - DNA, 777 bp, Pseudomonas aeruginosa
atgaactgtcaccagtatggggctggctatcgggggaggattggagagcagcctgctgacacctgccagcgctctctgccgccgctgcgagggcgcatcttgcgctatcccagcctcatccctggggccgtgtccgcggacggtgctactgggttccggtcaggccgctctccgatcctccctattccaaccataccggggagggcgggtgccacaagggcatcaatgcaaaggaaggttcaactgccagtttgcatgagcctcctcgatgatcttcgatgcctcttcatcatcggtatcgcagcctcgccccgcgccgaggccctcggcgttcatcttcttcagcgcctcctcgccagcattgctcccgctcatctcatcgatgatccgccagggcttaacggcatcagcgtccaagtagcggtaagggtcgagcaccaggccgcaggaaaaggtgttgtccgcattctggatcaatgcacggcagttccgatcgtcaccaagcgcgacaccgaggtcacatacctgagcgatacagcagagaccgcacccgttgcacgaatcgccctctgctggcttgtccaaaactactgcttcaatcagctgccagcgcaaggcgattacctccagaacttcagagtaaagaccgacagaacagaggccatgccgaagatgcaggagccaaacatcaccttgttgagagctgatcggatgatcggctccctgttggcagacatcccgttgagcctggccccactaaggaatagggccgagtag

SEQ ID NO: 355661 - DNA, 213 bp, Pseudomonas aeruginosa
atgacggcatggcccgatcctgcgagagcagttacagcctggaatcagcaccatgaggtcggcgttcaagtggagtaccgttcccggaaagacgcggagccggtgggcacggtaaccaccgcccaggccgaggtcctccagggccacactgccgtggtatggctggaaggtgtttccggctgcgtatcgatcggccactgcacgccggtgtaa

SEQ ID NO: 355662 - DNA, 201 bp, Pseudomonas aeruginosa
atggtcaaggccaacccgaaggaatggcccgactacgagactcaggagctctacgtcatccccgccgaccagatgctggtgcctagggacctgttggagcgtgtgacgaaggattattcggggaaaccgaactgggacgccctggagcctgatcgcctggcagcagtggaagagctcaaggcctggcttaagccatcttaa

SEQ ID NO: 355663 - DNA, 1098 bp, Pseudomonas aeruginosa
atgaacaataccctgactttggcccgggaccgagccaatgacttcgcccgactccacctgcaggagtgtgcagttgagttgctgcgctggaaaaagacctcactcctccccaccgatggccgcgttcgggaattggcgaaactctgctccgagatcgctggccccgctgcatcgctgagtcttgccgaagctactgtttacgacctcgcccttcaggcgcttagtacgccagatttcccaaccaacgcgcccccgatctcgtctctagatctgcagtcgaaggagtccgttacttcgcctctcctaccaaagtccgacctacgccagatagaacttgaatcactggatgacccaggtcgtgtgcttttcttgaacttcgacatgccagggctctccgttcgttacgccggtcaaggcgaggtgaaggtgagcatgctggcagggaatgcgctcctcccgatcagcaagcaggacttctggaccaatgtttcccaccattccttggccgcagcgctcatcgtcctcaaactccaccggccacagtcaagcaatgtccaactgaaggacatcctgacaatccttagcgatctggaaaagatgctggcgctggtcaactctgctcctcagatgcacgccgacgttgccagatggacagactggctccactcctatctttggtactggaaaggggaagagcagggagagtgggctacccgccgctacaaagcattgcatcaaggtctggtaaccaagttgaccgaggtcctcgattcaattgctcaagaaccaaatgtctgtcgctacgcgatcgataccgatggtgacggggccgtcgtatcccagagccaagtcgaagttcaggcctcaccttcggtcgtgagcagagagaacatcgaccgcgcgccagcggatcagtcccaaagaccgaggttggagtcagtcgaggaaggtccaattcagcgggcgctggagatcatcaactggatttcttgccggtcggacatcgcgccaaaagacatgactcggcttgaacgctcaagcgaagaactgactgcattgcttgccacgatttcgcaggccgaagcccagcctacctga

SEQ ID NO: 355664 - DNA, 2205 bp, Pseudomonas aeruginosa
atgttgcgtacggtggccggcttcggacgccccaacaaccatcgggaggttaatcagcggatggccaagacagacgcacgcagtccccgcaccgaacgcgggaccatcgccctgcaggacgcgtcgcaggatatctgggacaagaagtaccggctcaagagcaaggacggtacgccggtggatgccagcgtcgacggtacctggcaacgcgtcgcccgcgcccttgccgatgtcgaggaaaaggcctcccgcgaacactggtacgggcgcttcctctgggccctgcgcaacggtgccatcccggccggccggatcatctccaacgccggcgccctggggcacaagccggccacctcgactatcaactgcaccgtgtccggaaccatccaggactccatggacaacatcctcgagaaagtccacgaggccggcctgacgctcaaggccggctgcggcatcggctatgagttcagcaccctgcgcccgcgcggcgcctacgtttccggtgccggtgcctacaccagcgggccgctgtcgttcatggacatctacgacaagatgtgcttcaccgtcagctccgccggcggccgccgcggcgcgcagatgggcaccttcgatgtcagccacccggacgtccgcgaattcatccgcgccaagcgcgaggacgggcgcttgcgccagttcaacctgagcctgctgatcaccgaccagttcatgcaggcggtggaacaggacgccgactggccgctggtattcccggtgcacgtgaaggagcgcgacgagatcgacctcgacgaccccaacgcggtggtctggcgcgaatggccgatccaggacgactacgtccagcgcgccgacgggctggtcgcctgcaaggtctacggccaggtccgcgcccgccacctgtgggacatgatcatggtctccacctacgactatgcggagccgggcttcatcctcatcgaccgggtcaacgaactgaacaacaactggtggtgcgaggcgatccgcgccaccaacccctgcggcgagcagcctctgccgccgtacggctcgtgtctgctcggctcggtcaacctcacctgcttcgtcgagcagccatttggcgacgaggcgcgcttcgactgggaccgtttccgcgaagtggtgcgggtgtttacccggatgctcgacaacgtggtggaaatcaacggcctgccgctggaacagcaacgccaggaaatccttggcaagcgccggcatggcatgggcttcctcggcctgggctcgaccctgaccctgctcaagctgcgctacggcagtcccgaggcctgcgtattcaccgaggaagtggcgcgggaaatggccctggtgggctgggaagtggccctggagctggccagggagaagggcccggcgccgatcctggcgcaggactacgaagtcactgcggaaatgcttcgcaagcgtccggaaatggccgccgatggctataaggccggcgaccgcatccgcggcagcgtgcttcacgccaagtattcccgctacatgcagcgggtcgccgaacatgctccggaactgatcgaggcgttggctgaaaccggcgcgcgcttcacccaccacagctccatcgcgccgaccgggaccatcagcctgagcctggccaacaatgcctccaacggtatcgagccgagcttcgcccaccattattcgcgcaacctgatccgcgaaggccgcaagaccaaggaaaaggtcgaggtctacagctacgagctgctggcctaccggaccctggtcaacgcccaggccctgccggacagcgacgacccggcgcgacgcctgccggactacttcatcaccgccgacagcgtcaccccggcgcagcacgtggacatccaggcggcggcgcagaagtgggtcgattcgtcgatctccaagaccgccaacgtgcccaccgactacccgttcgaggacttcaaggacatctaccgctacgcctggcaccagggactcaagggctgcaccaccttccgcttcaatcccgaggcgttccagggcgtgctggtcaaggagtccgacctggagaagacccgctaccgcttcgaactggaggacggcagcgtggtggagttcaagggcaacgagcaggtcgagtacgacggtgagatccataccgccgccaacctcttcgacgccttgaaagaaggctattacggcaagtactga

SEQ ID NO: 355665 - DNA, 291 bp, Pseudomonas aeruginosa
gtgcgctcagcgctggagaagatcaccctgagcgacatgatcgagcagcgcagcggccgaatcccgcgcgcgctctatgacctgctgctgaaccctcaatcgctcctccagagcagcaaccttggtctcaagactggcaatgcgcgtgcgctgggacagaaagtcatagcacgcatgctgaacagcaccgctagccgtacggtgatgggtggcagacttcagccggtcggccagatcgtcagggaagtcgcggagctgaacgagcatcgaatcacctcggtcttttggtag

SEQ ID NO: 355666 - DNA, 231 bp, Pseudomonas aeruginosa
atgaaacaactgaaacaactgttctccctgggcaagcgtgaagccgttattggtggctcgttgctgatgacgtccggcctttcgatggccgctgagggcgatatcgacactaccaaggccctggcctatatcgcgggcggcctgactgctgcggcggctgtgaccggtgccatgttcggcctggtcgccctgatcggcgccgccaagaaagcccagcgcgcagggacctaa

SEQ ID NO: 355667 - DNA, 291 bp, Pseudomonas aeruginosa; identical to SEQ ID NO: 355665

SEQ ID NO: 355668 - DNA, 231 bp, Pseudomonas aeruginosa
atgagtgtcggcaatactttgcaggtggttttagataaggatggtcagcgcctcctacagcgctaccgggatgcctataatagaatgctttctacgcctgaggacaaacgtggccccaagaatgggtataaaaaagttgtatctgatatgaatgcggcagcgtgcgactttgcatcatgggttgaggtcattacgcatcaagcctctgaaaataaggccgatgaaaaatag

SEQ ID NO: 355669 - DNA, 720 bp, Pseudomonas aeruginosa
atgaatcgtcccagtggccgtgccgccgaccagctgcgcccgatccgcatcacccgccattacaccaagcacgcagaaggttcggtgctggtcgagttcggcgataccaaggtgatctgcaccgtcagcgccgagtccggggtgccgcgcttcctcaagggccagggccagggttggctaaccgccgagtacggcatgctgccgcgctccaccggcgagcgtaaccagcgcgaggccagccgcggcaagcagggcggtcgtaccctggagatccagcgcctgatcggccgttccctgcgagcggcgctggacctcagcaagctcggcgagaacaccctgtacatcgactgcgacgtgatccaggccgacggcggcacccgcaccgcctcgatcaccggcgccaccgtggcgctgatcgacgccctggcggtgctgaagaagcgtggcgcgctcaagggcaatccgctgaagcagatggtcgccgccgtttccgtgggcatctaccagggcgtgccggtcctcgacctggactacctggaggattccgccgcggaaaccgacctgaacgtagtgatgaccgatgccggcggcttcatcgaggtgcagggaaccgccgaaggcgcgccgttccgtcccgccgagctgaacgccatgctcgaactggcccagcagggcatgcaggagctgttcgaacttcagcgcgccgcgctggccgaatga

SEQ ID NO: 355670 - DNA, 201 bp, Pseudomonas aeruginosa
atgtcgcgggccatggccatggccatcttctggaagttctcggcctgggcctcggccttggtctcgaagttcatctgggtcagcttgctgaccccgtcgaccagttccgaaaccgtctcgccgaactgcgcggtgagcgcttccttggcgatgccggtgtcctcgatcacgtcgtgcagcatcgcggccatcaggctctga

SEQ ID NO: 355671 - DNA, 801 bp, Pseudomonas aeruginosa
atggctgccaaccggttgttggcgcgtccctggctgcctggcgtggagctgttccatgcggacttctccggccaggcgttcggccgccacagccattcggccttcgccatcggctcgatcctccacggcgtcggcggctaccagtgccgcgggcggcgccatgcgctgccggccggcaccctgtcgctgatgaacccggaagagccacataccgggcacgccgaatccgagcggctggtctaccggatgctctatgtcgaggaaacgcgcctgctcggcctgctcggccgcaaacagttgccgcgcggcttcggcgaactgaacccggccgacgacggcagcgtggcggctggcctggcgtggctggccgaggatttccagcgcagcgacgcattggggttggaaagccgcctgctggccttgctcgaacaggtcttcgtgcgccacggcggcttgcgcccggcggctgcggcgccccgcgacggcggaaccaccgcacgcctgcgcgattacctggaagcgcatgccaccgaggcgctcggtctggaccaactggcgcagttgctgcagcgccacccgcgccacctgatcgaggctttccggcgtgcctacggcgtaccgccgcatacctaccaactgcaatgccgggtgcgccaggccaagcgcctgttgctggaagaacggccgctggcggaactcgcccagcacctcggcttctacgaccaggcgcacttctccacgaccttccggcgtttcaccggggtcactccggggcaattccggcgcagcgccaagacctga

SEQ ID NO: 355672 - DNA, 261 bp, Pseudomonas aeruginosa
ttgctccggttgcagaactacgttgatggtctcttccacgggccggacctgtgcgagcatccttacgagatccagccctggaagtggggcgctggcttcggccttcttgagttcgtcctgagccatgcgaaggttttgagcagcgagagacaggtgctcaatggcacgctgataccggggatcgcgctgatcgattacgtacgggtcggattcagcaaatgctggctgaacggcaatggccgccagatatccgatccctaa

SEQ ID NO: 355673 - DNA, 465 bp, Pseudomonas aeruginosa
atgagcatcattgcaaccgtcaagatcggccctgacgaaatttcagccatgagggctgtgctcgatctcttcggcaaagagtttgaggacattccaacctactctgatcgccagccgaccaatgagtatcttgccaatcttctgcacagcgagacgttcatcgcgctcgctgcttttgaccgcggaacagcaataggtgggctcgccgcctacgttctacccaagttcgagcaagcgcgaagcgagatctacatttatgacttggcagtcgcttccagccatcgaaggctaggagtcgcaactgccctgattagccacctgaagcgtgtggcggttgaacttggcgcgtatgtaatctatgtgcaagcagactacggtgacgatccggcagtcgctctctacacaaagcttggagttcgggaagacgtcatgcacttcgacattgatccaagaaccgccacctaa

SEQ ID NO: 355674 - DNA, 279 bp, Pseudomonas aeruginosa
atgacgatcaactggaccagcgccgcccacggagacttggtgcggctgtatgaatttttgcgccctgtgaaccagcaagccgcggcccgagtggtgcagcgattgacagaagggcctgacctgttgtcgcagcaaccaagaattggaacgaagctgccggaattcgagcctcgcgaggtgcgatatatcttggttggtgattatgaaatgcgctacgaaatttcacccaacgaggatatctggatattgcgtctgtggcacacacgagagtttcgttga

SEQ ID NO: 355675 - DNA, 270 bp, Pseudomonas aeruginosa
atgccttcaactgacacccgagtgatgacggcccacgtgccgttgcctctagcagagcagatcgatcaactggcagccaaactggatcgttcccgagggtgggtgctcaagcaagcacttgcagcctacgtggatcgggaggcggagcgctaccggatgaccatggaggcaatggccgatgttgatgcaaaaaatggcctaagccaccaagacgtgaaggcctgggctgccgcattgggcacagacaagccaggacagttgcctgaatga

SEQ ID NO: 355676 - DNA, 789 bp, Pseudomonas aeruginosa
atgggtgaatttttccctgcacaagttttcaagcagctgtcccacactcgcgcggtgatcgagcgccatctggctgcgacactggacacaatccacctgttcggatctgcgatcgatggagggctgaagccggacagcgacatagacttgctcgtgaccgtcagcgccgcacctaacgattcgctccggcaggcgctaatgctcgatttgctgaaagtctcatcaccgccgggcgatggcggaacatggcgaccgctggagctaactgttgtcgctcgaagcgaagtagtgccttggcgctatccggcgcggcgtgagcttcagttcggtgagtggctccgccacgacatcctttccggaacgttcgagcctgccgttctggatcacgatcttgcgattttgctgaccaaggcgaggcaacacagccttgcgcttctaggcccatccgcagccacgtttttcgagccggtgccgaaggagcatttctccaaggcgcttttcgacactattgcccagtggaatgcagagtcggattggaagggtgacgagcggaacgtcgttcttgctcttgctcgcatttggtacagcgcttcaactggtctcattgctcctaaggacgttgctgccgcatgggtatcggagcgtttgcctgccgagcatcggcccctcatctgcaaggcacgcgcggcgtacctgggtggcgaggacgacgacctagcaatgcgcgtcgaagagacggccgcgttcgttcgatatgccaaagcaacgattgagagaatcttgcgttga

SEQ ID NO: 355677 - DNA, 828 bp, Pseudomonas aeruginosa
atggcaatccgaatcttcgcgatacttttctccattttttctcttgccactttcgcgcatgcgcaagaaggcacgctagaacgttctgactggaggaagtttttcagcgaatttcaagccaaaggcacgatagttgtggcagacgaacgccaagcggatcgtgccatgttggtttttgatcctgtgcgatcgaagaaacgctactcgcctgcatcgacattcaagatacctcatacactttttgcacttgatgcaggcgctgttcgtgatgagttccagatttttcgatgggacggcgttaacaggggctttgcaggccacaatcaagaccaagatttgcgatcagcaatgcggaattctactgtttgggtgtatgagctatttgcaaaggaaattggtgatgacaaagctcggcgctatttgaagaaaatcgactatggcaacgccgatccttcgacaagtaatggcgattactggatagaaggcagcattgcaatctcggcgcaggagcaaattgcatttctcaggaagctctatcgtaacgagctgccctttcgggtagaacatcagcgcttggtcaaggatctcatgattgtggaagccggtcgcaactggatactgcgtgcaaagacgggctgggaaggccgtatgggttggtgggtaggatgggttgagtggccgactggctccgtattcttcgcactgaatattgatacgccaaacagaatggatgatcttttcaagagggaggcaatcgtgcgggcaatccttcgctctattgaagcgttaccgcccaacccggcagtcaactcggacgctgcgcgataa

SEQ ID NO: 355678 - DNA, 501 bp, Pseudomonas aeruginosa; identical to SEQ ID NO: 83644

SEQ ID NO: 355679 - DNA, 264 bp, Pseudomonas aeruginosa
atgaccttcttcgtctccaagtacaaagagaaagcgcctcagattgaggctgtcgagtttcgcgatatggcagacgccggcctgcttgcgaatttcgccaaggccgaatcgttcaacgctcacgttccgaatggcgaactcactctgttcttgagtgctagccgcttcatcacgctgtcggtcagtgatgtgctgatcaagagcggtgaagaggtcagcgtcatgaagggtgaggatttctataagcaatacgaaccggcataa

SEQ ID NO: 355680 - DNA, 786 bp, Pseudomonas aeruginosa
atgaccgccaagcgcttcgttcgttgttcccccgaacaatatcggtattttgcagagatcgcccgccaggcgcgcacctgcctagaactcgttgcgtccagcgagatcgacggcaactttgggcgaatgagcctgatgtgtggtgatgcattcgtggatgcctctagcgacaagcccggaatgatggagcgctgcatcatcgagttggtggtggatatcgatgttgaccgtttccgttcctgtgccagaccggaaatcgattggtcgactctcgctgacgatgagattcatttgttcgtgctgcagcatgagatcggccaccgcgtggataactttcacacctgggatatgtctcccgaggcaaatgatgaggtccgcgcaaggtgcaaccgctatctccgctgggccaacgaggtcctggccgaccgctatgcgtggagtaaggtgcggcctggtgaaccgatgccgattggcgtgcacggggtcaggaatgctgatctgatcgaggagaccctggcgtttctcgacactcacattcctcggatgccctgcaagccgcaacagaccgatcccaattgctacagctgcgttcctgtccggatgctatccagcgatgtgctggcggcatacgtagggccggagtgccatccggcgaagactgccagggctagggagtatgttcgcagtagcagggagcgccgccatctcccgtacccggtccctctctttgaggctgggcctggcgacatagtcttgaccagctttgccgggagggctgcggcatga

SEQ ID NO: 355681 - DNA, 159 bp, Pseudomonas aeruginosa
atgcttaccctcaatccgttcgttgtctgcgccgccacctatcgcgctttggcattttctgcacttcgaagcgattctcctctgtctgttcgcttggctcgttatcgctccgccatcaaccgtgcgcgcttcctggaagcgaaaggcggtgaagcatga

SEQ ID NO: 355682 - DNA, 225 bp, Pseudomonas aeruginosa
atggcaagcattaccagcactacccagtccactcgccgcttcatcaagcgtcaggctgtcgagaaaatcaccggcctctcgtgctcagaaatctaccgccgcattgctactggcaccttccccgcacaagtcaccctcggtccgaagtccgttgtttggattgaggacgaggtgcacgagtggtgcgaggcgcgtattgccgaaagccggggggaggctgcgtaa

SEQ ID NO: 355683 - DNA, 849 bp, Pseudomonas aeruginosa
atggtgcagatacctaccgctgaagagttctttcagctttccatgcttgtagagaactacacaaaaaatgttcgcgaggcacttaggtgtatagagattcctaaagacgccgcagcgcttagagagtctgatttcaatcgcctcgccgccatcacggctaaagctagaagcaacactttccatgagttactcgaagcgtccacagcatggcaatggctagctgagcagtcggcccttgaccaagccatgcagtcgttgacaagaggttatgcctcagtcatgccaacagatcgactcagaaaagaccgcatgctcaaggcgttaaagcactgtgccacgcttcgtggcaattttgctcaccatgttgactttcgcgtaacccgccctagtcagtacatctattttttggcagggattgccacggcttcagataactttctaaccggacgaagtgtgagggctgcgactgagggacgaagcatttcaatgaagatgcaaggcctccttcttgagtttcagcgacttggaggaagtggttggttagcaccagccgaagaggaaaccttgtcgactaggaccgaaaagctcttgacgtaccttcagcgaataaccccgcaacctgcagtttctcgaaggaatgatggcgaccttggctctaggctgttcgcaatcgagctgattcggctcaatcagcgtatctactcagctacacacaagcgagcagtgttccacctcatggggcttcccttgtttgagcgccctctagaaatgcgcactatcgagaggttagctaaagcagagagggagcggaaaaaagaggatcacgacacaaaaggtggaaatgtatga

SEQ ID NO: 355684 - DNA, 711 bp, Pseudomonas aeruginosa
atgtacatcttttacatggacgattcaggtgaaggcggcatccacacctttaccgcgctgggagtgcattccagggattggcgagaagtctttgccgccgtcaaggaattccgaacacagatccggaagcatgccggcatctacatgaacaaagagcttcatgcaacgaagttcatatcgggacgtggccgaccatcagatcgccatgttgatctggcgaagagggagcgtatttttgcctacgcactccgcacactctccaagttgggcccggaaaagctgttgctgttcaatgtggttaaccgaaaccaagagtgggcatacgagcgcatactcaatcggatcaaccgtaccatggaggctcgtgacgaccatgcaatcatcattagcgatgagggcaaggaaggcgagtacacgcgactggtgagaagaatgggcgcctacaatcccattccgagcgcttttggcgagtgggaagacggtgcaggacaaagcaagaacatccccattagccgagtgatcgaagacccgatctttcgaaattctgaggcgtcatatctgattcagatggtggacttctgtgcctacgcactactacgcaaggaaataccgaaccagaacaggccgacgctgagcgatcacttcaagatattggagcccatctgcttcaaggcggccagcaaaggcgatccatttgggatcattcgctaa

SEQ ID NO: 355685 - DNA, 1338 bp, Pseudomonas aeruginosa
atgcgaccgcatcgtcaccattcccaacgtccaggcgatccacggcctgcgcctgcaaaaggtgccgcatacccgctacgtgttctgcaacgccgagttcatcatcccccatcccaacgacggctcgaccttcgacctgtccggcgacaacgccttcaccctgtacaacgccatcgacgccgagaccatggaagtggcctggcaggtgatcgtcgacggcaacctcgacaacaccgacatggactacagcggcaggttcgccgcctccacctgctacaactcggaaaaggccgtcgacctcggcggcatgatgcgcaacgagcgcgactgggtggtggtgttcgacatcccgcgcatcgaggccgagatcaaggcgaagcgcttcgtcaccctcggcgactcgaaggtgccggtggtcgacggccggcgcaaggacggcaaggacagcccggtgacccgctacatcccggtaccgaagaacccccacgggctgaacacctcgccggacggcaagtacttcatcgccaacggcaagctctcgccgacctgcaccatgatcgccatcgagcgcctcggcgacctgttcgccggcaagctggccgacccgcgcgacgtggtggtgggcgagccggaactgggcctcggcccgctgcacaccactttcgatggccgaggcaacgcctataccacgctgttcatcgacagccagttggtgaagtggaacctggccgacgcggtgcgcgcctacaagggcgagaaggtcgactacatccgccagaaactcgacgtgcagtaccagccggggcacaaccacgccaccctgtgcgagaccagcgaagccgacggcaagtggatcgtggtgctcagcaagttctccaaggaccgcttcctgcccaccggtccgctgcacccggagaacgaccagttgatcgacatttccggcgaggaaatgaagctggtccacgacggcccgaccttcgccgaaccgcacgattgcatcctcgcccgccgcgaccagatcaagacccgcaagatctgggaccgcaaggacccgttcttcgccgagacggtcaagcgcgcggaaaaggacggcatcgacctgatgaaggacaacaaggtcatccgcgagggcaacaaggtccgcgtctacatggtctcgatggcgccctccttcggcctcaccgagttcaaggtgaagcagggcgacgaagtcaccgtgaccatcaccaacctcgacgagatcgaggacgtgacccacggcttcgtcatggtcaaccacggcgtctgcatggagatcagcccgcaacagacctcgtcgatcaccttcgtcgccgataa

SEQ ID NO: 355686 - DNA, 948 bp, Pseudomonas aeruginosa
atgatttcgaaaagcagaagaagcttcatccgcctggccgccggtacggtcggcgccaccgtcgccaccagcatgctgccgtcgagcatccaggcggccctggcgattcccgcgcaccgccggcatggcaacctcaaggacgtcgagcacgtggtgatcctgatgcaggagaaccgctccttcgaccactatttcggcaccctcaagggcgtccgcggcttcggcgaccgcatggcgatcccgctgcccgatggccagcgggtctggcaccagaagggcagcaagggcgagatcctgccctaccacttcgacaccagcaccaccagcgcccagcgcgtcgacggcaccccgcacacctggccggacgcccagcaggcctggaacgaagggcgcatggacaagtggctgccggccaagaccgagcgttccctgggctactacaaggagcaggacatcgccttccagttcgcgatggccaatgccttcaccatctgcgacgcctatcactgctcgttccagggcggcaccaaccccaaccggctgttcctctggaccggcaccaacgacccgctcggccagcacggtggtccggtaaccaccaacgaccacgacagcaacggcccggtggagcagggctacacctggaccacctatcccgagcgcctgcaggctgccggcatcacctggcgggtctaccaggacatggccgacaacttctccgacaacccgctgatcggcttccgccagtaccgcgccgcggcgcctgactcgccgctgatcgtcaacggcctgagcacctggaagctcgatgcgctgaagcgcgacgtgctggccaacagcctgccgcaggtgtcctggatcgtcgccccggccaagtactccgaacaccccggcccgtccagcccgatctgggggccgagtacacttcctgggtactcgacgcgctga

SEQ ID NO: 355687 - DNA, 546 bp, Pseudomonas aeruginosa
gtgcagcgcgagcaggaccagcagttcaccagcaaattcatcacggccgatccccaggtgaaatccctgcaggacctgaagggcaagaccttcgccttcggctcggtctcctccacctcgggcagcctgatgccgcgctacttcatgcagaaggacggcatcgtccccgagcagttcttctcccgcgtcgcctactccggcgcccacgacgccaccgtagcctgggtccaggccggcaaggtcgacgccggcgtgctgaacgcctcggtctggcagaagctggtggacagcggcaaggtcgataccgccaaggtcaaggtcttcgccaccacgccgacctactacgactacaactggaccgtgcgcggcaacctcgacccggccctggccgagaagatcaagcaggccttcctcgccctcgacccggcgaaaccggccgacaaggagatcctcgacctgcaggccgccagccgcttcatcgagaccaatccggacaactacaagggcatcgaggagtccgcacgcgccgccggcctgctgaagtga

SEQ ID NO: 355688 - DNA, 372 bp, Pseudomonas aeruginosa
atgttgaaacgctccctggcgctcgccgccggcatcgccctgtccctgtccgccgcgctcgcccacgccgaaaccctgaaagaactcaaggtctcggcgatccccgacgaggcgcccaccgagctactgcgcaaattcaagccgctcggcgcctatctggagaagcaactcggcatgccggtgaagttcgtcccggtggccgactacgccggggtggtcgaggcgctggccgccgaccgcctggacatggcctggctgggcggcttcaccttcgtccaggcgcggctgaagaccggcaacgccatcccctggtgcagcgcgagcaggaccagcagttcaccagcaaattcatcacggccgatccccaggtga

SEQ ID NO: 355689 - DNA, 801 bp, Pseudomonas aeruginosa
ttgccgcaggccgcgcagccgtaccagaagggccagttgcagctggccctggcgctcaactacgagcgcagcggccagttggaaaaggtcttcgccgaaggttcgccggtccaggagccgctgctgcgcagcatcctcctgcgcaacgtcgccgacgccgcgctgttgcgccgccaggccaagcagggcgcgacggcggaagagcgcgataccgcgctgttcactctcctttacaaggacctgcgccgcagccgcttcgccgacttcggcaaggacttcgcgctgctcggcgaaaccccctcgcagaccaagctgggcaccagcctcggctatgtctacggcgccggcaacagcctggagctgttccgctggaagggcgacaaggccgagtccggctacgtttgcccggccatcgccgagtcggccgcggcgctggccgccgatgacaaggacccgaagggcctgaactgcctgggcgaattcatcctgcgcaacggtctcgacggcatgccgctggacagccagcccgaggccaacgagctgggcggcaccccgagcggcttcaagggcgaggtgtactcccggctggatggctatcgcctggtcatggacaaccccaaggctccgcgcgaagacaaggcctacgcgctgttccgcgcgatcaactgcttcgccccggccggctacaacacctgcggccagcaggacatcccgcaggccgagcgcaagcaatggttccgtacgctcaagtcgacctacgccgacagctcctgggccaaggaactgaagtactactggtga

SEQ ID NO: 355690 - DNA, 384 bp, Pseudomonas aeruginosa
atgctcgaggatgcgttgcgctatgccctggaacgcaagcagttcggccagccgatcgccgagttccagttgatccaggcgatgcttgccgacagcaaggccgaagcctacgcggcgcgctgcatggtcatcgacgccgcgcggcagcgcgacgaaggccgcgatgtcggtaccgaggcgtcctgcgccaagctgttcgcctcggaaatgtgcggccgcgtcgccgaccgcgcggtgcagatcttcggcggcgccggctatatcggcgactacgggatcgagcgcttctatcgcgacgtgcggctgttccgcatctacgagggcaccacgcagatccagcaactgctgatcgcccgcaacatgatccgcgccgcccagggctag

SEQ ID NO: 355691 - DNA, 246 bp, Pseudomonas aeruginosa
atgactcacgccttgaatgcccggccgggagcgcgccccggccatcctccggaagaactgctgatcgatgccgaagtcgacgacgaaccagttccgccggcgccgccactacgcccctggctgctcctgctgggcctggtgctggtggcgctgaacctgcgcccggcgctgtccagcctcgcccccccctgctcaaccaggtgcgcgacgataccggcctctcagccgctgccgccggcctgctga

SEQ ID NO: 355692 - DNA, 2868 bp, Pseudomonas aeruginosa
atgctgaatcctgctccccctctctcgtcaggttcgcgttggctacgatgggatcctcatgtgcacgcaccgggcaccctcttcaacgatcagttcaaaggcgactgggacggctatctcaacgcgttggagaaggcggtacctacaataagtgcccttgcggtgaccgattactatctgatggatacataccgccaagtcttggagcacaagcgtgcaggccgtctaccggaatgcgatctcatctttccaaatgttgaactgcgcctcgatataggcacaaataaatcgtgggtcaacgctcacttacttgtttgcccagatcagcctgatcacctggaggagttggaacggtttcttgcctcgttgactttcaaggctttcgacgatgagtttccctgcacgccgtctgagatgagaagactgggcagaaaagccgacgctaccttggtcgacgatcaagcagcgctacgccacggtgctgagaggttcaaagtctcgtttcagcaactgcgagacaaatacaaacatagccaatgggctcagcagaacatcctaattggagtggcgggtaaacagaatgatggcaccgctgcactccaagaaggagccgatgaagtgctccggttggagattgaacgcttcgcacatgtcatttttgcctccaacccaaatcagagagagttttggctaggaaataaggcggtctctcaggaacagatcaacaagcgctatgacggtctaaaaccatgtttgcacggcagtgacgctcatcagacctccaaggctggtgtgcctgacggtaataggtatagctggcttaaaggccgcgcgtccttcgagaccctacgacaagcttgcattgatccagcaggcagggcctacgtgggagaggaacctccgtcttccggcaatgcttctgaagtgatctcgaaagtcgaaatcaaaaattcatcatggttaaccacgccgagcttagaactgaatccagggttgatcgcagtgattggcgcaagaggctcgggtaagacagcgctcgcggatatgattgctgcaggctgtgatgcgcgtggcagggcgattactgggcactcatttttggtgagggcccgagagcatctaaaaaatgccactgtagacgtggaatggtgcaacggcgacttgcactcaggctcgctttatcacacaaacgatgatgaatatatctaccctagggcaaggtacctatcgcagcagtttgttgaagaattgtgttctgctgatggcatgactgatggcctcttagctgaagttgaacgggtgatctatgagtctcacacgccactcgaacgtgagggagcagtcagcttcggtgacctgagggacattcgttcagagcgacacagagagggccgtcgacgtgccgaggaatccctccaaagcttatccgaacgtatcaatgtagaactcgagaaaagagccctagtggctcaattgaagactcaatcccaagaaaaggatgtactggttaagaggttaacagccgatagagccaagctagtggccaaggatgcagaagcgcgggtagagagacttgaagcgctcacaaaagcctccgaaaaaattggtggttacgtcagatactacaaggctcaagagcagcaaatcttgttaatgcaagacgaagtaaaaaacgttcgaggggttgtggccccgaacgatctgcgtgatatacaagccagacacaagtccagcggtatccaagacagccaatgggatgcttttttcagagacttcaatggcaacgtcgaagagattcttggcgcgatgctggtctctgctaagcagaacagagatggatggctgggagtaccccctcccatgcatgaaaatccaacccaagcatacattcaagactccgaggatctggagaaaataacactcgcacgtttagaagctgaaattactcgccttcaagaacttgtaagtgtggataaagacacagctaagagattcaaagaaatctcgcaaaagatcaccacggaaactgaactgcttcgagcttgcaacgaaaagcttgctgactacgaaggtgcgaccgaacgccttgagggattggttagtgatcgctacgaggcctataaaaacgttttctcagctctgattgctgaagaggcagttctaaacgatctgtactcccccatcaaggctcggcttgattctgcatccggcacgttgaacaaactgtccttttcggttgctcggacggtcgatattgacgcttggtcggatgagggcgagtcgttactaaacctggcaaaaaaggggccatttcgaggcagaggtactttacgcgacatagcccggcaagttctgggcgtagcgtggaggtccggagacgaccatcaggtgttagctgctctcaaagaatttattagagattatcattcgcaactactggaacacgcccccgttgcttcctccgacctcgtcgagtatcgcaaatggacaaagaaaattgccaaatggctgtatgggacagatcacataaccattaggtatgcggtcaactatgacggcattgagatccagaagctctccccgggcaccagagggatagttctgctgcttctctacctatcactggatgcgcaggacagccgcccgctgatcatcgatcagccggaagaaaacctcgatcccaaatcgatttatcacgacttggttcctctgttcacgagcgctaaatcgactagacagataatcatggtcactcacaacgcgaacttggtggtcaacactgatgctgaccaaatcataattgccgaatgcggcccgcacgctcacggccagcttccccctatcacctatatgtcgggggggacttga

SEQ ID NO: 355693 - DNA, 1473 bp, Pseudomonas aeruginosa
ttgaaaattaaaattgaaaattttggccctgtaaaagaattcatatttgacaccgaaaaagacttccatataatcataggcgataacaacgtagggaagtcctatgtattaaccgcctactattttatcgtaaaaagcctaatagaaatctcctccagcaggggaatgaataaagcatgggtttacttcagccaaatatatgaggaagaaccaagttttctcgaaacaacagaagccaaaaacttcataaagcaagccaacgaaaaaaagaccggcgacataagcatcacagacctttataaatttatcgcaaaagactttctccaaaactccttagcagtagaattatcaaaaaaaataaaaagctcttataacgaaatagggtcgattgtaaacagcttctcaaagtcaagctttgcaaaattcaccatacaatccaacatgctatcaatcatattagaaggcaatgtggatgaatttaaaattgtcgaagtcgaccttcaaagatccgtattagttaggatatcgaagcaaaatagaagtcctacaataagcaatggaaaacaagttatctacaagcacacaaatgaagacatagaagcaacaatctcaaaaataaagcagcactgcttggtacgacttatggctcttctagaagaagctattggcccagtacgggatattgactatcttccagcatctcgctcagggctatatcaagctctgtctgcattcggacaaataattgcagagctttcaaagagccgatcatttcttagctcacgaattgagttaccagggatatcaggacagctaagtgattacttcataaagctaacaaatattagatccaccaaatctttaggaaacgatgctttcaccgatgccgcgaagaaaatcgaaaattcagtattaaaagggagcatcgaatatgacttcaaagaaaaaagattatattacagaccccaaggcaccaatcttcgactagacctttctgcgacttcatcgatggtatctgaaaccgcaccaattgtagcgtatatcagacacataattgcttggaatgatacatcacccaacttaatacgattcaaaaagcgcacaaaaaatattgacaacaccccccaaaagaaaatactaataattgaagagcctgaagcccatctccatccaagcaatcaaattaaaatgacagacatctatgccgatctatctacggccggcgtaaaaataattatgacatcccatagcaactatatattcaacaaagtcagtaacttagtaatagaaggaaagcttcaaccaagcaaaacacagtgcgaccttttcaaagtaacaaacgaaggaagcattggtgaatcacaagaaattgatgagtacggaataaacgacaataacttctcagatgcatctgaagaattaataaatgaaagaatggatttaataaacaacagggaaagcagcagtgattaa

SEQ ID NO: 355694 - DNA, 621 bp, Pseudomonas aeruginosa
gtgattaacactattcacagcgatgctaactgccacgccattagcggaaactctcttgaggaagaaggaatctcagtagaaattggggagagcttattggacgccactggtgaacctgactgggcccgcctagcaattctgaaaccggatcgttactactcaacacaaaattttgcaactcctccaagatcagtagacggtacaataatcgtcgaaaataacggcatatatttatacataatagaattaaagtcatcacaaccctccggcataaaaagaaaagaaatacaagaaaaattcaacaccatgtttgagagattcctaacccaggatttctctcatatatttgaagaaatagagtatcagcttaatgatttaaagctttggcttgtatgtgaccctttaaaaacaaggagaaaaaaccaagacaacgatgaactacttagaaatctagaaaaagtatctgaccggttaagagggatgtttgcagatatggcagcggcatataagcctttcactttcaaaggccgcaaggcttctatccagccacttctctccccaccaacaatagaggcctatggatacactgacatgctagaatcggtgttgcagcacacatga

SEQ ID NO: 355695 - DNA, 1398 bp, Pseudomonas aeruginosa
atgatcggcgtggcaggtgcgcccgccgcggttggtgacgatggcgctggcgcgcttcatcactggctcccagtccgggtcggtcatgtcggagaccaggacgtcacccggttggaccttgtccatttccgacacgtcgttgatcactttgaccggaccggcaccgatgcgctggccgatggcacgcccttccaccaggacggtccccttctctttcagcaggtagcgctccatgaccgtggcgctggcgcggctcttcacggtttccgggcgtgcctggacgatgtacagcttgccgtcgtcaccgtccttggcccattcgatgtccatcgggcggccatagtgcttctcgatgatcatggcctgcttggccagctcggtgacctcggcgtcgctcagggcgaagcgggcgcgatcggcgcgatcgacgtccactaccttgaccgagcgaccggccttggcttcgtcgccgtagatcatcttgatcgccttgctacccaggttgcggcgcaggatggccggacgcccggcttccagggtcggcttgtggacgtagaactcgtcggggttcaccgcgccctggaccacggtctcgcccaggccgtaggcaccggtgatgaagaccacgtcgcggaagccggattcggtgtccagggtgaacatcaccccggcggtgccggtttccgagcggaccatgcgctgcacgccggcggacaaggcgaccagcttgtgatcgaagccctggtgcacgcggtaggcgatggcgcggtcgttgaacagggaggcgaagacctcttttgctgcgcggatcacattgtccacgccgcggatattgaggaaggtttcctgctggccggcgaacgaggcgtccggaaggtcttcggcggtagcggaggaacgcactgccacggcgaggttgtcgttgccgttggccagggcggcgaaggcctggcggatctcgctgtcgagacgggccgggaactcggcttccatcacccactggcggatctgcgcgccggtcttggccagggcgttgacgtcgtcgacgtccagggcgtccagggccgcgtggatacggtcgttgaggccactctgctcgaggaagtcacggtaggcctgggcggtggtggcaaatccgccgggtacggaaacgccggcaccggccaggttgctgatcatctcgccgagggatgcgttcttgccccccacatgctctacatcatggacgccgagcttatcgagggaaactacgtactctaccaaggtgatctctccactattgaattggaaaagctcaagcggggccaggagcagctccgctggattctggcctggcccttagaaataagtgacaatgctgcgacagaaaggcctctgacaacgcgcggcctatcatag

SEQ ID NO: 355696 - DNA, 2028 bp, Pseudomonas aeruginosa
atgcctgcttctttcccgcgcctcggcttgctcggcgcgctgtgctccatcgttcccctgctccatgccagcgaaccgaccacggacgctgcgctcatcgaaaaaggccgctacgtggcccagctcggcgactgcatcgcctgccataccggcccgcagggcgcgccgatggccggcggcctggagctgaagactccaatgggtaccatctactcgaccaacatcactcccgaccgggagaccggcatcggccgctacagcttcgaagagttcgaccgcgccatgcgcaagggggtgaccgccgagggagtgaatctctatccggcgatgccctacccgtcctacgccaagatcagcgaagaagacatgcgtgcgctgtacgcctacctgatgcacggcgtgcaacccgtcacccaggcgaatacgccgagcgcgatgagctggccgttcaaccagcgctggggcctgtcgctgtggaactgggcgttcctcgacgacgcgccgttcacgccctccagcgacgcggacccggcgatcaaccgcggcgcctacctggtacaggggctcggccactgcggcgcctgccatactccgcgcggcatcgccttccaggaaaaagccatgagcgaagccggtcgttccgggcagttctacctcgccggcgaaaccgtcgaacaatggcaagcgctgagcctgcgcaacctgtggacggtggaggacaccgtgcagttgctgaagaccgggcagaaccgcttcgccacggtgtccggcagcatgaccgatgtcatccaccacagcacccagcacttcagcgacgacgatctgctggccatcgccagctacctgaagtccctgccggccggcaaggacgacctgcccatgcccgacagcgaacgcccactggcagcaccggtcgacctgtacagctcgcggggcggtctcggctacgcgcagttctgctccgactgccaccgcaaggacggcagcggcgtcccgggtatgttccctccgctggccggcaaccccacggtcgcttcggccaacccgagcacgctactgcatatcacccttaccggctggaaaaccgcggagaccgcaacccactcgcgggtctacaccatgcccggcttcgcccagctggaagaccgcgaaatcgccgaaatcctcagcttcgtccgcagcagttggggcaaccagggttcgtcgatcgatgccggccaggtgaagaaactgcgccagcagatcgaggccggcaacggcccggccacgaccttcgtctctccacgcctggcggacatgctcgcggcgccgaacgccgaacaggtggtacgcggcatgcgcctgcacctggagacccgcgagctgctgccggcgaacgtcggcaaccagttgaactgcaccagttgccacctgaacgccggaaccgtagccgacggctcgcccttcgtcggcgtctcggcgttcttccccagctacgcgccccgggcgggcaaggtcatcggcctggaggagcgcatcaacggctgcttccggcgctcgatgaacggtaagcctctgccgccggactctgccgacatgcaggcgatggtggcctacttcgactggatgaagaacaacacccggccgcaggacaaggtcgccggccgcggcgtcggcaaggtcgacccggcgctgaagcccgacccggagaacggccgcaaggtctacgcccgacaatgcgcggtgtgtcatggcgagaatggcgaggggctgaggaacagcgccggcgagatgctcttcccaccgctgtggggcgacgagtcgttcaatatcggcgccggcatggcgcggaccttcaccgctgccgccttcgtcaagcacaacatgccgatcggcttccaggaacgcttcccgctcggccagggcggcctcagcgaccaggacgcagtggacgtcgcggagtacttttcgcaccagccgcgcccggacttcccggacaagatcaaggactggccgaaggacaagcgtccgctggatgcccgctactga

SEQ ID NO: 355697 - DNA, 510 bp, Pseudomonas aeruginosa
atgtcgcaactgtccttttcctcgttcgatgacgctttgctggtgcgtgacgcccaggggcgctacctgccggcatcggtggatcagattcttgaagcggcacgccaggccatcgagcagaagatgcagcgcggtgccgagtttacttctccagtgctggtcaaggagtacctgcgcaccaagctggtgggcttcgagcatgaagtcttcgcggtgttgttcctggacacgcgccatcggctgattgagtatgccgagatgttccgaggcaccatcgacagtgcgtcggtgtatccgcgcgaagtggtcaaggaggcgctgcggctcaatgcggcagcggtcatcgtcagccacaaccatccgagtgggaacccggagccgagcggcgccgaccgggcactgacccagcagctcacgcaggcgttggcgctggtggacgttcgcgtgctggatcatgtcatcgtggccggtcacacgacgacatcgtttgccgaacgcggcctgatctga

SEQ ID NO: 355698 - DNA, 747 bp, Pseudomonas aeruginosa
atggcgaatgaactttctatccaagcagaagcattgcagaatcttttgatctctacagcgacaggcggcagtgaagatgacgcagagttcgttcgtcttaggcaggcccttctttcaaacgcagccgttgattccctgatcccccagtttcttcgcacctgtcgcagtcttgcccagttctggcaattcatcaagttcaagtacaaaacctacgcggagcgccgcgattatttatggcaagaatttcgcccgttactagatgccctggagcgtggtgggctggcaccttccgactcatcggtcactaccaccctggaaaaattcgatgcagcccatgtgcaagctgcatggtccaaggcattggatcgacgcgcatcagacccggagggggcaattacgtccgcgcgtacgctgattgaagcggtatgcaaacacatcctggaggaagccaaggttcactatgatgatacggccgatctccccaagctgtacaaacagaccgctgaaatactcaaactggcaccttctcaacatacggagcagattttcaaacaaattcttgggggctgcacgtctgtcgtagagggtctggggtcacttcgtaataagctgagcgatgcacacggcaaggggcgtattggtgttaaaccagccccgcgccatgccgagctggcagtcaatttatccggcacattggccaactatctcttggcaacctgggaagcacgcaacgaggctgcaacctga

SEQ ID NO: 355699 - DNA, 843 bp, Pseudomonas aeruginosa
atggtgcctcgcctcaaaggtgacaccagcctgattgataaggccctgtaccgcagtaagccctataagaacccgtatgaagatatcaccgacaaggtgggcatgcggtacgtggtacttttgaccacgcatatcaatacgttctgctcgattatcgaaagtcccgagtgcgaagccttctggtcatggtccaaggacaaggactatgaagaggagcggctagccaagcccttagagttctcctatcaatcagttcactatgtgctgcggtcaaaagccggcttgtccattgatgggatagatcttcctgagggtcttacttgtgaagtgcaaatccgcacgctcttgcagcatgctcatagcgaactaacccacgacacgctctacaagccccaaaccgccgccaaaccctccatcaagcgcactgttgccaagagcatggcattgatcgaggctacagacgaattctttgagcaagccatgaaggacctcgccagcgccagcgagccccagcggcaactcttggactacctgagtacagcctacaggaaaggcaccggactggagcctggtcaagagcgatccaatcagcttgtggccgatgctttcatggagtttctgccgcaggacgtcatcgttcgcatcgaagaattcttgacggccaagagctacgtttttgaaaagatcaaagaacaaaacggtcagcgacatttcttcaatcaacccgccgtgctcctagcatacttcctcgcagacaaaatgcccgcccagacccgagagtactggcccataggttcggatgatctggcaaaagtcttcagcgacttaggcgctgcattctag

SEQ ID NO: 355700 - DNA, 1098 bp, Pseudomonas aeruginosa
atgtcctttgaaaatctctcaattggccgtttgatcatccacgaggtctttgcacgaggtgcagataaggctttggttcagcccatttacggagatcagcttttggtactcccgcaggatgccagggatgccttgcaagcccgcatcacaaatgctctcggaaaatcatctcacggtgtcgaaatgacaatccgagacaccggagctgatagcacttggcacaaagccaaagaaataatccaggcccaaggcgatgacgttcaattcgtaaacctctcgcaaaatattgccagtaagctggcggttgcccagaccaaccgcactattcctggcggcatcgtggtggtgatcgaaggcacttgcggcaaccctgccaggtccttcatgtgcgtcatcaaagccgaacctcacggaggctttaccaagcgacaaacgggcgggcatttgaccctggagtacattaaggaacttatccttacgccccaggccaagctctacaagatcggagcttttctgcggcaggaccccgcagcagccacggcccagcagccgaccaatgggtggagggcctttttgtttgacgaccttattactcagggcaacaagctcactgctgcacagtatttttatgagtcctttttgggattggaatttccgtccaatagtgcatttcagaccaagcaatttcatgcgctgaccaaagattttattcgcaatgccaatgtcgatccagagaagaaaatcgacctattgaatgcgctaactacctacttgaagacggatcaggccgccacaattcaagtggacgttttttcccaaaactaccttggagatgcggcactgcaagatgcgtacacggcctatatggggcaaaagaatttccccaatacagccatccataaagatctctctgaggttcaaagccaattgaggctgcgcaaacttactttcggtcacgacatcaggctcaccgctccagcggatcaattcgagaactatgtgcgaattgagtccattgacggcgatgccgatgagcacggcaacgtgcctaagtggaccaaaatcacagtgcgcgaccacattcgagaccaagagtga

SEQ ID NO: 355701 - DNA, 348 bp, Pseudomonas aeruginosa
atgaacccgctcatcaccgatgaagaacgcgcccggctgctggccaacggccaggcccgcgccgccggtcaggccatcgacccgttgccggtggtgcggctatttaccccggacgcgcatgtcacctggctgctgtccgaactcgatcccatcgacggcgataccagtttcgggctgatcgaccttggcatcgggttgcctgcgctggggacggtcaagctgtccgacctggtcggcatcgtcgggccgaacaagcagccggtgatgcgcgatcgctactttcagccggcacggcggctgtcggaatatgtccggcgcgcgcaggaagacggctcgatcacggactga

SEQ ID NO: 355702 - DNA, 1557 bp, Pseudomonas aeruginosa
atgccccgctacaaaccccaagagcgcaatggcctgttcctgccggtggtgctgtccgagcagatcgtgccgggcagcttcgctttcgcactggactacctggtcgatcacgagttggatctgagcgagttggatgcgcggtttcgcaatggcgagaccggcgccagcgcctacgacccacgggtgatgctcaagatcgtgctgttcgcttacagccagggattgctgtccagccgcgccatcgaacgtgcctgcctgcacaacgtgcagttcattgccttgagtgggaacagccagcccagccacgcacacatcgccaagttcgtcagccaattgggtgaacaggtcaaggcgttgttcgcccaagtgctggtcacttgcgatgcgcagggcttgatcggtggcgagttgttcgccatcgacggggtcaagctgccgagcaacgccagcaaggagtgcagcggtacgcatgaagagctgggccaacgcgccatgcggctggagcgcgcggccgagcggatcgtgtcgatgcaccagagccaggatcacagcggcagcgatggcaacctcgacgagcgtcgtcgcaagcgcgtgcaagcattgcagcgcgaagccgcacgcacgcgcgagttcctgtcccaggcacccaagcgcctcaacagccagggccaggagatcaagaccaacgtgaccgatccggagagcggcaagatggccaccggcaagggcgtgatccagggctatgccgctcaagccgccgtcgatggtgatcaccagatcattgtggccgccgatatcgttggctcggtcgccgagcacggcatgctgctgccgatgatcgagcaagccgatgcgtattgccaggatcacacgctggtgctggccgatgcgggctaccacaccaaggacaacgtcgagcaactggaagcacgcggcatccccgcgctgattgccgacaagcagatgcgcaagcgcgatgcgcgtctggctaaccaggatcgcttcaagcccaaggacgacgtgctctacgacaagacaccgaaggcacacaagctcaccggcaaagagcgcttccgcccgcgcgacttcgacttccgcaatgacggcacctgcctctgcccggcgggcaagacgctggtgagcaacggcagcacctacctggtggacaaggggttgcaccgccaggactacaaggcgagcgcggatgactgcgggccttgcgagctgcgctccaagtgcctgcggtatccggagcggacgccggcacgcaaggtctacctgttcggcgaacgcagtcccgactgggtggagccgaagggggttgtcgaacgcgacgatgcgatcacgcgcatgcgcacggccatcgactcgccggaaggccgcagacgctatggccggcgcatcggtacggtggagccggtgttcggcaacctgcggcacaacaagcggctggcgcgcttcaacctgcgcgggcgcggcaaggtcaacacgcaatggcacctgtactgcatggtgcacaacatcgagaagctggcgggaagtggatggcgggcatga

SEQ ID NO: 355703 - DNA, 639 bp, Pseudomonas aeruginosa
atgatcttcgcgtttctcaaccagaaaggcggcgtcggcaagaccacgctcgccacccacatcgcgggcgagctggcgatgcgcggcctgcacgtcatcctgctggatgccgacccgcagggttcctcactcgactggacgcagcgcagaagccagcaaggcttgccacggctgttcagcgccgtgggcctcgcccgcgaaacgctgcatcaggaagcgcccgagctggcccgtcgcgccgatcacgtcatcatcgacggcccgccgcgcatcgccgccctggcgcgctccgcgctgctggcggccgagcgcgtgctgattcccgtacagcccagcccgtatgacctttgggccagcgccgagatggtggcgctgatccgcgaggcgcaggtgttccggcctgcgctgcgcgcggccttcgtcatcaaccggcgcgtcagtaccaccatcatcggcagggaagcacggcagtcgctggccgaacaaccgctgccggcgctgcgcagcgaagtacgccagcgcatcgtcttcgccgacagcgtggccgctggccggctcgcccgcgagacggcgccagacagcaccgccgcgcgcgagatcgccgcgctcaccgatgaactgctgcggtggccgacatga

SEQ ID NO: 355704 - DNA, 426 bp, Pseudomonas aeruginosa
atgagtacgctgtattccacgaaagtcaccgccgtcggcggccgtagcggcaccgtgcgtagcgacgatggcttgctggacttgcctctggccctgccttcagcactcggcggcaagggtggtgcgaccaacccggagcaactgttcgcggccggctacgcggcctgcttcggcaatgccgtcattcacggcacgcgcaacaagcagaccaagatccgcgacaacgacatcgatgtgatcgccactgtgagcatggttccgaacggtagcggcgggttcgccttgagtgtcgcactggacgtgaccatcgctggcgtcagccaagccgaggccgaggagattgtggccgaggcacacaagatatgcccgtactcgaatgcgacccgaggcaatatcgacgtcacgctttcggtgcatacacgctga

SEQ ID NO: 355705 - DNA, 1041 bp, Pseudomonas aeruginosa
atgaaagcgctcatctatcgtggcccaggcaaaaaggagtgggcggacaagccccagccgaccatctctcatcccactgacgcggttatccgcatcacccacaccaccatctgcggtaccgacctgcatatcctcaaaggtgacctgcccgaggcggtcgatggcctggttctggggcatgaaggtgtaggggtcgtcgaggaagttggcgaggctgtcagcaacttcaaaaaaggtgatcaggtgctgatttcctgcgtgacctcatgtggtcgctgtgaatactgcaagaagcaactttacgcacattgcacggatggcggctggattctcggccatcagatcgacggcacccaagccgagtacgtccgtataccacatgccgacaacagtctgtatccggcaccgcaagacgtagaccccgaagcgctggtgatgctcagcgacatcctgcccaccggcttcgagatcggtgtgctggcaggccaggtgcggccgggcgacacggtagcgatcgtcggtgccggccccatcggcatggcggtgctgctgaccgcacagttctatgcgccatcaaggatcatcatgatcgacaccgatctggctcgactggaggttgcacgccgcttcggcgcaaccgacggcatcaacgctggtaccggagacgcggtggagcaagtcctggcattgaccagcggtaagggtgtggacgtggcggtggaagcggtgggcattccctctaccttcgacacttgccagtcgatcatcgctcccggtggtcgtattgccaacgtcggcgtgcatggcaagcccgtggagttgcatctggagaagttgtggagtcgcaacatcacgctctcggctggtctggtcagcacctacagcacgccgatgctcctacagacggtgaaggctggcaaggtgaagccggagcaacttgtcacccatcgctttgctctgcatgacgtagtccaagcttatgaagtgttcggcaacgcagcgcgtgagaaagccatgaaagtgatattgcaggcggagtga

SEQ ID NO: 355706 - DNA, 945 bp, Pseudomonas aeruginosa
atggagcttcggcatcttcgctgcttcttggcagtagccgaagaactccgcttcgcccgtgctgccgagagattgcacgtcgatcagtcggctctgtcgcgtgccatcaaggagctagaagaagaacttggcgcggtgctgttcgcccgaaccacacgcagtacgaaactgacccacgccgggcgactttttctagagcatgtgcggcgtgtgtttaccactttggagcaggcccgcgatagcgtcaaagcagcggctaatggctttcacggtcagttgcgtatcgctctgtccgatggctttacaccgtcgcgcctgcctgccctgttggctctttgccgacaagaagaacccgaagtcgaaatccggctgtttgaggtgccactttctcagcagctcaaggggctacaagaagacctgtacgacgtaggattcgctcaatctgacgaagttggggaagtcatcacggctttgcctgcctggaacgacccgatgatggtggctgtgccggcccgtcatccgttgctgatccataagcgcatccccttggacgaattactgcgttatccactggtgctatgcgatccacaagcgtgcgaggggcatgcgaagcaggttgagagagtccttcggcgtgtggacatggagccgatcgttgccgagcgagtcacttcctgtgatctgatgatggcgctggtatccgcaggcttcgccctaggattgactggagccgcgcacatcgtggccagccgagaacagggcatcgtggcacgaccactgactggccgctcgccaatgcttacgacctatctgttgtatttggacgaggagccatcggatacgttgcttcgcttcatcgagcgggtacaggccatcgagtcccccgaaatcagccggcacttcccgagtattgatcccgaaccacaggaggaactcaggccatga

SEQ ID NO: 355707 - DNA, 264 bp, Pseudomonas aeruginosa
atgaagaagaccattcctttcttgctggccgtggcattaacggcttgcggtcaatccgaaacgccccaaacgacagctatcctgacagttgaagaactggcatccaatcccgagcggcttaaagaactgcgccaacagtgcaagaccgatcgcgccacgctgggcgacgtgctgtgcaaccgcgtggcggaagccacgcgcaaacggttctatggcgatggcaacacgccctatacgccacggaaggaaccgcctaagttctga

SEQ ID NO: 355708 - DNA, 315 bp, Pseudomonas aeruginosa
atgcgatgcgtccttgtcctgccggcttcgctgctggccctgctgctgaccgcgtgcggccagcagcaggccggcgacctggccgataccctggccgccgatccggtgcggctcaaggcattgcgtgcgcaatgcgcggcccatccacaacaggtcatgcaggccgcaggcgaggacgcttgccgcgccgccgccgaagcgttccggcggcgcttcttcgccggccacaccgggccggacgaatacggctcgctggccgaactgccgccgatcccgccgagcttcgatgaacctgccggggaggacacgccatga

SEQ ID NO: 355709 - DNA, 603 bp, Pseudomonas aeruginosa
atgtcctgcactgattctgcccagccggtatccactcgcattgcgcaacgggtcaagcgcctgcccaaagggcagcccttcagcataaggcgctttgcggcacttggaacgagaagcgccgtatccaaggcaatagcccgtctggtcagccgaggcgaacttgagcgggtgcatcgaggagtctacatgcgcccgaaatccagtcgatacgttgcacgggttcgcccaaacgcatgggaagtggtgagcctgattgccagacagagccgtcaggctctgcagattcatggtgccaatgcggttagaaggtttggactgagcacccagatgccactcattctgatctattacaccagcgggcccagccgatcgctatttatagggaaagcggaagtccggctggtacatgcggcaccaatggtcatgcagcatgccgggaccgaggtggggatggctatcagcgcactattttatctcggtaaagacggttctaccccggaatgcattgccgcgatcaagaaggtgctcaggcctgaagacctaactacattaatggcctgcaaaatgccgaaatggatgcgcatggcgttcgagctgacatga

SEQ ID NO: 355710 - DNA, 1401 bp, Pseudomonas aeruginosa
atgaccctatcgctgcgagactggcaactcagctgcatcaacacggcgttggagcactttaccgccacgccgcacttcttctgccaggcaacgccgggtgccggcaagacgcgcatggcggcagagctggccagcagactgcttaagcaggacaggatcgatctggtgatgtgcttcgcgccatcctgccaggttgtcgagggctttcgctcgacctttgctacggtgcttggcaggcgtctggacggtcagatcggtgcagtgggggcggcgttcacctaccaggccatggaataccgtgatgagagtttctggcagcttcttgatgactaccgcgtacttgtggtcttcgatgaaattcaccactgcgccggccatgatccacttctaagcaacgcctgggggcagcagatactgcaccggatacaagaccgcgccgccttcaccttggcactctccggcacaccatggcgttcggacgacagggccattgccctggcccgctactcgtcacccgaggggcacctgatctgcgactatcgctacggcctgatagaggcaattgccgacggggtgtgccgttcccctcgtattgtcctgctcgataatcagaaggtgaaactcaccgaggagctgggcactgagagcaatgtcaggatgtttcctagcatcgccaagctattgggggaatcccctgtcacttatgaagaactgttgcgccatgacgaggtgatcgatcaactgctcgatcttggttgcagcaagttggatgagcttcgcctggtcaagccgaatgcggctggcttggtagttgccaccgacattgagcacgcccagcaaattgcccaggccctggacgccaggggtgaaggctgccgcattgtgaccaacaaaacctcggatgcgcagcaagtgatcaatgctttcaggcagagcgcctgtcgctggattgttgccgttgggatgatcagtgagggtactgacataccccgcctgcaggtgtgctgctacctcagccgaatccgtaccgagctgcattacaggcaggtgctggggcgggtgcttcggcgaacaggtgaatccgatgatcaggcctggctgtttatgctggctgagccgacgctgcagagctttgcggagcgaattgcggatgatctgccggatgacctggcagtgctgaacgaggtgcagatgccggcctccgcctcaggttcaaagactggctggactggggccaccggcaatatcggtggtcttgatgacagtattggaagtggggccgagcaggttattggagctgataccgcgaacatcgtctcgctgggagggggcgcagctgggccaagctatcaggtgagtttttcccagcattacaggcagcatttgctagcttgtttttag

SEQ ID NO: 355711 - DNA, 591 bp, Pseudomonas aeruginosa
atgaaatcggcctcgtttatcttcgacaggcgtctgtatgagctgcttcaggaggaagggcacacaaggttcacgaccggtgaactgcgcgatgcctacgccaagcgcctggaaggcataacttttcgcatcggtgatgtgcgccgctacgtgtatgagcagatccgccgaatggttcgcaagggctggcttgtacatgatgaagagcgccgtgcgcggggacaggtctaccacctgcagcccatcccggcgcatctgcagctggagctgatcgacaacgggttcgagaacagcctcaagactgcttttgagccagagcaggagccgtcagtaattgataatgcggctgtatcgctgaaaccttcacccgatgcagatcagcacttggaagcgctccacaaagagatccggttggacttcctgtcttcgatgggcgaggcagagcgatacaagctgctcctggatgatatgccgcatctccgggacaaggtcgaaggcgagtatctggaagctagagaccgcagctcgcgcctgctgggtcatctccgcgccatcgagaagacgctcaagacgcttgccgccgcacgatga

SEQ ID NO: 355712 - DNA, 1359 bp, Pseudomonas aeruginosa
atgacgtttccccgttatccggattacaagagttccgggcaggattggatcggtgatatgccagtgcattggcatatgtatcggagcaaaaatgtcttctcggagagaaatattaaggctcttgaaagtgatgagcagctgactgcttcgcaaaagtatggagtaatcccgcaaaagctattttcccagctggaagaccagaaggtgatgcaggttatcttgggacgggatattttaaagaaagctgaagttaacgactttgtcattagcatgcgcagtttccaaggtgggctggagttttgctcttatagcggagcagtaagctctgcatatgttccgctctatgccaatagagaactcgacaatagattttttaagcatctcttcaagtccgtatctttcatttctgccctgcaaaatacgagcaatcttgttcgtgatggacaagccctcagatataacaactttgctcagctatcccttccttttccttcgcttaaagagcagagaacgattggtgcattcctcgaccacgaaacagctcgcatcgacgcgttgatcgcagaacagcagcgcctaattgatctgctcaaggaaaagcgccaggccgtgatctctaccgccgtcaccaaaggcctcgatccgacggtgccgatgaaagactccggagtgaagtggctgggtgaggtgccggcgcattgggatgttgtacccctgaagcatgttgtatcgactccaatcactgatgggcctcatgagactcctgagtttattgacgatggtgtgctttttatctcagctgaagcagtttctacaggccgcattaattttgagaaggctcgatatatttcaagagaggatcacgctcgatactcaaagaaatatttgccaaaaaagttcgatatttacatggttaagtcaggtgcaacgactggggttacggcgattgtagaaacggatgatgaatttaatatttggtcacctctagctgcgttgcgatgcaaaagtgactacgtaccgtatttcgtcttttacagtatgcgttcatacagctttcaggagtcagtagtgattagctggagcttcggcacacagcagaatatagggatgggtgtcataggaaatttaccgattacccagccccccctagacgagcaggcggcgattgcagattacattgcaaggcagctggatcgatgggatcgattgattgcagaaggtgttcgatctgttgagctgctccaagagcgccgctccgctctaatctccgccgccgtaaccggcaaaatcgacgtgcgcggctggcagcctccagccggcacccaagcccccgaattagcagtagcagaggccttataa

SEQ ID NO: 355713 - DNA, 276 bp, Pseudomonas aeruginosa; identical to SEQ ID NO: 121765

SEQ ID NO: 355714 - DNA, 1710 bp, Pseudomonas aeruginosa; identical to SEQ ID NO: 121764

SEQ ID NO: 355715 - DNA, 654 bp, Pseudomonas aeruginosa; identical to SEQ ID NO: 121763

SEQ ID NO: 355716 - DNA, 639 bp, Pseudomonas aeruginosa; identical to SEQ ID NO: 121762

SEQ ID NO: 355717 - DNA, 459 bp, Pseudomonas aeruginosa
atggttaaccggggcctgaaagaccagattcaagacctgcaaaaccggctcatccaagccgagtcaagagcgtccgagctgatagacactaatgcgcaattacaacgacaaacgcatgagctcgaacaggccaatgcgatgcacaaaagcaccttggataggcaagtggccgatatccagaacttggagcatcaacttaacgacgcctcggcaaaaaaccgggagcggaagcatgaaagcaaacaattggcggataatattgccgcactcgcaagccagaaagcagatgccgataagcaggtggccgtactatcccaagcattagaggtcaccaaaacggatctgaaagcctctcagaatagagcggaagttctgtccgatgagaacaagttgattcttcaggaaaaagcggtgattcaggggcagtttaagcagcttcaggagtcactgtcgcgataa

SEQ ID NO: 355718 - DNA, 435 bp, Pseudomonas aeruginosa; identical to SEQ ID NO: 157055

SEQ ID NO: 355719 - DNA, 639 bp, Pseudomonas aeruginosa
atgaagctcgccccatatattttagaacgtctcacttcggtcaatcgtaccaatggtactgcggatctcttggtcccgctactgcgggaactcgccaaggggcgtccggtttcacgaacgacacttgccgggattctcgactggcccgctgagcgagtggccgccgtactcgaacaggccaccagtaccgaatatgacaaagatgggaacatcatcggctacggcctcaccttgcgcgagacttcgtatgtctttgaaattgacgaccgccgtctgtatgcctggtgcgcgctggacaccttgatatttccggcgctgatcggccgtacagctcgcgtctcatcgcattgcgctgcaaccggagcacccgtttcactcacggtttcacccagcgagatacaggctgtcgaacctgctggcatggcggtgtccttggtattgccgcaggaagcagccgacgttcgtcagtccttctgttgccatgtacatttctttgcatctgtcccgacggcggaagactgggcctccaagcatcaaggattggaaggattggcgatcgtcagtgtccacgaggctttcggcttgggccaggagtttaatcgacatctgttgcagaccatgtcatctaggacaccgtga

SEQ ID NO: 355720 - DNA, 366 bp, Pseudomonas aeruginosa; identical to SEQ ID NO: 25155

SEQ ID NO: 355721 - DNA, 237 bp, Pseudomonas aeruginosa; identical to SEQ ID NO: 149133

SEQ ID NO: 355722 - DNA, 234 bp, Pseudomonas aeruginosa
atggcctgggacagaaacgatcctctcaacatcctggcgctgcagctcgacggtgaactgcgcgcagcggccgacttttgccatggctacaacgggccggcacagcgcgctttcgcccggcacatccagggcctgggcaagacgctcgacgagcttaccgtggcagacctgaaggcggcggccgcatttgcggacgcagaactgaacgacctgcaacagagagggctgatctga

SEQ ID NO: 355723 - DNA, 1149 bp, Pseudomonas aeruginosa
atgatggcgggaaacgatatgacgcaggcggacttcctttcgcgatgcgaacggagcggatatctattggtgctggtgcctagttcctatcttggaggggtgttccgctcacaggtggttgccggtttgtcacagcgtctgcctgaggttcgcctgattgctgtggacgatgtgcttttcgccagcaatagcgttcccgatggtttcgaccaagtgattcctaccgcccagttgaaggaaccatgccacgcagggaaacccgcggtgaattgtgcctattcgctgcctacctggctgacgctggatcacctggcgaagactgcgcaatgcatcaccctcgatctgcccgagcttctctacctgctggatattcctttggtctaccagaccggcgcgctgactcgcgaattggcgatgcagcatcacgccgagttcgtctcgctgcgcgagcgcctggccgacgagcgaagccggaagaccctggaagccatcatgcgcctgcgtttggacggcaaccgcgctgcgttgctggacgtgttgtgtccgggagagcaggaatacttttccctgtaccggggccccgagcatccgatcgtcttgcgaagcgacgagcattacgtggatatcggtgcctacgatggcgatacggtgaagaagttcatgctggcggctcgtcatgaatatgcttcgatccatgccttcgagcctgatccggcgaattaccggctcatgcatgcgtcgcttgctggaagtgtcggtctccatctgcataaccaggcggtgtccgataccggcggccatctcgcattcgcagcccacggcaccatgggaagcagggtcgagatagacggcaccgtgcaggtgccgtgcgtgcggctcgacgatctcctcgatgtcatgaccttgctgaaaatggatgtggaaggccatgaggcacgggttctgcggggggccgcgcggctgatcgacgagtgccggccgcgcatggccatcacctgttaccaccatgtgcaggacctgctggacatcgtcgccgcgatcgacgggatcgctgcgggagcccggctgcgcctgcgccattactcgctgtatttctacgacacgatcctctatgtcgactggcccgatgctcttcgtgaagggcgctga

SEQ ID NO: 355724 - DNA, 924 bp, Pseudomonas aeruginosa
atgtcggaagtcaatcctcgccagggtcgcctggcttgcatctatttcttcgccatggccgggctggtcatcggcaacctgatgggacgcatcccggcgctcaaggagcagacccagctggacgagcgcgcgctcggccaggccctgctcggcgtcggggtcggcgcgctcacggcgttcccgttgagcggtttcctggtccagcgcatcggcagccgcagcgtagtgatcggcggttgcctgatcatgctgctggtgtttccgctgctcggcctgagccagggctggtggcaactggcgttggccttctacgtgctgggcgtgagcttcgccgggatggacgtggcgatgaacatccaggcggtggatgtcgagcgcctgctcggcaagccctgcatgtccatgctgcatggcatgtacagcctcggttgcctggtcggtgcgttgagcgccgcggccctggccggactgacgccgttctggcacttcctcattctctccgcactcggcctgctgagcctgccattcttcgtacgcgcgttgcttccgccggacccgagcaaggcgggcgcgcgcaagggcggcggcttcaccttgccgccgcgggccttgctcggcctgggcctgctgattctctgtgcgttcgtttccgagggcggcgtggctgactggagcgcgctgttcctgcatagccgagatgttcgagaagggcgaactgcagaccctggtcaaggacgcggcggccaaagccaacgcctgatccgcgcatccgacgaagagccccgccttgtgcggggtttcttttttgtccggagaaaccagcaaggaaaccgggagcctccatgtcggaagtcaatcctcgccagggtcgcctggcttgcatctatttcttcgccatggccgggctggtcatcggcaacctga

SEQ ID NO: 355725 - DNA, 510 bp, Pseudomonas aeruginosa
atgagtgaggtgaagcggtacatcattggccgaaacggcctgcctgagttccatgattccggtgaatatgttgcgacgagcgactacgacgccctctccgccaagctggccatggctgaggacgcagcagaaaagggagatgctgctcgccagcaatgcggtggcatggaaatggagatcgaggaacttcgcgctgaactagcggaactgcgcgcaagggtggctgttgtgccggatgggtacgcgcttgtgccggttgagccaacgcgggagatgttcattgccatcaacaaggaggacgacaaggcctatgccggtggctgtcatcacggcgcacagtttgaatggctgtggcaggcggctctcgatgcggctccgcgcctcaacggcaaggtggtgagcgaggggcttttgcggaaaatcctgagcggcgaggaatgttcgaaggaagcggaagagctgagagccctgctcggcgaggggaaggaggatgatcgagatgaagcctga

SEQ ID NO: 355726 - DNA, 1497 bp, Pseudomonas aeruginosa
atgacacagctagggaacgaattcggtgaaatccgcaactctacgattacaaaactagaggacaaagttagaaagcaggactacggccaatatctctataaagtaagcattcataaaattcgtggcttcatcggtgaagatattacttttgacttcccggtaaccgcattggtcggaccaaacggtagcggaaagtcttccgttatgggtacagcaggatgcgcatacaaggtaatcaagccaagcctattctttcctaagagtgtaattggcgacgagagcatgtctggctggcgagcagaatatgagatgattgatcgcaggttaagtcagcgtcaatccatacggagaagcagcagcttcagacgctccaaatgggtacgcggagatgttgtcgatcgaccagtgctttttttcggcatcgaaagaactgtgccagccggcgaaaagccgaagtacaagaagctaattcggtcgacttacaaatacaaaggttcgattactgctctcggcacccctattgccaaacaagtcgagcatatacttggcaaacaagttatagatttcaaagtagcagaccttgggcatgaaggagatttttttgtcggaaagactgggaattctagttattcagagttccactttggagccggtgaatcttccatcatacgaatggtctccgggatcgagagtgctcccgagggcagtctgatcctgatagaagaaattgagaatggcctccatccggttgcagctcgtcgaatggtcgagtacctcatagatgtagctgagcgtaagaaggtacaagtgattttcaccacccatagcgactacgctctccaacctcttcccgacatagctatatgggcttgcattgatggtaggctacgccaaggaaaactcagcattgagtccctacgagcaatatctggtcgtgtcgataagaagctagcgatatttgtagaggatgaatttgccaaatgctgggttgactgcattcttcgagagtatgcgggcacgacttacgatcaagtagagcttcatgctctttctggagacggaaacgctgtatcgacgcatcgccatcatggaagaaatcctgctatgcgctttagatcaatgtgcgttatcgatggagactcaaagcagcaagagtccatagaagaatcaatcctccgactcccaggtgatcaacctgagttaaccatattttcttccgtgaaagatgcacttgatcaagagctcgccatactcacagtctcttgccatcggcagcccggatcgcaagacatggtcagaaaagctattgaaaaggtttccgcattgaatagggacccgcacactatcttcaatagcttaggaattgaaattggatttgttcccgagagtattgttcgaagcgcatttcttagcatttgggctcgtcggaatgaggagtattgccaaaaatttgcgcgcacagtgcaagaactaatcaacagccaaggccggcaatga

SEQ ID NO: 355727 - DNA, 321 bp, Pseudomonas aeruginosa
gtgcagaagaacaaccaagggaaagggcaggtctcgccagtggagaaggtgcgcctacgggtatcagcgatgatcagtagccctcgggctcaggcggagcgccgggcgtcaatctggaaggcgcagggggactcggaagaggcctggcagcaggtgctggaggagttggccgcgacggaaggcttggagatgacgcggaacgaggacgggactgtactgctgatgtggcagccttcagaggaggagggcgtcggcggggaggaggcatacatcgatgagatggtggtggggcgcctacatgaggagtctgcgccgttctaa

SEQ ID NO: 355728 - DNA, 759 bp, Pseudomonas aeruginosa
atgagcaacaacccgcacttcatgaacatgaccgccgacacgctcggcaagagcttgctgcagggactgatccaggaaatccggatcatgccggactgctggcagaagcttcccgaggccaagcagcaggacatcatcgaccgcctggagcgccaggtacggaatgccgccaccatcgcgatccacacgattgccggcggcgaccgcgacacggtctacggcaagctcgaatccttcaccgcaaaggacaaggtaaaagcggtattcaccgtgagccccagcagtccgaaccaggagcaactctttggcgctgtgcaccaggactgcttgttggtcatcggcggcgccgctgagttcctcgacggcatgaaggacgtgaaggcggatccggaccagaacccgctggacctgaatggcggcgacggcgacatggaagacggcgcctggggcggcgagcagcagcccgacgatgatgtcgtagatgccgagttccaagaactgccgcaactcaccgtcgagcgcttcgccggccacaccctgggcgagatcgccatcggcgtcgccaccaagaaggacgtgttcgacgcggcctggctgcaatcgcgcttcgctctcaccaccgaggaagccgagcgcgtcgttctccaactgctgaaccagggcgtcatagtgctcgagcacgatgacgaggaatcccgcgagctgaacacttaccgagtcgtcaagaagccgggggatatcgccctcgatctggagtga

SEQ ID NO: 355729 - DNA, 624 bp, Pseudomonas aeruginosa
atgcactgcgccatgcgtgatggcgcagcgatgtcgttggggctagagttgggtggcccggcatggggccggaacaaggagaggcgcgtggcgaacttggtatacgttgacaattccaacgtttggattgagggaatgcatgtggctgcattccagaatggaatggctcccagcgtgtgggatgcagtccagaacagaatttgtgatcacggttggaaaatagatttcggcaagcttttcgacttcgcaggtggcgatagggctaatgttagaaaggcagcacttttcgggtctcggccaccgcaaaacgactcagtgtggggggctgctcgacgcaatggctttgatgtcactacttatgatcgcaatgtcgccaataacgaaaagaagatcgataccgacattgtcgcgacgatgattgaagattccttcgtcatacttcagcccggcgatgagataacacttgtatcgggtgatgcggactacgttccggcaattgacaagctcaaagccaggggtattccggtacacgttgtgttttggaagcatgcggcgcgagagctgaagcaggtagcgacttcctttactgaactcgatccgtatctgaagcatctctcgcgatag

SEQ ID NO: 355730 - DNA, 429 bp, Pseudomonas aeruginosa
atggaatttggtcaggtcaggcagcgccgtctgtcggatgacatcgttgcgcaactggaggcgatgatcctggagggcacgctgaagtccggcgagcggctgcccgccgagcgcgtgcttgccgagcagttcggggtttcccggccgtcgctgcgcgaggcgatccagaaactggtggcgaaggggctgctggtcagccgccagggtggcggcaactatgtgaccgaatcgctgggcgcgactttcagcgatccgctgctgcacctgctggagggtaacccggaggcccagcgcgacctgctggagtttcgccacacgctggaagggtcctgtgcctactacgcggcgctgcgtgcgacctccctcgatcaccagcgcctgaccgaggccttcgaggcgctccaggcctgctatgcgcgcaacgactag

SEQ ID NO: 355731 - DNA, 1344 bp, Pseudomonas aeruginosa
atgtctgcaatcacgcgttatcttgccatgcttcgcctgttcggcatgctgctctgcgccgccgcgattccctccgttgccaccgcgacggtgccggtcaccgtcgcggtggcagcgtccgatgtcgaggaggaggccgtggaggcatcggcggtcggcgccgaggccgaggcagcgcgcgatgcgggctacgagtccgcggaggttccggcgctggcgcggcgggtgaccgaccttaccgcgaccctcgacgccgccgagcgtgcccgcctggaagcttcgctggccgcgctggaggcccggaagggtgcccaggtagcgatcctgatggtgcccagcacctatccggacagcatcgaggcctatgcgacgcgggtcttcgaggcgtggaagctggggcgcaaggggatcgatgacggcgtcctggtgctggtggcgaaggacgaccggcgcatgcgcatcgaagtcggctatggcctggaaggaacgatcaccgacatcgatgccgggcggatcatccgcgaatacatgtcccctgcgttccgtcagcaagactacgccggcggcctggaagcggcggcgcagcgcctggtacgactgatcgacggcgaggcgttgccgccgccgccgcgcgacccgctggagcccggcgcggtacggcagaccctggctatcgcattcctgctcggcgctctcggcgggggggcgctgctggtacgtccgcgcgcctggtactggaccctgggggcggtagtggcgctcgctgcggcgttggcgctggggcggcactggccggcaggggcgatggtggcgctggcggagatggtggcggtcctgggcgtcggcttcggcgcgttgctcaagtattcgcgcggtgcccgctggttcttcgccattcttgtgctctatgcgctggggctgttctgggcctaccgccgttatggcctgccggtgctccattacggattggccgtgccgctttcgctgggactgaccctgctgatgctggccggtgcctggcaggggctgcgcagaggacggcgctgggcctacctgccgggcctgctcggcctgctgctgaccctggccctggagtgcctgctgttgctggtggacgacccgctgaacagcatcgaggcgctgatcatcctgcccgccgcttgcctgccgctgctcatcggttgcaatttcagcgccggcggctcggggggagggcgtcgacgcggcggcgattacgctagctcatcgggttcctcgtcgtcgagttcgtccagctcgtcttcggactcgttctccggcggcggaggctcgagtggcggcggtggcgcctccggtagttggtga

SEQ ID NO: 355732 - DNA, 630 bp, Pseudomonas aeruginosa
atgaaaatcgccatcatcccggctcgtggaggtagtaagaggatcccgcgaaagaatataagggatttttgcgggaaaccaatgattgcctggtccatcgaggcggccattgatgtacccttcatgcgaccggtagagttagctgatgatcatgcaggaacattgcctgtgattcgtcaagctattgagggctatctggagaaaggtgtcttcgctgagcaggtatgctgtatatacgctaccgctccttttgtacgtcctgaagacctgtatcaaggctgtacccggcttgaggagtcaggcgcggcatatgctttctcggttactacattcgcctttcccattcagcgtgcaatacgcttgaaagaggatggtcgtgtagaaatgttccagcctgcttatatggcgtctcgatctcaagatctggaggaggcctatcatgatgctgggcagttttactgggggaggagcgaggcatggctgaaggaaatccctatctttgccggaaacgccgttcccattctccttcctcgtcatagggtccaagacatcgatactcctgaagattgggtaagggcagagtggttattcaaggccctgctctctgaggcggatgtatcttcatcatga

SEQ ID NO: 355733 - DNA, 1014 bp, Pseudomonas aeruginosa
atgcccctgttgaattccctgactgtattgccgttgcctggcgggcagcgtttgagtggcgacgaaaccgatagccggctcagccttgccctggatggtgcgttgctgttgcgcctgcgcctggagcgcacagacacggaaatacggctggcggtggaggagcttcccggcggcgatgccgagcatgcgttgtgggccgccagctactggctgttcgcccgcgatccggattgccagcggctcgtctggtcgctgtcctgggaacccgaagagtccctggcgaaggggatgctgacaggagccgccgcagcgggcacctatgtctgcgagaggggccggttctggcagttgccatggccctggctaccgcttgcccagccgtgctatccccagtcgatgcaacttaccgatggaaagcgtcatccgctgcgccggccgaagcccaggggagaggtctaccggcgcttcgatgcgcgattgggatgctggatatccttgcgtaccctggacatcgagagggacctggagcgttttcatcgctggcagaactcgcccagggtggcggagttctggcaggaagatggaagcctggaacaacatcgcgagcgtttgcgccagctcgaggcggatcctcatgcactggggctcatcggctgtttcgacgatgagcccttcgcctatttcgaggcttactgggcgaaggaggatcgcatcgcgccgttctacgtggccgaagactacgaccgcgggatccacatgctggtcggcgaggaggcccaccggggtccgcacaaggtcgcctgctggctatcggcactggtccactacctgtttctcgacgacccgcgctcgcagcgagtggtggcggaaccgcgcgcagataacgcgcggatgatcggtcacatgcacaacctgtgcttccactgcgagaaggagttcgactttccgcacaagcgggcggcgctgatgatcatcggccgcgaacggttcttcgagcgctgtcgtctggcctga

SEQ ID NO: 355734 - DNA, 627 bp, Pseudomonas aeruginosa
atggaagtagaacaggctctcaaggactcacataattttctgaataatatttttcatgatgcgtgcctagctgtgtctacttcccatgaggaaactcagcgattagtctttcagctgatcagatgtcaacaaagcatgccaactgaacttcgtctgatgccctgtttcgcccaattcatcttcgcaacagaagctctttacaacgcttatgaggaccatgaattgactgaaatgggaaactggatcggctgggctttttctgaagacttgattgagagtcatacaaaggagttacacattggcagaatcaatagcttctatacatccttagtaattagaagctggcctggctttttccctacaatggttaagttttttggtgcattcttcttttatgcgcatgaaagaacagcaatgaacaatatagcgcgcgatctgtgggctagcgcgaagttaagttttgaggtggtgatgagtgtcgcctctgagcacatagatactcctgaggtttttctaggtgtcaatttagcatgctgggccgccaaagaggctcctgatttggctatcgatttcgtgcctcaactagagattctgtctgagaatgacactttccccaaatggtattga

SEQ ID NO: 355735 - DNA, 906 bp, Pseudomonas aeruginosa
  misc_feature (659)..(668): n is a, c, g, or t
atgagtgctgctgaatatgatcggaggctaagagcgataaagtccaagcttcgagaatatcgcccagactccgttttgaatatggtgctggatcactttcatagatctgggggtaaggaaaacccgactatgggaatgccatggatagttctatttctacttaagctatgtatgcttgaaggtcataggaatggaaaggttataaaccccaaagaattctataagttagcgcagcggttatatgatatacagtcactggcgtgtcctattcagccggatgcgcctggtgatttcatcttgaagatgcgagcttttattgctcagcaggctggctatcaacgtgatactgttgaggagatgcgagccctaactcgtcaaatgatttggttcacaggtggtgatgatttttatagtagaaagtttgaagagttatatgggttgagtcttgatagcttttattatattgcattttatcttgttgtgattgttgcagataaagctaagggggttgttggattaaacttgctcgatatgctgttttggttgtctcctcgtatccccattgctcatataattcggttcttggctttggttggagtaaagtccgaagatcttccttcgttttttgaaaagtctagaattaaagatgagtgtaaccnnnnnnnnnngtctcagttcggccctgcgatggagtgctatattggatcaattatggccgcttctggagtcgagtttatttctgaagaagaaattgataagtttctttctgagagaggtgttgccaagggaagggtaactgattatttggttccgggtgatgtaaacatactggttgagtcaaaagctattgagcctggcgatcttgggcatgtgagcattcgcgtgactaagcggctatttaagtag

SEQ ID NO: 355736 - DNA, 843 bp, Pseudomonas aeruginosa
atgacccagccctcgaaacggaatgggcaggttccgctggacgacgccctggagcgccatcgcgacgcgctgaaggacctgttcccgctgccgccctcccggccgaaatcgcgcaaggcaagcaaggcggccggcgtcgcgctattgctggcgctggccatcggcgccctggcctggctggacccggcctacaagcgcgagcgcttcgccaccgccatcggtgagcggcgcgacgtgaccctggccgacggcagccagctcctgctcgacagcggcagccagctcgaggtcagttggcacccgctcagccgtcgggtcgcgttgcgcgcggggcaggtgcttttcgaggtatccccggcgcgctatcggcccttcgtggtgtccgcgggttcgaccgacatccgcgtgctcggcacccggttcaacgtgcgccgcctggacgacgatgtccgcgtgaccctggagcgtggccgggtggaggtcggcacctcggctacggcgcaagcgccagtcgtgctcctgccgggccagcaggtcgatgccattggcgggcaactgatgccgctggccaaggtcgatgccgccacggcgatggcatggaaagacgaccgcctggtcttcgagcgcacgcccctgggcgaagccgtcgcgctgctgcgccattatcgcaaggcgcccattctcctggacgaccccagcctggcctccctccggctgaccggcgtcttcgccgcgcacaacgccgaccggctgctcgacctgctgccgagcatccttcccgtggccgtgtcgcggcaggaggacggcagcgtcgagatccaacgcaaatcgacgcgaaaataa

SEQ ID NO: 355737 - DNA, 648 bp, Pseudomonas aeruginosa
atgcaagcaataatattccaacaaaacataatcgaattcattgagcgatacgatggtgagaaccacaatgagtggaacgagacgacaggcgaaattacaaccctacgaaataccgttagagcccactatttgcagcagcaaaattttagatgtgcatattgtaggatagaaaagaaagagcaccatggcttaacttgggatgtagagcacatcatacccaaggcgactcatccaaacttcctttacacggcacaaaaccttgctcttgcctgcaaagaatgcaacatagcaaagggaaataaagaagtactaacacaacctagagccagtttgagagatttcccgacgagatctgaggactataaaatagtccacccccacttcgacacttattccgaccactttgaggtaacaatagttggtggaaaaatccgccaccgagctaaaaactctcacaaagctaaagaaacctatatcatttgcgaccttatacgatttgactataaatatgccgaatgggagaactttgatcttaccatagttaaacgcttctctgattttgtaaacagatgccccaccaacgcaacgaaagagcaaataagctcattcatgagcactatcacctttacaactaatgtagatttttaa

SEQ ID NO: 355738 - DNA, 1338 bp, Pseudomonas aeruginosa
atgccattctgcatagaatcaatatctttcgacaaccactggacgcaactctgcatacccgaaagaaatcacgcagatgaaaacatctttacccttatcgtagggcaaaatgcaacagggaaaagtcgcttactgagaaaaatagtcagcacactcatattcgacgattcatcacaagaagccccctcatatcgaaatcaatatgcctgggacgatttcatcccccacacagatttaaaacttagctataactctcaaacttacccaaataatgtgatagcagttagcacaggacgacacgacaggttcccttccccactgcatcgtaaaaataaaagtacaaccccatatacctacattgggcaaacacttagaagtacgcgttcccccataacaaatagcataacaagcattctctatggactattctaccaagagcaaaaataccacagcctagcacatatttttgactatcttgaattcctcccatacctcgacataaagctaacactaagcccaactgctagacggtacttccatgatctcaacaatacaaaaagcgtacaacctaatgataaccacatccaaatacatctatttgatggcttctcccgaaccaagattaaaaatattgacgcgcaagcgctgcaccactattactctctcgaacggcaaagcaattccaacatagaaatagacctacaaaacccacactggctaccaagacagaccaacattgaactaatagttcatctactaaaagaagagcttttattaatatccgacatcactctaatccagaaaaaaaccaagaaaaaacttagattatctcaagccagctccggccaacagtgcatgctaaccatgatacttggaatagcaggatctattcaggataattcgttaatttgtattgatgagccagaaatcagtctccatccgcgatggcaaagcgacatcgtaaaacagattcagtacgcattctctgatcacagagggtgccacttcataatcgcgactcattcaccacaaattgtctcaggcctcatctctccaaatggccacgtcctaaacattgaagatagaaccctttaccgcacctctgagtacgctaaaagatcggccgactttcaactagcagaaatatttggcactccgggcttcaacaatgagtatttaataagaaccgcattgacaattctcacaaaaattaccagatcggaagtttttagctacgatgataaccaaaaactagagcaactaattcactccaagcgtgagatttcagagaacgaccccgtttaccacctgattgaacagatagaactcttaaggtaa

SEQ ID NO: 355739 - DNA, 423 bp, Pseudomonas aeruginosa
gtgccggtggcgctgctgctggtgttcaccttgctcttcgccatgttcaacaacgtcaaggacggcctgctggtgttcaccggcatccccttcgccctcaccggcggggtgctggccctgtggctgcgcgggataccgctgtcgatctcggcggcggtgggtttcatcgccctgtccggggtggcggtgctcaacggcctggtgatgatctccttcatccgcaacctgttgcaggaaggacgcagcctcgaccaggcggtgtgggagggcgccatcacccgcctgcgtccggtgctgatgacggtggtgatcggcggcatcctgtcctcgaccatgctgaccctgctggtgctgccggtgctctatcgctggacccacgggcgcgacgccggaccgcgcgaggagacgccggcggccggctga

SEQ ID NO: 355740 - DNA, 957 bp, Pseudomonas aeruginosa
atgaatgcctccttgctcagcgagcgcagccgggtgttcgaacgtgccgacccctatgcggtgtccggctatgtcaaccggcacgtcggtacgcactgcatacgcctgccggccgccggcaggccgcaagccagcctcgaccaccgcaccttcgccagcctcgacctgtgccggatcagctacggcgcggcggtacgggtcacctcgccggcgctggagagcatcttccacctgcagatcctcctgcgcggccactgcctgtggcgcggcggcgggcaggaacacgccctggcgccgggcgagctgttgctgatcaacccggacgatccggtcgacctgacctattcggcggactgcgagaaattcatcgtcaagctgccctgcgcgctgctcgaagcgatctgcgccgagcagcgctggagccatccggcgcgcggcgtgcgcttcctcgaacatcgctatcgcctggaccagctggaaggcttcgtcggcctgctcgccctggtctgccgcgaggccgagtccggcgagcggctggcgcgggtcgacagccacttcgagcagatcctcggcagcaagctgctgaccctgctgaagaccaacgtcagccgcgaggaccccggcgatgcgcaggtcgtcttcgcccgcctcgatgcctacatccgccgccatctgcagagcgagatcgaggtcgcggcgctggccgagcaggcgcacatgagcacccgttcgctgtacgcgctgttcgagcgccagcttggcgagagccctcggcaatacattcgccggctgcgcctggagcgcatccgcgcctgcctggaagaccccggctgccgggtacgcaacctcaccgaactggccctggacttcggtttcgcccacctcggccgcttcgccgagcaatatcgccggcagttcggcgagctgccttcggaaaccctgcgccggcgcgcctag

SEQ ID NO: 355741 - DNA, 909 bp, Pseudomonas aeruginosa
atgggtgagcagcgccagcgtagcgttgccgaccatgctgatggtggtttcgaaggcggccatgaacaccatggcataggccgctaccaggtcctcgaggcccagtccggcctccagcatcgcggcgccgtcgaggatgctcggcgccgcgccggacggcgggcgcgaagagccatcgctccagccgcgcgcctggcgttgcaggtagtcgctgaaggcggccgcgctgcggttgatctgcccggcatcgccgtggctggcggcgagatcgagcccggcggccagatcgcggccccagggcagcagttgcccggtatcttcgcggggaaagccgaacagctcggcggccacccggatcgtcagcggttcggcgaaatccctgagcagatcgggctcgcggcgctccagcaagctgtcgaggagttcttccaccagcacctcgatgcgcgcttcccagcggcgcacggcgtcggggccgaaggccggagcgaacagcctgcgcaggcgggtgtgccgcggcgcgtcgttgaacagcatgaagttgtcgtagaagcgcgccagcggttgcaattgctggtggccgaaccagctggcgccgccctggcggacgccggcggcgccaaggcgagcggggtcggcggagaaacggcggtcgcgcaggcacgccgaaacatcggcatagcgactgatccaccagatcgaggcctggtcgcggcagaccggcgcacgggagcggatcagccgcaacagcggatagggatcggcgacgaagtcgggatggtaggtgtggatgtcgaaaccgtcgctccgcggggccagcgccggacgctgagcgtcatggcgcggctgcgcgctgccttcctcgctgaatgcgtcgtccatggcccttgctccgctgggttggcgtaa

SEQ ID NO: 355742 - DNA, 519 bp, Pseudomonas aeruginosa
  misc_feature (273)..(282): n is a, c, g, or t
atgggcgaactcgacaacgacatctggagcgtgcgcggcggcttcgcctacggtccgcaccaggtgctgctgtcgtaccagcgcaacaacggcgacgacgacttcgactacctgcgccagaccgactccatctacctggacaactcgatccagtacagcgacttcaactcgcccaaggaacgctcgctgatgctccgctacgacctcgacatggccgccttcggcgtgccggggctgagcttcatgacccgctatggcaagggctgggacgcnnnnnnnnnntgggacgccgattattcgaatgccaacagcgtctacatgcgcaccgacgccaacggcaacccgctgaccaaccagggccgctgggaacgcgacgtggaggtcaagtacgtggtgcagggcggcgcggccaaggacctggcgttccgcgtgcgccaggccacggtgcgctccgacagcttcgagtcggacctcgacgaagtccgcctgatcgtcgaatacccgctgcaagtcctctga

SEQ ID NO: 355743 - DNA, 192 bp, Pseudomonas aeruginosa
atgaaccgaaacgacctgcgccgcgtcgatctgaacctgctgatcgtgttcgagaccctgatgcacgaacgcagcgtgacccgcgccttcgaactgtcgatggcttggcgcggcgcccaggacaacgatccggccgaacgctggctgcgctcgcggatcagcatgttcatcggcgatccggacagtctctga

SEQ ID NO: 355744 - DNA, 264 bp, Pseudomonas aeruginosa
atgtccgccccgatccttctcagcgcccaccatcgcgccatgcatgcgctgtacagcgagcaccatggctggttgcagaactggctgcgcggcaagctgggctgcgcggcggacgcggcggacctggcccaggacaccttcctgcgcatcctgctcaagcgcgaactgcgcgagatcggcagcatgggggtttcccagcgtagcgtcgagcgctacgtggccgaggcgctgtaccactgctacctgctgcgctacggcgaatga

SEQ ID NO: 355745 - DNA, 177 bp, Pseudomonas aeruginosa
gtgaatggcctgcagcgggtccgcccgggcatgcaggtggatccgcagaaggtcgagatggccagcgccgacaccctggccaccctcgcgcgcctgcggcagtcggtcggcgacagcgaaccaccgaaggtggcggcgtccaaggacaacgccactcgcaacgagccgcgcggctga

SEQ ID NO: 355746 - DNA, 285 bp, Pseudomonas aeruginosa
atggcgctctcgtcgccgaccaccacctcgatgcccagcggctcggcacgggtgcgcagcacgtcgagggtctgcgggtggcaatggcgggaggcgaagaatgcctggctggtgcggttcttcgacagacgcttgcagaaggtcatggcctcggcggcggcggtcgcctcgtcgagcatcgaggcgttggcgatcggcaggccggacaggtcgctgaccagggtctggaagttcagcagcgcctccaggcggccctgggagatttccggctggtacggcgtgtag

SEQ ID NO: 355747 - DNA, 267 bp, Pseudomonas aeruginosa
gtgaagttgcccgtcgacatggacccgcaacaggccgagcggctcaaggccgaggagaaggaaatggcccagcgcctccagcgcgagggcagctggcggcacctctggcggatcgccgggcactatgccaactacagcctgttcgacctgcccagcgtcgaggcgctgcacgacaccctgacccggctgccgctgtttccctacatggacatcgagatcgacgggctttgccggcatccctcgtcgatccatgccgacgaccgctga

SEQ ID NO: 355748 - DNA, 642 bp, Pseudomonas aeruginosa
atgcatcgactgcacggcctgctgctctgcgctcttcaccgggacatagcgcatgctcggacgactggcggcttcgcagatcgcctcggcgtcgtgtgcatcgtgcttgtcacccttgacgtagggttttacgaactgcggtgcgatcaggcgtaccgtgtggcccagctcccgcaactcgcgcgcccagtagtgcgcactgccgcaggcctccatcgccaccaggcacggcggcagttggcgaaagaaatcccgcacctgtgcccgcttgagttggcgacgacataccacatgctcgtgacgatcaacgccgtgcacctggaatacttgttttgccagatccagaccaatgcgactaaggttcatgctgactccccctccgggacttgtggctgcaccattagtctggcgcttgacgccgtaggagggaggagtccatttcattgccctacgctacgatttgaccggtggttccgggcgggcgccctgccgaggctggggcggcgtctcgcttggtacgggcgcgcgacggaccatgaaaaacggggcccgaaggccccgttgggtcgctcatgggagcagtggcgcttcagtcgtcgccttcgtcgtcggctccatcgacgttcatccccagctccttga

SEQ ID NO: 355749 - DNA, 471 bp, Pseudomonas aeruginosa
atgcataaagaatctggccacacggcccttgacaagatgcgctcccagtggcggttgatgacggtttacgagcgcttcgagcaggtcgttgccatcacgctttcgggcgtcatcgcgttggtaattgtgatttcgctgattcagttgattcggctggtgttcacactgctcgtcatggatgcgctgaatccactggatcataaggttttccagctggtgttcggtgccaccatgacgctgctgatcgccatggaattcaagcattcgatcgtcaaagtggctctgcgcaaggaaagcatcatccaggtcaagaccgtcattctgatcgcgatcctggcactggcccgcaagttcatcatcctagaacccgacgttgatcctgccaaagtggccgcgctggcggggacggtactggccttgggtctgacctattggctcatgcgtgaacgcgatgaccgcaagagcgagtaa

SEQ ID NO: 355750 - DNA, 186 bp, Pseudomonas aeruginosa
atgatttttttagggagtgattcttgcgaatcctccggcctgatgccctgtgcgaagatgacgcgattctgggtgcccttcgtcgctcgagctatgcgattaagtttggtcgagccggtaaccggtgtcctgtgtttcaaggggctcgttcagataccaacccaggcattcatgctaagagtgtga

SEQ ID NO: 355751 - DNA, 279 bp, Pseudomonas aeruginosa
atgatctggacagaagaaggccacaaagcctaccccgaactggcagcagctcaacgcgccctctacgaagcgagggatcaaaaaagactcctgatgagaaaagcattccccgcagggaagcgggtgctgattcgactctacaacggagaatacacggggacggtcaagcgcaccgacctgaaccaggtcttcgtgatcaaccccacaaccggggagaccaacggcgccaatcctctgcttgacactcgcggaaagccttcggtcgagatcatcgactga

SEQ ID NO: 355752 - DNA, 159 bp, Pseudomonas aeruginosa
atggccgactcctttgccgccgacatcatggtcggcctgttacctgtgcaggaaacgagtcccgaggctcgcttcgtcatggggcttgagtacttctcaccagttcgcgccgctggtagccgtcgtatgctcggtgtgcaaaaatccattgatcgctag

SEQ ID NO: 355753 - DNA, 222 bp, Pseudomonas aeruginosa
atgacgtgcgagacaagcaactgctgggtggtgcattcgcccaacgagtcagccatcagcaacgatggtgccggcttctggtccaacgagttcggctgggttccgttcgaccaggcgacgcgcttctcgacggaagagaccgggcgcttgcgccttccgttctcgactggtggcgatgcgcgcttcgttccgtggcaggaagccctgcggcactacggctga

SEQ ID NO: 355754 - DNA, 690 bp, Pseudomonas aeruginosa
atggcagccacatcggcatccacaagatcggcactgcccatcgtcgtatcaggccagctttcgattcgcacaatccacggccgcaatggtccgttctgcgtcggctacctcgtcactcctatcggaaacttcgcggtgaaggacgcggagctggagcaataccccgaaggcaagtacgacggggagttcgtgatccgctacatctttccgaacccgatccccatgcggggcggcatcaagttcgagattcgttgcaacctggatggcatgacgctcttcggcgttgacaaactgagccgcgacgatattcgcagcttttccacccaggacatcgatccgctcgatgaagaactgggggcgcagcctgcggcaacgccggccaagtccaccaaggcatccagacccgccaagcccgcatccgtgcaggcgtccgcggacccgatggtcgataccacgcctttcggcgtggatgcgccgacgcccgctgcggcggctgcccccggcagcaccgaagatggcgacgccgcactgttcgggctgctctggccgctgggtgagtccgtgaaactggattcgaccatcgaccgtcgcaccctgcgcgcgcagatcgcccgcctgggtgaactgggctacgcgctggacttcaagacgcaggagtggagccgccaggccgaactgcaacctgcgtga

SEQ ID NO: 355755 - DNA, 306 bp, Pseudomonas aeruginosa
atggcatcacatcgcatcgaaacctatagccaaaggctggcgttcccaatcggtgctctcatattcagtagaagcgttaatcgcctcatgcaagcgggttatctggacccgattccgtacttcagacggcacgctcgtggcgactggggtgatgtcagcgttcagcaatggcaagccaataccactgcacttcaatcgggtgcgccgctggaatcgcactacgagatccacccagggctcgccatccgcatcatcacagatggaggccgtaacgtcaccgccatcgtgctgtcgtccgaagactga

SEQ ID NO: 355756 - DNA, 396 bp, Pseudomonas aeruginosa
atggctgtcgccatgccgacacggttccacttattcgacgaggcgaagctcgccatcgccgatcttcgggactatcccgtctatcgctggcaggcagaagtctgccccctgctggatgagaggctggcctccctcatgccagtggaccaggagaacctccaacgggtgacttccttcgagatgatggcgctatgggtcgcagcgggctatggcgtcggggtatctacgcgatcgcgcattgagcgtgcccatgaatggggaatcaccgtgcgaccgctcgccggcggtccctacgagatcgcgacatacctgcagcggccccacgcgcatgccaattccacttcggagcggttcgagcgcagagcgctgcaagtcaccggggctggcgtcacatag

SEQ ID NO: 355757 - DNA, 219 bp, Pseudomonas aeruginosa
atgctcccctcgttcgatcttgcccatgtgggaacgctctattccagccagcccggccagttcctcctgagcgatgccctggtccatgcggaacgcgcgcacagccttgccaaaagcctgggctggctcggcttcatatctggttgtgccagggggacgcccccgttgaacagtacgcctctgcatcggcagaagcgtcaggcagtcactagaatttaa

SEQ ID NO: 355758 - DNA, 891 bp, Pseudomonas aeruginosa
atggaactgcgacatcttcgctactttgtcgtcttggctgacgagctgcatttcacgcacgccgcggagcggctgcatatcgaacaaccgcccttgtctcgggcgatcaaagagctggaagacgaactaggggtcgtactctttgatcgtgatcgcagaggaacgcggctgaccgccgcaggagttgccttcctgcaagactctcgcaggcttttcaccgttctcgaacaagcccgggagaacgtcaaggccgtcgcggcgggtttgcggggtagcctgcgtatcgcggtgtctgatggagcaatcgaccctaggctttcatcgttcctggcccgttgccgcgccgaagaaccagagatcgaaatacgcctgtccgaagtacccttggccgaacagatgcgggggcttcgatccggcgatttcatgatcggcttcgcacacaccgcggatgtcaacgacggtatcgttgccgaaccaatatggcgagacccgctggtaattgccgtaccggcacggcacgcgctactcgctcacaaggaagtgccacttcatgaacttagcggtcacccgcttgtcttgtgcgatccgcaagtctgcgagggttactgccgcgagctggcgcgccttctaggacctctgggacaccagaaaaacgtcgttgagcatgtaacctctttggacatgatgctcacgctggtcggtgccggttatggtgttggcttcatggccgcgaacagaactccagccacacagcggcctgatgtcgtaatacgcccgttggctgttgaatccgcaattattacgacctacgtgcttcggcccgacaatagcgcctcttcggcctctctggagcggtttatcgcgcgcctgcgcgaagggctgggtaactaa

SEQ ID NO: 355759 - DNA, 324 bp, Pseudomonas aeruginosa
atgagccaaaacatccagaaccaagcattgaaagtgatcctgcatgcgccaactcccgcagcactggagcgcgcacgcaagaatgcggtcaatctcctgcgcgaagcgcctgatgccgagctgcgcatcattctcaatgcagaggctgtcaaggcagcactcgatcaagcgcatgccgaggtggacatccacacctgggtgtgcccgacgacgctgacccggatcggcagggagaaccggccgccgctccaggtgatggcaggcccagccgtgatcgaaatcgcgcgcatgcagcggacaggatgggtctatatcagatcatag

SEQ ID NO: 355760 - DNA, 1368 bp, Pseudomonas aeruginosa
atgcaggcaaggaaagtagatatcgccatcatcggtgctggaaccgccggcatcacggcatttcatgcactcaaggcggcaggaaaggatgtcgtcctgatcgatcgtggaccgctggggacgacctgcgcgcgcgtaggctgcatgccgtcgaaggccgctttgcatgcggggatgcgctggacgacggccaaggagttgcccgcgggcgtcacgctctccgcacaagggccgcaggctttgtggcggcatacccgccagacgcgggatgctctggccggtgctgccgcggagcgcacgcgcaaggccgtcggcgaaaacctgatcatggccgaggctcgctttgtcgcgccaggcaccttggaagtcggcgaccagcgtatcgaagcgaaggctttcatcgtggccacgggctcgcatccggtggtgcccaagtcgctggacggcgcggcctcccacatcctcaccaccgacacccttttcgagcagaaagaactgccgcagcgcctggggattctaggactgggagcgatcggcctggaacttggcctggccctgtcgcggcttgacgtgcaggtgatcggtgccgaccaacaggacacgatcggcggtattcaagatcccgaggtgcaggatcgggcgctttcgaggttcggcggcgagtttcccatgtggctgggagcacccgtcgaagttaccctggcaggcgacaaggtgcgcatgcgcaccgacaaacatgaagcgctcgtggatcgcttgctggtcgtgactggccgccagcccaataccgaagcgctcaatctgcaagcggcaggcatcctattggacaaggcaggccggccgaacatcgacgcctccaccatgcaggcatcggatgcaccgatcttcttcgcgggcgatgtgcagccggatcgtccgctgatgcacgaggccgccgacgaaggccagatggcggcccaggccgccttgacgcgcctgcgtggcgaacaatggcagggggcgccgcgtcgggtgccgatcagcatcctgttcaccgatcccgacgtctgcgctgtcggcatgtcctaccaggccgcaatgaagaaagatgccgtggtcggcatcgcggaaggtagtggcaacgggcgctcgaagattctcggtgcccaggacaacctgctgcgcatctacgtcgaacccggcactggcttgttgcttggggccagcatgttgctgacgcaaggcgagcatctggcgcacctgctcgcctgggcaatccaggccaagcagaccgtcaatgacctgctgacgatgccgttctaccacccatccatcgaggagatgctgcagagcgccttgaagtcggcatcccagcaactcaacccgtaa

SEQ ID NO: 355761 - DNA, 807 bp, Pseudomonas aeruginosa
atgctctcactgacaggtgggctgctgggcctcatcatcggagccgtgctgggattgaccggcgccggcggcggcatcttcgcggtgccggcgttggttttcggcttgggcatggacatacgtagtgccgcacccgtggcgctgcttgcggtgggtgcggcggcggcattgggcgctgtacagggactgcggcggggtattgtccggtacaaggccgcgatggtgctggcggccgccggcaccgtgactgccccgctgggtgttcagctcgcgcactggctttcgccgcggtggctgaacatggtcttcgtggccatcatgctcatcatcgcgtaccggatgttcctgtcctcgcgcagcccccaagccgatagcgacttgggcgacgagcaggccaaggcgtgcaaggtctccaaagacacggggcgctttctctggaacctgcgaaccgcgaccacgctggggagtatcggcgtcgtgtccggcttggccacgggcatgctgggcgtaggcggcggcttcattatcgtcccagccttggcgcatttcagcgagctgcgcatgcacagcatcgtcgcgacctcgctcatggtgatcgcgctgttgtccgccgtgaccgtgttcatcgcatggagtcatggcctgctgcttaccgcgcctacttgggcattcgtactcaccgcgctggtgggcatggcgggtggtcgcgctgtggcgctaaggattccttcaaagatgctgcagcgggtgttctcgatcacctgcgtgtccgtggcggctctcatgctcatgcgcaacgtgggctag

SEQ ID NO: 355762 - DNA, 513 bp, Pseudomonas aeruginosa
atgtccactaaccatcgcctgattgctggcttgttttttggcctggtgtgcctgcttgtcgccgctccgtcggccgcaggagtcgattggcccaaggatggctggagggtgattgagacgagccagagctattcggaattgctcgccaatctcaagaaagcggtctccgcgaacgacttgaatgttgtctttgatgttggcccgacggaggctgctgcaaagcgcggcatccacattccgggaaaccgggtggtgggggtcttcaacaacaagtttgccgtcgatattttgcgcctcagtgtgccggcgatgatcgaggcaccaatccggttttatgtgactgagcgggatgacgggcatgcaacgctgtcgtgggtcgaacccagtcatattttcgcgccatatatcgaggacgttggcagcagcgatgacgcaaaaatgctgcgtcaggaggcggaggaactcgatgctcgcttctctcggattgcatccgaggctgcacaaggaaaatag

SEQ ID NO: 355763 - DNA, 774 bp, Pseudomonas aeruginosa
atgtttgcaaaacgctctcgcatttccctctttttggccgccagcctgctgttggtcaccggctgcagccaggcggaaaccgccaaccagccgcccgccctgaaggcgctggaggatcagggcctgaccgtcatgcaggaattcaaggtcggaggcggactgcgcgctttcgcggcagttgccggtgacaggcccgtcgccatttacatcacgagcgatggcaatgccatcgtgggaacacgcctgaatgccaagggagagccgatcgatgaggcagccctgaacaatctggcggccaagccgctcagcgacaaggaatgggcgcagctccaatctgcaacctctgtccgggacgggcaagcgaatgccccgcgcatcgtgtatgccttctccgacgccaactgtccctattgccatcgcttctgggaagccgcacgtccttgggtcgatgctggcaaggtccagattcggcacatcatggtcggaatcatcagggaagacagtcccgccaaagctgcggcaatcctgggtgccgctgatccctcggcagcgttgctggaaaacgagcggaagtattcccagggcgggattacaccggccaagagcattccagcaaatgtacggaagaccctcgatgacaaccagatgctgatgttgagcatgggcttccgcggaactcctggcatcgtcgttcgtggccccgatggcgtactcaagaaatataacggcatgcctcaggggccccagttggccgaggtgctgggaccacgctga

SEQ ID NO: 355764 - DNA, 837 bp, Pseudomonas aeruginosa
atgatcagcgtggggcctttctccgtccaggtcgtggctgtcttcgctgccgtgctgctggcctgggcagtagctcgcatggttgccaagcgactgcccgactcgccgtacaaggcggccggcggaatgcttatggacgcggtgttcctgggatttgtagcagctcgcctgggctatatcgcgcagtggtgggacgagtacgcgcagtcgccaatgtccatgttcttcatcggcgaccaaggcttcacctggtggataggtgtcgcggcaacgctggtgttcatctggtggcgcacccgttcgacccgggcattgcgccgccctgtactggtaggtgttacagccggacttttggcgtggtttgccgcaggtggcgtgcttgagctgttgcagcgctcggcaccgccgctgccagccttggcgctcgccacgctcgacgaaaagcctgttgtcctgaactcctatatcggacggccagtcgtgctcaacctctgggcttcatggtgtccgccatgccgtcgcgaaatgccggtgttcgagcaggcgcaagcgcagtatcccgagatcgctttcgtcatggtcaaccagggtgaaagcgcccagcaggcgcgtgcttttctcgaagcccaaggcctgcagctcaaggatgtgttgctcgacccggcttcccaaaccatgcaggcggttgcttcgcgaggcctgcccaccacgttgttcttcaatgagcacggacgcctggtggatacgcacctgggcgaactctcgatggccagcctcaaaaacacggtgtcgcgccgtttcgcgcaatcccaacagatcaagacagaaaaggaataa

SEQ ID NO: 355765 - DNA, 1359 bp, Pseudomonas aeruginosa
atgagcctgcgccttcgcgccgttctgatcgccggcatttcgctgctggttctgtggagcgctgccgcgggctggatgatgcgcggcgttcattccaatctcgaccgaacgctcgacggtcgccttgccatgtcggcacgcatggtgtcggggcttcttgaacgcgcggcactggcccccaactcggcctccaccgacttcaccgaggccgtgcgcgtcagcggcaaggaaggcatcgcatgcgaaattcgatccctgcgtggggagatcctggcacgcacgaccactggacctcattcggaatttgagtcgctgccgacaggcttcagtacgcgggaggttctggggcaccagtggcgggtctacgttcttcgtgccgatggctatcagatcactacggccgatcgcgtggatcagcgggacatgctgatcaacgaattgctgagcgtggctggcgtaccgttcgtgatcgccttcctcggcggcttggctgcgctttggatcggcatcggccgggggctgtccccgctgaaggcgctttcacagcagttgcgcgacaagcatgcggacgatacatccccgatcgccgtcaaccactcgccctccgaactgcgtccggttctggatgcgatgaatgggcttctcaggcgcttggcacgggcgctctccagccaacgggcattcaccgatgccgcggcgcacgaactgcgcacgccgctgaccgtaatcgacacgcacctgcaggtagccaggatcagcgagggcgacgaggtggcgtcctcgctttccagtgcagaggaaggggtgaagcgactgcggcgcacgctggaccagatgatgaccctggcccgtgccgaggcacctgccgataaagcggacggctgcacctgcgtggccgattgtgtccgtggcgtgctggggcaatggaacgccgacgaaggcaagcgcctgtcgctgaccgtcaacggcgaaagcatcggaactccagtgcccaggtcgatgctggaaacggcggttcgcaacctggttgacaatgcgatgcgctattcgccccaagatgccgtgatcgatgtcagcgtgctcttggaacaggatgcgccgcggtgcttgatcactgtatcggaccgtggccctggcctcactaccgagcaggcagcgcaaatcggccagcgcttttggcgtggcgaccagggccggaacagcaaggatgggtcaggcctgggcatttcgatcgtgcgtgcgattgcggcgcgtttcggtggcagtcttgaattgaggccaagggatggaggcggcctgatcgcggagatttccctgccgggaacaaacgcaccgagggacagcactttccctggatag

SEQ ID NO: 355766 - DNA, 519 bp, Pseudomonas aeruginosa
atgacccatgtaagagtgaaaccttggcaggacggcgataacgctccccccgagcttctggaaaacatgcaagcccgtcgcccgaacggcgagctgatcggtatcgatcgcgtcttgctcaagagctttcccctggcgaccggctggaacggtttgctcggtcgcgtgcgggcagagtttgagctgcccctcgaataccgagaactcatcatgtgccgcgttgccgtgctcaaccgggccgaattcgagtggaatgtccacaagcccgcctacctgcaggccgggggcacgccagaaaaatgcgatgcgatgcgcgccgacggtatcgcttcgcttttcgacggcaaggagcgagcgctgctggaactgacggaccagtccacccgcaacgtcgaagtcgatgctgccgtcatcgagaagctcaaggccttcttcggagagcagcagacggtagaggcggtcgcgacggtcgccgcctacaacatggtgtcccgcttcttggtcgcccttgcgatctga

SEQ ID NO: 355767 - DNA, 321 bp, Pseudomonas aeruginosa
atgcttcaagagctgaacaacgacaatttcgatacgacgctcggccaggtgcccggcgtctatgccgtccgcttctgggccgaatggtgcggcccgtgcagggtgatgtccccgatcttcaaggacgtcgcccgcgacatgcaggatcgcgcgcacttcggcgaggtcgatatcgaccaggccccggaattggctggccgcttcggcgtgcagagcatcccaacggtggtgctgttcaaggatggccaggtgatcgaccggatgaccggcgcagcgcccaagcccaacgtccttcgcttcatcaacaaccacctcgattga

SEQ ID NO: 355768 - DNA, 684 bp, Pseudomonas aeruginosa
atgaacccgcccgcccacatcgacggcagcagccgtctggacccattggccgaagtcgccaagaccttggggcatccgcatcgcctggcgctgctggagcagatcgtgcgaggggaaaggtcggtcgagaaactggccgagttgaccgggatcacggtggcgaacgcctctcagcaccttcagcacctgaagcgtgctggctgcgtgcagacgcggcgcgatggcaagcacatgctctatcgcctcgggccgggaccgttggcctcggtggtcgtggcgctgcatgactacgtggagttccagcattcccgcatccgcgaggccatcgccgatagccgtcaacggccccaggagatggaatcggtctcgatcgacggcctgcttgatcgcatggatgaaggggccgtggtgctgctggacattcgcggcgatgaggagttcgcgcaggctcatttgccgggcgcgatcaatatcccgctggagcaactggccgacaggatcggtgaactgtcccgggatacggaggtcgtggcctactgccgcggtccgtactgtgtgctatccatgcaggccgtgagcatcttgcaggctcacgggatgcaggccacgccactggcggggggcgtgcccgaatggcgggcggcgggccttgcgctgcaaggcagcaccggccccgtctcctga

SEQ ID NO: 355769 - DNA, 645 bp, Pseudomonas aeruginosa
atgaaacgacgtcattttctgattgccgctgcgatggtgcccttggcgccgctggccaatagcgtttccgcccaagaggctttcaaagcgggcaaggatttcctggagctggacaaacccgtgccggtcgatgcgccgcctggcaaggtggaggtcattgagttcttctcgtacaactgtccgcactgcgctgccttcgagccgcagctcgaaatctggacgaggcaacttccctccatcgcatccttccggcgcgttcctgtgccctttgtaggcagtgacgtggaagccaaacagcgcatgtactacgcactgcaggctctgggcaaagaggacgaattccgacccaggatcttccgggccatccatcaagagcaccaacgcctgttcggcgacgatgccatcttagcttgggccgacaagcaacctggactggacggcaagaagttcgccgaggcgtatcactcgttctcgaccatgaccagagccaaacgcgcaacgcagacgaccagtgatttcaaggtggcgggtgtgccggcgctaggcatcgccggacgttggtacgcggacggagaaaccgccggcagccccgagcgcgcgcttcaggtaaccagtttcctgattcgggaagcaagccgggcgtga

SEQ ID NO: 355770 - DNA, 900 bp, Pseudomonas aeruginosa
atgtccatgaaagaactgatacgcaaatatgcaagcctgctcattgcgggctttatcgccgcaggagctgctgccagcgcgtccgccgaatcggcaccagcgtccagtgctggaacgaaatcgtttgtgctgcagcagataaggaacgcgacgatcaagatcgactacggcgacgtcaggtttctggtcgatccgatgctggcgaaaaaaggctcatatcccgcggcaccgggaagcttcaacagcgaaatccgcaaccctaccgtagaccttcccataccccttgaaaaagtgatcgacgtggatgcggtaatcgtcacgcatctgcacttcgatcattgggacaacgaggccaaagaacgcatcccgaaagacatgccgatctttgcgcagaacgatgaggatgccaggacgatccgaggctccggctttcgggacgtgcgcgtcttgaatgaggcaaccgaattcaagggagtccgcctgatcaagacaagcggccagcatggcagcgacgctgcaatggccgtccgcgggaaacttctgggcacggtgtctggcgtggtcttccagcgcccaggcttcaagtcgctctacgtggctggcgataccgtctggaatacccacgtccaggacgctctcgccacataccgcccggacgtcatcgtcctgaacgcgggctatgtgcgattcaacgatatcgatggcgccatcatcatgggcaaagaggatctatatcgagtgaatcaagccgcccctggcgcttatatcgtggcggtgcacttggaatccctgaaccatgcgacgcaaagccggcaggaactgaaggattacatcaaggagaaatcgctcgaccctcagcgagtcctcgttcccgatgatggcgaaagctacagcttctga

SEQ ID NO: 355771 - DNA, 465 bp, Pseudomonas aeruginosa
atgaaaacaacagtcttttccctccttcttgcagtactggcttttttcgcctccccaacgaacggctttgcccaaggcccgcagatgcccgacatcaacaagatgccggacatcgtaattccctatgaaggcacctccaccaagttcgcgctgatggtttcggacgtgctgcacttcaaggccgcggtgttgaccgccaagcaaatggacgtgaagaagaaaggactgacctttgaaatcgtggccgtaggcgcggtggtcaaggatcttgcaaacgaccattcactggccgagtggtttgcaaaaagcgaggactacggtgccaagatcgttgtctgcgagaacgcgatggccgtgttcggggtcacgaaggaccaactggacaagagactgagcacaacccgaagcggaaccatccatctgcttgagcttaaggacaagggatacaacaccttgcacatctag

SEQ ID NO: 355772 - DNA, 978 bp, Pseudomonas aeruginosa
atggaagcccatcgcatcaagcggaggcaaattccggcatcgtattttggggtcgtccttggagtcgccggcctgggacaggcctggcgctccgctgtgcagctctggcatttgccttctgccattggcgaagccctgctcgcgatggccggactgatctgggctgcgctcatcatcggctacgtctggcagtcgattcggaatttcgaggcggcaaaggccgagttcctgcatccggtccagggtggaacgcccgcactgatcgcggtttccaccttgctcatcgccatcgcggtgatcccgtattccatggcccttgcgtggctcctgacgatcggcggcattgcctggaatatcggcttcgcgctttggcacaccggcacgctctggcaaggcgggaggaactcggaggacatgcttccgaccttgtacctgcccacggtcgcaggaaatctcaccacggcggccgcgctgggcgcgctaggcagcgctgattggggatggattttcctgggcgcgggattcttctcgtggctggccctcgaatccctggtcatccatcgcctatggcactcgacatcgataccggcgccgcaacgtccgctgattggtattcaattcgcgccacccgtcgtttgcgccatggcctggctggccctgtctcccggcagcacggaccactggcttctcatgctgtggggctatggccttttccagctattgcttggcctgcgccttggcctttggttgggcgtgcagcccttcatccccgcctactgggcctatacgttcggtgtggccgctgcaaccgtcagcggcctgaagctggcacaggccggcatccattcggcacaggttctggccgtgccggttttcgtcggcgccaacgtgttcatcggctacctggtcatacggacggtccacctgctcattacaagcaaggacacaccgcaacgggctaccgggggacagcgatga

SEQ ID NO: 355773 - DNA, 258 bp, Pseudomonas aeruginosa
atgatcagttttgaagtcaaggacatgacctgcgggcactgcgtcagcatgatcacgaaggcgctgaaggcagcggatcaggatgccaagttcaccatcgatcaaagccagagcctggtgcaaatcgaatcgagtagcgctgatccgaaggaactccaggacgccatcgccgatgcgggttatacccccgtcctgatcgaacaaaaccgcgccgccgcatcggcttcggcgaagacctgctgcggcggcggcaagtga

SEQ ID NO: 355774 - DNA, 1086 bp, Pseudomonas aeruginosa
atgttcgccccgatgctcctcgtctacgcgaaggtcctcagcggtaccgccatcgccgtggtgttcgccgcctactggctcgggctctttccgtccttgctcttcggtgcgcggctgtcggaccgttgggggcgacgcaacctgatgcgggcggtgatcctcgtgtcgatcgtcggctccggcgtgctgctattcgccggcagctccttcgggctgctcgccctcggcagagtgatcgtcggccttgctgccggcgctgcctttggtccaggaacggtgtggctcagcgagttgaacgaccgctccggctcccgacggtcggcccccatcctgacggcggtcgcgcttaccagcggcttcgcactggggccgctggtgtcgggcggactggctcaatggctgatcctccctgcagcgcttccgtatctcgtccatatcggactgatgctttgtgtcgctccgatcgtctggtccgccccggagaccgcgccgcgcacgtcggcgaagaaccggccgacaatcggcgcggcgcttcggaacccgctatttcttcgcctggtgcttcccaccgctccctgggtgttcggaagcatagccgcagccattgtcgtgctcccgcagaccgcggatctcggggaggccggcattgccgcaacgggggccgtagccgccttgaccttgctgagcggcgtcctggtgcagccggtcgcttcgcggctggcgctacgccagggactcggcaccgcattcgtcggcggcctggtgcttctgtgcctcggcatgatcgccggtgcgggaatggaatttactcggtacacgcctctgttgttccccgcggctgtgcttctgggttgcgcctacgggttcctgctcaccgctggcctgcgggcaatcccgctcatcgctcgaattgaagaccgctcgctgctcaccggcatcttctacgtgctcgcatacagcggattcttctggcccatcctcgtcaacgtccttgcgcccgcgatcccgaagactgcgatgttcgctctctcggcagccgttggccttgccaccgtgatccccgtgcgcaagcagcggatcggatga

SEQ ID NO: 355775 - DNA, 1002 bp, Pseudomonas aeruginosa
atgtcccactcccactctcatcatggtcacagtcatgaccacgaccattcgcacgcgccgaccgtcaccagcacgaacgagcgcaaggtgctgctgtccttcgtcctgatcttcaccttcatggtggtggaggcgctcggcggagccttctctggctccctcgccctgatggccgatgcaggccacatgctgaccgatgcggcggcgttggccctggcctatgccgcattccggttcggccggcgcgctgccgacagcaagcgcaccttcggctatctacgcttcgaggtgatcgccggattcgtgaacgccgtgacgctgttcgccatcgtgggctggatcgcatacgaagcctggcagcgcttcttcgcgccgcctgaaatcctggccggccccatgctgatcgtggccatcgtcggcctgctggtcaatttcctggtgttgtggatcatgacgcgcggcgagaccgaccacgtcaacgtcaagggggtcatcctgcatgtaatgggcgacctgctgggctcggtgggcgcgatcgtcgctgcgatcgtggtctattacacgggctggacgcccatcgatcccatcctctcggtggccgtggcagcactgatcctgcgcagtgcctggaagctgttggccaagtcgctgcacatcctgctggaaggcgcgcccgaggacgcttctccagagaaggtggagcgtggattgctgggcgccgtgcccggcttggcggccgtcagccatgtccatgtgtggcagctcacctccggccggacgatggcaacgctgcacatccgtccgcagagcgacgatgaagccaaggcggtggtcaagctcgtcaacaaggcactacgcgagcagttcaacatccagcacgccaccgttgcgatcgactggaactcggaggtggacgagaacgcctgcaatctgcgccagagtccggggcggcacgaccacgaccacgaccacgatcacccggcgttcggtcaccggcattga

SEQ ID NO: 355776 - DNA, 354 bp, Pseudomonas aeruginosa
atgaccaaaagcaagaaatcaaccgacagtccccgcagtagcatcgatctggcatcgctgtccggcaacgacgtgaccatcctggccgagacgttccggctgctgggcgatccgtcgcggctgcgcatcctgctgttctgcatgaaagggccgtccgcggtgggcgacatcgcggaaagcctcgaactctcgcaatcgctggtgagccaccatctgcgcctgctgcgcggggctcgcctggtcaaaggcgtgcgccaagccaagcagatcttctacgaagtggcggacaagcacgtgagccacgtgctgctggatatggccatccacatcgccgaagaccacggcgacgaatag

SEQ ID NO: 355777 - DNA, 2502 bp, Pseudomonas aeruginosa
atgagcatgccaagcatctcagatagccgggccgcgttagcccctatcagtctgcccatcgagggcatgacctgcgcgagctgtgtcggccgcgtggaggctgccctgaccaaggtcgagggcgtggacagcgtgtccgtcaaccttgccaccgagaaagcggagatccgcctggccggcccggtggatcgcgcggcgctgatccaggccgtggagaaggtgggctacgaggtgcctgccagcgtcgtggagctggcggtcgagggcatgacctgcgcctcgtgcgtgggccgtgtcgaaaaggcacttaaggcggtgcccggcgttgcagaggctgccgttaaccttgcgaccgagcgcgccaccgtgcgcggaacggcctcgatggatgccttggtggccgcggtccagaaagccggctacgaagccagggctgtcgataacagcgcccaggccgacgacgaggctgcggagaagaaagacgccgaacgggccggactcaagcgcgacctgatcctggccgccgtgctggcgctgccggtgttcgtgctcgaaatgggctcgcacctggtccccggggtgcaccattggatcaagtccaccatcggcatccagcagagctggtatctgcagttcgtgctgacggcgctggtgctggccttccctggacggcgcttctacacgaaaggcttcccggccctgatgcgcctggggccggacatgaattcgctggtcgcggtcggcacggccgcggcgttcggctactcggtggtggctaccttccttcccaacctgctgccggcgggaacggtcaacgtctactacgaagcagccgcggtcatcgtggcgctgatcctgctcgggcggttcctggaggcgcgcgccaaaggccgcacctcggaggccatcaagcggctggtcaagctgcaggccaaggaagcgcacgtgctgcgcgatggccgcgcggtggatatcccgatccaggatgtggcgttgggcgacatggtggaggtgcgtcctggcgaacgggtgccggtcgatggcgaagtgaccgacggccgcagcttcgtggacgagtcgatgatcaccggcgagccgatccccgtcgagaagacgatcggcagcacggtggtcggcggcaccgtcaaccagaagggggcgctgacgctgcgcgccaccgccgtgggtggtcagacgatgctcgcgcagatcatccgcttggtcgaacaggcgcaaagctccaagctgccgatccaggccgtggtggacaaggtgacactgtggttcgtgccggcggtgatgctggcagcgacgctgaccttcttggcctggctcatcttcgggccgtccccggcgctgaccttcgcactggtcaacgcggtggccgtgctgatcattgcctgcccctgcgccatggggctggccacgcccacgtcaatcatggtcggcaccggccggggcgcggaaatgggcgtgctgttccgcaagggcgaggcgctacagttgcttcgggacgccaaggtggtcgcggtggacaagaccggcacgctcaccgaaggccgcccggtgctcaccgacctggagatcgcgcccggcttcgaccgcaggcaggtactcatgcaggtcgctgccgtggaatcgcgttccgagcacccgatcgcccgggccatcgtcgaatctgcgacggagggaggcaccacgctgccgaccatggccgatttcgattcggtcaccggcatgggggtgcgcgccaccgtggatggggttcgtgtcgaagtgggtgccgatcgcttcatgcgcgaattgggtttggacgtcggcggcttcgccggaacggccgagcggctgggcaacgaaggcaagtcgcctctgtatgccgccatcgacggccggctggccgccatcatcgcggttgccgatccgatcaagtccagcacgcccgccgccatcgcggccctgcaccagctcggcctgaaggtggcgatgatcaccggcgacaacgcgcgcacggcgcaggccatcgccaggcaattgggcatcgacgaggtggtggccgaggtgctgcccgagggcaaggtcgaggcggtgcgccggctgaaggccacccacggccagatcgcctatgtgggcgacggcatcaacgatgcgcctgcgctggccgaggccgacgtgggtctggcgatcggcaccggcaccgatgtggcagtggaatcggccgacgtggtgctgatgtccggcaacctgcagggcgtgcccaatgccatcgcgctgtccaaggccaccatcggcaacatccgccagaacctgttctgggccttcgcctacaacacggcgctgatccccgtggccgccggggcgttgtacccggcctggggcgtgctgctgtcgccggtattcgccgctgcggccatgggcatgtcgagcgtgttcgtgctcggcaacgcactgcgcctgcgccgcttccagccgccgctggatacggcctccgcggcttcacactga

SEQ ID NO: 355778 - DNA, 480 bp, Pseudomonas aeruginosa
atgaacatcggtgaagcgtccacggcatcgaaggtctcggccaagatgatccgctactacgaggaaatcggcctgatcccgccggcgaaccgaaccgacgcgggctaccgcgcctacacgcagtccgatgtgcaccggctgcatttcatccggcgcgcgcgtgatctcggattctcggtcgccgagatcagggacctgctgggcctttggaacaacaagtcgcgccagagcagcgacgtcaagcgcctggcccaagagcacatcgaggaccttgagcgacgcatcgagagcatgttgcagatggccgagacgcttaagacgctgatcagttgctgcgcgggcgatgaccggcctgactgccccatcctgcatacccttgagcagccggacgacaacgatggagaacccgaggcgcgcacgggggcagtgcaacgccgacggcgcactcctgcatcaaagaagggctcacgagcacgctga

SEQ ID NO: 355779 - DNA, 1230 bp, Pseudomonas aeruginosa
atgacagataacggtacagcctccatcggaggcgcttcggacgaactgcccgagaaagtgcagagcggaaacatctggcgcctttccatcgcgcaggcgctggcgggggccaactcgaccgtgctttacgccaccggggcaatcgtcggcgacatgctcgcgccggttcccgtgttggctaccttgcccatctcgatcttcgtggtgggcatggccgcgtgcatcttgcctgcgggagcgatagcccggcgtcacgggcgtcgcacagccttcctcgtgggaaccggggccggcgtgctgactgggctgctgggcatgctcgcggtcatcatcggctcgttctggctgttctgcctggcaaccttcctgggtggcggctacgccgccgtagtgctgaccttccgattcgcggcggctgacggcgtggcaccggatcggcgtgcgcgtgcgctatcgctcgtcatggcgggcggcgttgcggccggagtcgtggggccgcagctcgtgaactacacgatgaacatgtggccgccctacatgtttgcggccaccttcctcgcacaaggcgctgtcgcagcggtgtcggcgctcatcctgctgggggttcggttgccgatgcccacggcggccgaggtggccggaggcaggccgctggcggtgattgcgcgacaaccgcgcttcgttgcggcggccatcaccggcgcggtgacctacatgctgatgaacttcctgatgacggccgcgccgctggcgatgcacatgtgcggccattcgcaggaatcggccaaccagggaattcaatggcacgtcatcgccatgtacgggccgagcttctttaccggaagcctgatcaaacgcttcggcgcgggccgcgtggcaaccgtgggtctgctgctgaccgggctctccgctgccgtgggccttgcaggtatcgacgtcgcccatttctgggcaacgctgatcctgctgggcctggggtggaacttcggctttctgggagcatccgcgatggtcctggaatgccaccgccccgaggaaaagacacgggttcaatccctcaacgatttcatcgtctttggattgatggccgtaggctccttcttgtccggtggattgctcagtacctatggctggaccacggtactctgggtgtctttcattcctctggcattggccgtgctgtcgctggcggtcgccttgaggaggaaacccgtatctctcgctggctaa

SEQ ID NO: 355780 - DNA, 1029 bp, Pseudomonas aeruginosa
atgaagactacctaccgcgcgatgcaagtcacccggccgggcttccttgagctggtggagcgcccggcaccgctgccgggtatcggcgaggtgctgatcgaggtcgaagcctgcggcatctgcggtgccgatgccagcgacatcgagcgagccgatcccgcactgcaacctccgcgcgtaccgggacacgaggtggtcggccgcattgccgcgctcggcgagcacaccccctcgatctggaaggtgggacagcgcgtgggcgtgggccgcatgggaggacactgcaatgaatgcgtgcagtgccggcagggacgcttccagctttgcctgaaccagcccatcacaggagcgagccgcgacggtggctacgccgaaatgatgctggcgcgggccaccgggctggtatcgatcccggacgaactcgatgccgaggaagccgcgccgattctgtgcgccggcattgcgaccttcaacgcgctcaagaaatgcggcgcgcaggccggcgacacggtggccgtcctgggcatcggcggcctggggcacatggcattgcagtacgcgcgtcgcatgggattcaaggtcatcgccattggccggggcagcgacatcgcgcaagatgcactgaagctgggtgcccacctctacatcgacaccaacgaggaggacgcgaccgcccggctcaagagcctgggcggcgcacaggccatcgtgaccatgatcgaccatgccgaaacggtatcggggctactggccggtctggcacccgaggggcgactggtggtgctcaacccgagcaagcagcccctgcaagtgcccgccggcctgctggtcggcggccagcgcagcatcctcggctcgatcaccggcacgccctacgagaacgagaagacattgaacttcagcgtcctggcagacgtgcgaccctggatcgaaaccatgcctctggaaaaggcctacgacgcctatcagcggatgaaatccggcgacgtgaagttccgcatggtgttgaccatgaaccgcccagattga

SEQ ID NO: 355781 - DNA, 1149 bp, Pseudomonas aeruginosa
atgcagcatgcacgcatcgccatcgtcggtggcggcctcagcggactgtacgcggctgcgctgcttgaggagcgcggcatccacgactacgtggtgctggaggcccgagggaccttcggcggccggatcgtttcctggccggatgcttccagaaaccatgacgatggcacggccgagaggtcgatcatggggcgcttcgacctgggtgcgacctggtactggccggcaatgcacccgaccctgcagcagctcgtgcaacagctcggcctggagaccgtccagcagcatgaagacggccagatgctgatcgagcggtccagggcgcatgcgccaagccgtgtcgatggctttacctccgcgccgcccgcgctgcgcctggctggcggcatgggcgcgctcgtggacgccatccgcgcccgcctgcctgccgaccggctcgtgcacggtcgccaggtgacgggtctgcggcagcatgacgatcgcatcgaggtgcaaaccgacaacgcgctcggacaagccgcctcctaccacgtcgcgcatgtcctgctggcggtcccgcccaagctcgccaccagcaccatcgagtttacgccggccctgccggacgtgctgcagcggcgatggcaggcatgtggaacctggatggcgccccatgccaagtacgtcgctgtctatgacgcgccgttctggcgtgagcaaggcctgtccggcgaggcgcgcagcgcggtcgggccgatgggcgagatccacgacgcctcgtccaaccagggcgacgccgcgctgttcgggtttctgggcgtgcccgcccaggtgcggcgccagacaccggacgcggtattgcttgcccactgtcgcgcccagttcgtccggctgttcggagacaaggcagcgcggccgaaggcggaattcttgaaggactgggccgccgacccgtacaccgcggttgccggcgatgacaacccggacctcaaccatccgattccaccgcccaggagttcgaccgagggcccttggcgaaaccggatcgtcgggatcgccagcgaatggtcgcccaacttccccggctacgtggccggagctatcgaggcagcacgccttggggtcgaagcgttgtgcgcccccaacacggcggcgtccgtcctgcattga

SEQ ID NO: 355782 - DNA, 669 bp, Pseudomonas aeruginosa
atgcgcatcaacgccgatttctcgcgccgagccatcgtgacgcccagccagcatcagtgggtcgcttccccccaaggaggggtcgagcgcgtaatgctggaccgcgtgggtgcggagaaagcccgggctaccagcatcgtgcgctacgcaccggattcctggttcccgcatcacccgcatccgggtggagaggaaatcctcgtgctgtcggggaccttctccgaaggtgacgcccacttcccggcaggttggtacttgcgcaacccgcctggctccagccatcagccctctagcggcgaaggcgcgctgatcttcgtcaagctctggcagatgcagccggacgaccggcagagtgtgcgcatcgatacgctggacccggccgcctggtcccatcaggatggccgccaggtctgccggctgttctccagtgctgttgagcaggtcagcttgcagcggttggcagcgcatgaggtgctgccggcagatcccgacggcggcaccgagctgttggtactgtccggcgagatgatggtggatgaccagcgctgcgacagcagaagctggatacgcctgcccgtgggtgatcgtgcgcagatcagcgccggtgaacacggtgccacggtctatctcaagaccggccatctggccgcggcggcggtggaggtatag

SEQ ID NO: 355783 - DNA, 345 bp, Pseudomonas aeruginosa
atgatgcaagactggaacgcataccgaggcgcgctgcaagagcgtgtgggcgatttcgctgcgttggtccccgacgtgatggagggcatggccaagttcagtgaattcgtcgccaagcccgggcacctggaccccaaggttcacgagctgatcgccctggccgtcgccgtgaccacgcgctgcgatggctgcatctccgtgcacacgcaaaaggcagcggagtacggtgccaccaaggaagagatcgctgaagcgcttggggtcgccattgccctgaatgccggtgcagcactcgtctattcggcgcgggtactcgatacccacgcgcaactgcccagcaagtaa

SEQ ID NO: 355784 - DNA, 282 bp, Pseudomonas aeruginosa
atggtctatctgcaaatcaccctcaagatcgccgacgccaaccgcgcggccgccgccggtgtctaccagaagtacaagggcccgttcctcgacaccatcgccggcgcgaagtcgaaggaattgctcgtgcgcgacgaagacgtgcaggtgctgcacgggttcgacaccaaggagaacgcaagcgcctacctgcaaagcgagctgttcaccgccgacgtggtggcgggtctgaagcccctgctcgaagccgatcccgacgtgcgcatctaccaggttgcgtga

SEQ ID NO: 355785 - DNA, 774 bp, Pseudomonas aeruginosa
gtgagcaatcaatttagcggcaagaagctactcgttgtcggcggcaccagcggcatgggcaaggaaacggcccggctggtgctggcgcagggcggcaacgtggtgatcgtgggcaaccgccccgagaaaaccgaggaagcgcgcaaggagctggccgcgctgggccaggtgtcggcgctgaccgcgaacctgaccaaggacgaggacgtggccgcgctgctgaaggccatcgacgaacagcaccccgacatcgacctgctggtgaacgctgccggcgtgttcttccccaagcccttcctggaacactcggacgccgactatgaccagtacatgaagttgaacaaggcgttcttcttcatcacccagaaggtcgccggcaatcttgccgccaagggcaagccgggcgccatcgtcaacatcggctcgatgtgggcgaagcaggccatcgccgccaccccgtcttccgcctattcgatggccaaggcaggcctgcactccctgacccagcacctggcgatggagctggctcccaagcacatccgcgtcaacgccgtgtcgccagcggtggtcgaaaccccgatctacgagggcttcattccgaaagccgaagtgcatggcgcgatgcaaggtttcaacagcttccatcccattggccgcgtcggcaccccgcaggatgtcgcagaggctgtggtcttcctgctctccgacaaggcgggctgggtgactggcgcgatctgggacgtggacggcggcgtcatggctggccgcaattga

SEQ ID NO: 355786 - DNA, 936 bp, Pseudomonas aeruginosa
atgaaatcacccgtccacctgaatgccttgcgggcgttcgaggccagcgcgcgccaccagagcttttccgcggcagcggccgaactgaacgtgacgccggcagccgttggtcagcttgtgcgcacgctggaggacgcgctgggggcgccgctgttcgagcggagcagcagtgggaaggtgcggctggtgccgaccgaggcggccgagcgcgcgctacccgatatccgggccgggttcagtcggttgacgctgggtatggagcgattgcgcgagggatcgaccagcggggtgctcaccgtgacggtcagcccggcgttcgccgccaagtggctgctgccgcgcatcgaccgattccaggccgcgtgcccggataccgacgtgcgcctggacaccaatcacaagtcggtggatttcgtggcccagcggatcgatatcggcgtgcgctacggcctggggaactggccgggcctgcaggccgacaagctcatggatgaagaagtgttcccggtgtgctccccggatctgctgcgccagcgcggaaagctgcgtaagccgggcgatctggcacggcagaccctcatccatgacctgtcgatggtcggccatgcgggcttccccacatgggaggcgtggatggagaaagccggagtggcagatgccgcgatgatctggcgcggcttgcagatcaacaattcagcggccgtcctgcaggcggcaatcgagggacacggcatcgcgctcgcgcgcagcgtcatggcgcgcgacgacctggcaagtggccgcctggtgcggctcttccccgacgtcagctttgctctggaggtcgcctactacgtggtttatcgccccgagtgcgccagcctgccaaggctggtggctttcaggaactggctgttggatgaggcggcgtcgcagaacgagccatccgctatctag

SEQ ID NO: 355787 - DNA, 573 bp, Pseudomonas aeruginosa
atgcaatcgagcaagattcgcgggctggcgctttcttggcgggtggctgtagcaggactggctctgggattgaccatgacaggtggggccgctgcccaggatgcaagccatcccgtcatcgctggctatggcgcgatcatgcctgcgaaggatgtcgccaatgccccagacccatcgctgcgctatcgggtagcgttcgaggttacgcggtcggcaagcgacaacaaagaggtcaaccctgcgcttgatcgggttgcccgcttcgtgaatttgctgggagcatcgggagtccatcccgctcagggcgacatcgtggtggtgattcacggcccggccacaccgtcgattctgaccgatgccgcttatcaagcgcggttccacacggaaaatccgaatgccgcgctggtagcggcactgcaacaggccggcgtcagcgtccacgtgtgcagctacgcactcgccaatcagaagattgagaggagcgccgttgccaaggatgtaaccatcgacgtcgcagcgatgactacgcttgcgacccttcagttgaagggctgggcgctgatctccggttga

SEQ ID NO: 355788 - DNA, 618 bp, Pseudomonas aeruginosa
atgagccacgagctgccttcgttcctgatcgatgccggtgaactgctccagcatgtgagccgcgtcgcctatcggggcagccccctttactacggccgcagcggcacgaatcgctacgatgacccggcacgggcctatggcgtgctctatctggggcgcgacctgcctacggcgctgatggagtcggtgtttcacaagcaccagtggctcgcggacacgcaacgctcgatcgcgctgaaagaagtccagagccggttggtgcgtgccgtaggcgttctggaagacgtgcgcctggccgacctcacggcaccgggcgtcatggcgggctacttcggcctgaacctggagcagttggccagccgcgactacacgtacacgcagcaggtgtctgcccaggtgcatgcgatgtgccgagacgaccgccagcctctgttcgacggcgtgctctatccgtcgcgcaacaactatcccgacaagagcatcgcactgttcgagcggacgggatcgaaagtcggcgttgtcgaggacatcgacctggttgaccatgtggactggccgcgtttcgttgccacctaccgcatcggcgtggagcccgatcccggtccggctgggccatag

SEQ ID NO: 355789 - DNA, 363 bp, Pseudomonas aeruginosa
atgaacaccaccaccacccgcatcagcaccgcagaacgcctcggccgcgcatttggccgcggatggcgtgcgtatgcgcgaggcgaacggcgtgtgtcgaactggttggcatccaaggggatgccgctggccgccgctgccgtgctggtgtggatggtcaagctggccgcgctgggggtattgctctacaccgccttctggctggctctgttgctgttgttcgtcatggtggttgcctggatggcccgcaacgccgactcgggcgaagcgttgcccgagccagagtggcgaaacggaccggcaggtttcggcctttacacctacgatggtttccgcatcgatcctcatgtcgaggatgactag

SEQ ID NO: 355790 - DNA, 372 bp, Pseudomonas aeruginosa
atgaaccaggcgcgcatgacttggcgccccctgcgctggctgttcagccggcgcgcggcgaaaaccctgctgtggtttgtgctggccgttgccgccgctgtgggggtcaacgtcgcgggcatctacctggtcggcagtgtttcggcctgggagcggtggctggcggcctcggcagggtatttcttcatctggcggctgggcgtgtatggggcaacggcctacggatggctctggatgcgccgccgggtgctggcccgcgaagaccaaagcgggacagatgggcaggcgcggcgcaggctgatccgcgccgagatcgccggcgtcgccgccatcgtcgcgctggaggccggcctgctgacccaggccgcttga

SEQ ID NO: 355791 - DNA, 495 bp, Pseudomonas aeruginosa
atgtctctcatcgtcaatggctcctgcgtggagccacgttttgccccagcgtcccaatctgatgaccggatcatccggcaagccatcgcgctgctggaacagcggatcttcaagaaggggccattcctggatgggcccaccgctgtcaaggattacctgcgcctgaaattggtcgccgagccgaacgaaatcttcgctgtcgttttcctcaacaacaagcacgaggtactcgcctacgaaccgatgttcaagggcacgatccattcggccacggtacatgcgcgcccgatcatgcagcgtgccctggaactgaacgccgcagccgtcattttttcgcaccaacatccttctggctgtacggagccatcaagcgcagactgcgcgataacgcaaacattgaagactgccttggcactgatcgatgtgagggtgctggatcacctcatcgtcggccagggtacaccgtactcgttcgcggaatccgacatgctgtag

SEQ ID NO: 355792 - DNA, 726 bp, Pseudomonas aeruginosa
atgaagccgtcgatcatcctctccgcgttcctgctggcctcggcccagtggcccgcctgggcccagcagcccacctccgctcccgcccgcaatgcgcagagccaggagcgcccgctggccacccgcgccctggacgaccgggtggcaagcgactgggggctgcaaccacaggaatgggcgcgctaccgcgaactgatggacgggcccttgggcatctactcgcccaatctggacccgctgtcggccctgggcatcgaggcccgcaccgatgaagaacggcggcgctatgccgaactgcaagtgcaagtcgaagcgcgccgcgtggagaagctgctcgcctatcagcgtgcctacgacgaggcctggcagcgcttgaaccccggcatgcaacgggtaaacctgcctgacgacaagccagcggccggagccacgcgcggctcgggtcgcacggcggtgttcgtgaaggacggttgcgcggcctgcgaccagctcgtgcagcgtctgcaatcggcgggcaccgagttcgacctgtacatggtgggtagccgccaggacgacgggcgcatccgcgattgggccaagcgcgcgaacgtcgatcctgcgcgcgtgcgcggcggcaccatcacgctgaaccatgacggcggccgctggctgtcgctgggcctgcccggcgacttgcccgcggtcgtgcgcgaggtgaacggccaatggcagcgccagccgtag

SEQ ID NO: 355793 - DNA, 627 bp, Pseudomonas aeruginosa
atgaacgccccgcagcccgcccaccgttcaacggccgccgtggtggtgcagagcctgatgtggctctggctgatcggcctcagtgttctggtggccctgggctaccaggccatgaacgaccaggccgaccaagatcgcctcgattcccgcctgcaacgcttggaagcgcaggcaacaggcctggccgaggccgtcgaggccatccagcagcgtccggccgtcgccacggcggcagacctcaaagacacccgccaaatcctggaagcacgcgcggcccaggtcgagaaatcgctcagcggctacgccgctgccgacgatcttcaggcactgcgcgccgaggtcgagcagatcaagacgcgccagaccgctgcgcgcgcggctcgcgcaccgagcaagcccgccgccaaatccgaaccaccgccgttcccgttccgcatcgtcagtgccgaactgcgcgccggccagcgcagcgtgtccgtcgcgccgagcggcggggacttcacgcccgaccagctccaggtgctgctgcccggcgatgcggtcggcccgtggcgcttgcagaccgtcgagggcagcaccgcggtgttccaggccggcgcccaaatccgccgcgtggcgattccctga

SEQ ID NO: 355794 - DNA, 972 bp, Pseudomonas aeruginosa
atgttgtcctgcgcaccggcgctggcagtgaatgtggcacctgccaccgacgtgtcggcgcaaatattcatcaacgccagccagctcgaccgaggcgacgtgaccagcgccgacgaagacccggcgctggatctgaagcgcacttttattacccttgaccatcgcttcaaccagaattggtcagcgcaggtaacgaccgacgtgcagtggctgcgcaacgacgatccgagcgacgtgtggctgcgccatgcctacctgcagcgcagcttcggcaagggccgctggctgcgtctgggtaatgcgccgacggcatggattcaacaggagtcaatgcgtgaaggctaccgctacatcgatgccggcctgatcgcacgtaccaagatgggcgcaccggcagactacggagcgcacgtccagtatgtgcgtggggatttcacctatgccgcatcgatcgtgaccggcgcgggcttccagcgacctcgcctgggcaagcgggccgatgttgagatgaggctcggctggacgccaggcaaacgcctagagctggcagtgggcggttaccgcggcacccgcgcccaggatgccggtcacaaaccgcgcgagcacaccgcgcagcgctggaatgccatggccagttgggtcggcgaacgtggacgcatcggcgggcagtatttccacgccgacaattggacccgggtcaccaagcccggtgacgatgaccagcgtggatggtcggcatgggcgagccaccagatcacccctcggtatgcgctgttcacccgccacgacatgactcgcatgagcctggacatcgacccacgcatgcaggagcgttaccacgtgatcggtgtggagtggaaacccaatcgtcacctgcgtctggcagcagtaggcaagcgcgtgctgcaggagatggcgaacgtgcggatagagagtcacgaggcaggcttgtggacgcaactcgcattctga

SEQ ID NO: 355795 - DNA, 2196 bp, Pseudomonas aeruginosa
atgctcgcaatggccaagaggcaccttctcgaatccacacatccttccggcaggaagcgccgcctattgatgctttcggtcgcattggtgggagcggtatttttgatatggctggcggtggccgtgttcaacacgcgcacttcccgtgtcgcagtgaatgatgatggtctcccggtcagcggcgcgaccgagttgaccccgcagcagcaccagctggttgaacagggccgctacgtcgcgcgcttgggcgattgcgttgcctgccatacgtctgagccttccaagcccatggcaggtggccttgcgctggaaacgcctttcggcaagctctattccaccaatatcacgccggacaaggccacgggcatcggcggttacagcctggagcagtttgaccgcgtcatgcgccttggggtggcggccgatggtcacaacctgtatccggccatgccgtacccgtcctacgcgaagatgacgccggacgacatgaaggcgctttatgcctacttgatgcacggcgtcacgcccgtcgaacaagcgaatcggccttcggatatgggctttccgttcaaccagcgctgggggctggcgctttggaacgcggtgttcctggaagacgaacccttccagcctgtgcaggacaagaacgaggtgtggaaccgaggggcgtacctcgtgcaggggctaggccattgcggtgcctgtcacacgcctcgcggcgttggcttccaggagaagaccatgaccagcgagggctccgccggccacctgttcctggccggtgaaaccgtcgaaggctggcgtgctctgagcctgcgcaacctctggaccccggaggaaaccgccgagatgctcaagaccggacgcaacaagcacggcaccgtctccggcaacatggtggatgtggtgcagcacagcacccagtacatgaccgacgacgacctgatggccatcggcatctttctgaaatcgttgccgcccggcgaggacgacctacccatgcagctcgcccagggcccggagtctggcatcccaccgtaccggactggtggcatggccaaacccggcgaagtgcccggtgacatcttcactacgcgcggtggccttggctacctgcaattctgtgccgactgccaccgctccaacggcgatggtgtacccaatgcgttcccgtcgctggccggcaacaacaccctgcaatcgcaggacccggccacgctgatccacatcatgctgacgggctggcaggcgccggtcacgcaaagtcatgcacggccactgacgatgccttcgttcgcgcagttgagcgaccaggagatcgccgaaatcctgaacttcacacgccgcgcctggggacgggccgacgctcatgaaatcagagccagcgaagtaagccgcgcccgcaagcaccttgacgccaccgccgacaatcaccgtccgttcgagacaccgcgcctggcagagatgctcaaggaaaagaacgcggagcaactggtgttgggggcacgcctgaacatcgacacggcgcgcatgctgccgagcaatgtgggcaacaagctcaactgcgccagttgccacctgaatgccggcacggtggccgacggctcgccctatgtcggggtctccgcgttcttccccagctacgcctcgcgcgcaggtcgcgtcatcacgctggaagagcgcatcaacggatgcttccagcgctcgatgcacggcaagccattgcccatcaccagcgacgagatgaaggcgatggtcgcctacttcgactggatgaagcgagaaaccaagcccgaagacaaggtggaaggccgcggcgtgggcaaggtcgatcaaacgctcatccccaacaccgagaacggcaagcgcatctatgccgcccagtgcgcgctgtgccacggcgcgaacggggaaggtgtcaggaacgccaagggcgagatggtctatccaccgctgtggggcggcgagtccttcaacatcggcgccggcatggcccgcacctacacagcggcggccttcgtcaagcggaacatgcccatcgcatttggcacccatttcccactcggccaaggagggctcactgaccaagaggccgtggacgtggccgaatatttcacccacatggatcgcccggattttgcgcccaagggtaaggactggcccaacgataagaagcccgctgatgcgcgctattaa

SEQ ID NO: 355796 - DNA, 687 bp, Pseudomonas aeruginosa
atgagcaccaacacccaatcttccgaaaccgtcagcgcccgcctgaaactggaagccgagatcgctgatttcctgcgacagcgcatcgaagacggaaacctgtgcgcagaagatgtcccggcacgcttggcgcgctacggtcttatgcctcccgagacgttcgtctccgaaatgcgggagcgcatgggcttggatgacggcgacgaggctgcggccaccgtatcgaccgcggtcacgcatcgtagtgacttcggcacgccagtcatggtcgcctgcgtcaacgcttcgggcatgcccgacatgccggtattcatcgtcagcgccacccaggaggaatacgacctaggtgtccactacgacaaggccgaagcactggccgaggaatccgggtatgaaggaccgttcgtttgctttgatatggccgaacaggaagccatcgtgtcggcagcgcgcgaactgggccttgtcccgcaggtcgtcgtagtcgatatgaccgacggccagatccactccattcgctgcgacagcggcgagatcaaggttgtctgctacgacaccagcgacaccgacgagcattcggcggccgtggcgaatcggcccctcggcgagaacgggcagctcgtgcgctgctggtcgcacgcccaactggcgcaggtcgatcccggcctgaagccggctcagatttga

SEQ ID NO: 355797 - DNA, 180 bp, Pseudomonas aeruginosa
atgtatattctggttgttgtaaaattttctaagaaagtaaagagcactcagccggttggtggagacactactggattgggcaaaaaaattgtactaggtgtggttaaagcactgaccgtttcggctttgcttggcttggctaagaaggtaatcgcttttattagtgagattgctggataa

SEQ ID NO: 355798 - DNA, 660 bp, Pseudomonas aeruginosa
atgacgggtgtcgtggaagttcagcccgtcgattttctgtctgtcccgcaccttccgaaagagggtatcggccgagccggacgtcagcgtaaacaggttctggcgcttcccggcagcatctaccagaacttggagcaaggtcaccgcacgggaactgagcggcaccttacgggcatcgccgttcttcgtcttgtccagttcgacgtagcgggccctcaagtggacccgggcagcaacgaggccgaggatctcgccctgccgcatcgctgtctccagagcgatcaggaaggcgtaagcaagctcctgcatcttgccggccggcgccactccctcctgatacccaagcccctcgaggatcagggcttcctcggccggcgaaatgcgccggtcccgcggcgggcgactcttcgggcgccgcacctcgcgaacagggttggccgggcaccatctccactcccgtcgtgcctgctcgaacacgctcgacagcaacgtcatctcgcgacgcacagacgacgtggccaccgacttcaatcggtgatcgcgccatgctgcgatctgatcggcgccgatatcacagatgcgctcgccgacgaactccaagtcattgaccagcttgtcgagtcggatctcttcccagcgtttgccggccttagtgggtga

SEQ ID NO: 355799 - DNA, 162 bp, Pseudomonas aeruginosa
atggcagtagcgattgaagacactgagggaaacattcaggtctacgaaaaggcagtaagagtcgctgaacagggagagcagtacgtgttgtacggcccggagaatacgatccaggcagtgataccaatagcagacgtcatgaagctcgtaacggatgactga

SEQ ID NO: 355800 - DNA, 282 bp, Pseudomonas aeruginosa
atggacaagggcatgcggcttgtcaccgccgccggagctggcgcgaaggcatcctgctacgtcgccgccgagctctatcgttcccccatgttcgcgaccccgcagcgctacggcgaccgcttgaacctccgcgtgggcctccaaggtgtaggcatggttcgcctgtacgccgacgccatcggggccgctgtctgggtttgtgcggagggctccggcctgtatggcgaaaacggcattttcttgcccgctgtttcggccaagggtgtgagccatgtcgcctag

SEQ ID NO: 355801 - DNA, 210 bp, Pseudomonas aeruginosa
atgcccaatatttcggcctggcccaacgacgccgccgtgtgttcgttatcgcaagtgctcgagcagacttcgatcccgcagcggtactttttgagcgcgaaggcatgcgcagggatcatccgccgcgccgaggcgaggggcaagaccttgccggacacgctcctttcggccctgcgctccagtgcggctgcggatatctcttcgacctga

SEQ ID NO: 355802 - DNA, 363 bp, Pseudomonas aeruginosa
gtgcctgggcctcggctccgcgccgcgccgcgcctgaccccgccgaccgacctcagccaggctctgctgaacctgctgaacaatgcggcggacgcctgtcccgacgacctcgacatccgcctggactgggacagcagcagtatctgcctgagtatccgcgaccacggcgtcggggtgcccctggcgatcgccgaacagatcggcaaaccgttcttcaccaccaagggcaagggcttcggcctcggcctgtttctcagtcaggccagcgtgacccgcgctggtggaacggtgaagttgtataaccacgaagatggcggcactctgaccgaactgcgcttgccgcgcagctacggaatggcttga

SEQ ID NO: 355803 - DNA, 948 bp, Pseudomonas aeruginosa
atgcgcgcaccggttttcctgctctccgccagtcgccagaaccttggccgtctgctcctcatccgtattctcgtgctggccgcgcaggccggctcggtgggtttcgcctggctctccgacctgttgccgctgccgtggctggcgctcggcctgacccttggcctgtccgcctgcctgattctgttcaccgcgctgcgcctgcgcgcgccgtggccggtgaccgaccaggagtacgcggtacaattggcctgcgacctgatcatccacagcaccttgctgtattactcgggcggctcgaccaaccccttcgtctcctattacctggtaccgctgaccatcgccgctgcgaccctgccctggatctactccatggtgctctccggcctggccctgactggctacaccctgctgctgatctggtaccacccgctgcacctgcaggcggttcagcacgaggcgatgctgatcaacctgcacctgttcggcatgtggctgaacttcgccctgtcggcggccttcatcaccttcttcgtggtgaagatgtccgaggccctgcgctggcaggcgcacatgcaggccgagcggcgcgaggaaagcatgcgcgaccagcagttgctcgcggtggccacccaggcggccggtgccgcgcacgaactgggtacgccgctggcgaccatgagcgtgctgctcaacgagctgcgccaggagcgcccgcaggacccgaccctgcaggaagacctggcattgctccaggaacaggtcaagcagtgcaagcacaccctccagcaactggtacgggcggccgaggccgaccgtcgtcaggcgatcgaggagcaaagcgccgcggaatggctggaatcggtgctgcgccgctggcacctgatgcgtccggaggcttcctaccgctaccagtgcctgggcctcggctccgcgccgcgccgcgcctga

SEQ ID NO: 355804 - DNA, 291 bp, Pseudomonas aeruginosa; identical to SEQ ID NO: 328687

SEQ ID NO: 355805 - DNA, 1128 bp, Pseudomonas aeruginosa
atgcgccgccagcccgagcagggctacatagaccagtacgccgatcaccaggtagaaggccgggcgcaccgtccacagcgcgccgaaggtcgcgccgccgaccagcatgcacagcggagcgaccagcagcacgctcatccattcgccggaagcgccggccagcgtgcccaacagccagcagagcagcgccccgccgagcagccagggccagcgcagcgcccgggcactcaacagcactccggccaacgatccgtagatgaaggcgaccagcagcgcccaggcttccgccggcaattgccccagcgagactttcggcgcacccgacgacgcggccgccggcagcgtttcgccgtcgaccaggcggatcagctcgtccaccgcggcctcgatcccgccggcgtagtcaccctcgcgaaatgccggagccatccgctcgcgaatgatccgtccggcgaccacatcgggcaccgcaccctccaggccgtagccgacctcgatgcgcatgcgccggtcatccttggccaccaccagcagcagaccgtcgtcgaccgccttgcggccgagcttccaggcctggaacaacttgtcggagaaggcttcgatatcgagggtaccggtagtcggcagcatcaccaccgcgatctgcgcaccgcgtcgccgctccagcgcctcgagcttctccaccaggcgttggcgcgtcgcctcgtccagcgtgtgggtggcatccaccacccgctccgacaggggcaaggcgacccattccgccggcgcttcggcgtgcgcaggcatccagggcagcagccaggccagggcgagcaacaggaggacaggcgggaaaatacgatcagacaaggttcgatccatgaacggcaaagctctcatcccgagcgggtatcggccaaggctgccacagcgcggcgcgtagctccagccaggtcactcgtcgcgacgcaggtccggcgggatcggcaggtccttcaacgggctcggccgcttgcccttgccggcctggtactgcttgagctggtagacataggccagcacctgggccacggcgagatagagcccggcgggaatctcctggtccagctcggtggagtagtacaccgctcgcgccagcgccggtga

SEQ ID NO: 355806 - DNA, 279 bp, Pseudomonas aeruginosa
atgctgccgaaggaactgatcagggcgattccggcggccagggtggcgctggaaaggaaggccggcggcagttgccagaacatcggcagggcggcgctggcacccatcccggcgatcaccaggccgcccatcaccagccaggcgctggtcggtgccagggccgccaggctgagcccggcggcggccatcagcaacggaatgcccaggtgccagcggcgctcgcgcaggcggtcggaggaacggccgatgaagatcatgaaggcgcagccggcgagatag

SEQ ID NO: 355807 - DNA, 306 bp, Pseudomonas aeruginosa
atgagcataaaacagtccttcgaataccatgtcgagaacatcgtcattccctacaaaaccctcaccaagggcgtcgcgatgttcaaacacaaagaagataccttggaacccgacgaccacgccttgctaaaccctctgcgctgggccgaggtcgtgcgtctgggccaggaaggctgggagctggtgagcattcagccactcatgcggggcgtaaccgagattggcaatcagaacgcccaaggctgggcttggggcgtcgctctgcccgtcagctacctgctgtttttcaagcgcgcaacctcataa

SEQ ID NO: 355808 - DNA, 2268 bp, Pseudomonas aeruginosa
atgaagcaggttcagactcgcgcttcgcagtccagcaagcatcaccccaatgtctgcccgtccgaccttctacgacgtctggctctggccgtgctgactaccgcctcctgcaacatctcgctaaccagcgccgaggagacaggagagcgccagtcctccaccgaggaaactcccgcagcactcccagagctggtaatcaccgctaccactccggccgacccggacaatggtccggtccaaggctatgtcgcggaagaggcacgcacgggtagcaagagcgcgaccccattgctggaagtgccccagtcggtatcggtggtgacccgggaacagatggacgtgctgcagcccgccagtaccagccaggcgttgcgctattcggccggcgctagcagcgaacgtttcggcggtttcggaacgcagttggacatcacccggatccgcggcgtggacgccgactactacctggacggactgcgggtgatcagcaacgtctcgacctggaccccgcaggtcgatccctacacgctggagcgcgtcgaagtactccgaggtccgtcctcggcactgtacggacaaggcaccggaggcggcatcgtcaaccagatcagccggcgcccccggctggaccccgcgcatgaggtatcggtccagttcggcagcttccgccggcgcgagctgagattcgacagcaccgggccgctcgacgacgccgggcagttttcgtaccggatcaccggtaccgggctggatacccatggacaggtggaggacgtccgccacgaacgcttctacatcgctccggcactgacctggaatatcagcgacgaggcctcgtggacgctgcttgcgacgcactcccgcgagccgcagataccggattacaacagccttcccgccgtggccctgggcctgaacggcagccgctaccccaaggtcaagcgccatcgcaacttcaccgacatcgacttccagggttcgtcgcgcaaacaggactccatcagttccctgttcgagtacaggttcggagagcagtgggcgttcaacagtaacctgcgctacatgtacatcgactccgacatccagcgcacctccatctatggctaccaggatcggagcggccatctctggctggaaggaacctatgggctcgcccccgccagctccaataccttccagatggacaacagtctttccggcgtgctggcactgggaccgacgacccatcgcctgctcttcggcacggacttcgccaaggggaccctgcgcagcgactcttaccggatggacccggtggcgttcgaccccttcgatccggaggactatcgcccccacgcagatccagacttcagcgacagtcgcaccaactggccgtacaacgtgcgacaggaattccgtcgcaccggcctctacgcacaggaccagatcgcctatcggcgctggcgcctgacactctccggccgttacgaccgaacccggaccgacgacacctcccgcagctactcccccgtctggacctccagccaccaagaggaccagaagtggagcggccggatcggcctgggctacctgttcgacaatggcctggcgccctatgccagctactcgaccgcgttcgacccggtgctcggcaacgacttccacggcaagaccttcgcccccaccgaagccaagcagtacgaactgggcctcaagtaccacccggacggttcggccacgttcctcggtgccgctctcttccagctcaaccagaccaatgtgaagaccccggatacccagcacctgggctactggacccagtcgggcgaagtacgctctcgcggcctcgaactgcaggcgacgacccagccgctgcacaacctcaacctgctggcgaactacacctatctcgacaacgtcctggtcaaggatgccagctaccagggcaagtccctgacccagaccccgcggcacaacgccaacgcctggctggactaccgcctggacgagggttcgctggtcggtctgcaactgggcggaggcatccgctacctcggttcgagctggggcaatccgcgcaataccttcaaggtacctgccgccacgttgctggacctggtcatgagctacgaactggcgccactggcccatgccctggatggcgccagcgtcgccctcaacgtaagcaacctgaccaaccgcgagtacgtcgccagttgcatatccgagatgtactgcttcatcggccaggaccgcgtggtcaccgccaccctggcctaccggtggtga

SEQ ID NO: 355809 - DNA, 1152 bp, Pseudomonas aeruginosa
atgggccagtcttacctctacaaccggcgcgccttcatccggctcgccggcggtatcgccgtcgccgccggccttccgctgcgcgcgcgcgcaaatgacgacgcgctcaccgacatcgccggtcgcacgctcaggctgcgcctgccggccagccgcatcgtcctgggcgatggccccctcgcctacgtggtggcactccttcgtccaggcaatccgttctccacggtggtcggctggggagacaacttccgcgccgccgatctcgccggctacgaggccttccgcacacgctttccgacgatcgagcggattcccacgttccgtggttccgaagtcggcgcccttgacgcggaacaggccatcggcctggaacccgacgtcatggtgctgaacctcagttcgcgtgccgcggccgaatcttccggactcctggcacacctggccgacgctggaatccccacggttttcgtcgacttccgcacgcagatgttcgccaacgccgaagccagcgtgcgcatcatggggcgcctgctcggcgccgaagcgcgggcggaagagttcctgcgcttccgagcggagcagatcgccagggtgctcgaacccctgcgccggatcgacggccgaccgagggtgatgctggagcgcgccgccggcctgtacgacgattgctgcctgtcctacggcgacggcaacttcggccagttgctcgcccaggccggcggggagaatctgggaacccggctgctgcacggcgcgttcggcaccctgcatccggaacaggtgatcgccgccgatcccgatgtggtcctggtcaccggtgccgactggagtctctattcccccagcggggactgggtgagactggggccgggcgccaacccggaggacagccgggcccgtctcgcacgcctgatgcagcgaccggcctatcgcaacctgggggcggtcgccaatggccgggtatatgccatctggcacgccttctacgacaacccctgctgtttcgtcgccctccagcagatcgcgaaatggcttcatccgcagttgttcacgagcctgcaggcggatcagacgttccgcgaactacacgcccgcttccttcccatcccgtaccagcccgggtactgggtcagcctggaggaaacggcatga

SEQ ID NO: 355810 - DNA, 1053 bp, Pseudomonas aeruginosa
atgaaagcgtccgtccagcccacctccctacgccggctctaccgcgaacgggtatcgcggcgcctgctgtacctgatggtgctagccctggcaagcgctctctgcctgctggccgatctctcgctggggcccgcctcgcatcaaccgggcgacctcctcaaggccctctggcaagcggaccttccgtcagccatgcgggtcatcttctgggaaatacgcctgccggtggcgcttgccgcgctgctggtgggggccagcctggcggtggcgggcctgcaaatgcagacagtcctgaacaatccgctggcgagcccgttcaccctaggactttccgccgccgccggcttcggtgcggcactgggcatgatccttggcgtgacgctgctgccggcggcactggtggcatacgccataccggcgaatgccttcctgctgtccatgggcgcggcactgctgatccaccggctgagccgtcggcgcggcgtgaagagcgagatgatcgtgctcctgggaaccacgctggtgttcaccttcactgcgctgctcggggctcttcagtacgtcgctcccgaccaggcgctgtccgcggtggtgttctggagcatgggcagcctgtcccgcgtcacctacccgaagctagcgctcatcggcggcaccttcctcgcggtctacctgttcttcgctcatcgcgcatgggcgctgaccgcgctgggactgggcgaagtccgcgccaccagcctcggggtccccgtcgatcgactgaggctgcagacgatcctcctcggcagcctgctggcctcggcctgcgtcgccttcgtcggcaccatcggcttcgtcggcctggtcggcccacacatcgcccggatgctgatcggcgaggaccagcgcttcctgctccccgcctccgccctgtgcggcgcgctcctgctgtcggcggcttcgctggcgagcaagctgctgctgcccggacaggccctgcccatcggcatcgtcacctcgctggtcggcgtgccgctgtttttcctgctgatcctgcgagagcggagatattga

SEQ ID NO: 355811 - DNA, 825 bp, Pseudomonas aeruginosa
atggacgtcctgcagatcgacggggtgagcgtccggatgggcgatcgccaggtactccggaacctcagtttcggcccattgcgagcgggcacggtaaccgcgctgctgggctcgaacgccgcgggcaagtcaacgctgctccggcggatcgccggcgagctcggtggaacgggacgggtcatggtctgcggcagaccgctgcaggactggcccacccgccaccccaagcatcccgcacacgtgccccaggacgtgttcgccggcgcctcgctgaacgtcctggaggcgatcctgctggccacccggcaagcgggaggatggcgcatggccgcgggtgaattcgacaccgttgccgaactgctgggcaggctgggcatcgagtcgctggcggaccgcgaactgcatggcctcagcggaggacagcggcagttggtatcgatcgcacaggcgctagcccgtgacccgcgcatcctcctgctggacgaaccgaccagcgcgctcgacctgcgccgccaggtcgaactgctcgatctgctcggacaactggccaggcaacgcgggttgtgcgtcctgatggccatccacgacatcaaccatgcgttacggttcgccgaccaggcgctggtcctgcatcagggcgaagtcgccgcgttcggcccggcgagttcggtaataaccaccgaactgctggcccgggtatatggcgttcgcgcccggatcgagttctgctcgcgcggtatcgcgcacgccatcatcgacggcgcctgcttccccgcggagcggcaggcgccctgtccagacaacggagtcatccaatgcaactga

SEQ ID NO: 355812 - DNA, 1383 bp, Pseudomonas aeruginosa
atgcaactgacgaccgatccactcgacgggttggtggaaaacgcttcccgcctgcccagccctgccgtccccgacgcggtgctgtccttccagcgtctgcgcctcctcgaccatctggcttgcctggccgcgggcttcgacgccgaaggcgtcgccccggcgctggcgctggcgaagcgctacagcgggcgcgccgaggccagcgtcctgggcagccggttgcggctggccgccggacaggcggccttcgtcaacgccgttcgcgccagggccctggacttctgcgatgtcatctcgcccggctggcatcccagttcctcggacgtcccggtcgccctggccatggcggagctcaccggagccaccgggctggagatgctcgcggccctggccgtcggccaggacctcggccagcgggtcaatctcgccgcccaggctaacggcttcttttatcggggcttcgactccaacgtcctcggcctgttttccgcaacgaccatcgccgcgcgcctgctgaagctgccacgggaaaccttcgcggcagcgctggggctggcgttcgactatggaatcgggaccttccagcattatcaggacaaagcgctggcggttcgcatcggtcaagggctggtggcccgtcatgccatcgaagccgtcctgctcgcccaagcggggatcagcggcccccgcagggtgctcgctggcgaaaacggctttttcgccctgtacgcccccggggcggcggataccgacttgctgcgcgcaggactgggcgagcacttcctcggtcaggaggcgacctgcttcaaggcctacccgcactgcagcatactgctggcactgagcgacacactgatcgcggcgcgagccacgctgtgcggactcgacctcgagcgctgccagatccgcctggaagtatcgccgagcatgcgcatggtctgcggcggcccctatgtcccttccgccacggcgcagatcgatgcccagttcagcgctcgctacgtggcggccaatgccctgctgcgcggccgtgccacgccggcggagttcagcgccgaggccgcgcgcgagcatgcgctggtgacgctggcgcaacgcatcgaactgatcgagacaagcgaattccagagattcgaccactgccgcctcaccctcctccccgcgggcgctgccagcattagcctcgaagcctcgcacggcaggggctggccggaaaatccgctgaatgcccatgacctgcgcagcaagttccagttgtgctgccgccagtcttcgtcccccgcgtttcgccggtctgccgaacggatcgccgcgcaggtcgacagactagccgagagtgtttcgctgcgggacttgctcggcgcggtcaatccgccggcctag

SEQ ID NO: 355813 - DNA, 552 bp, Pseudomonas aeruginosa
atgggggccgccgagaggctctttctggagaaaggcgtggaggcgacgaccatcagcgagatcgtcgaagccgccgatgtcgccaaaggcaccttctaccattacttctcgtccaagaacgacatgctcgaagccttgggcaaacgctatacgacacagttcatggagcgcctgcaggtcgccgtggatgcctgtgccgcgaacgattggccgggccgcttgcgagcctggattagggcgaacatcgatacctatgtcgagacctaccgcgtccatgacatcgtgtacgtgaaccatcatcaccatgatcgcgccaatgccgccaggaacgcgatccttgaccagttgcgcgagatcctcgaacggggcgagagcacgggcgtctggcaactggcgcatccgcatgtcacggcgttgctgatctacgcgggcgtccacggggcgaccgacgacatcatcgtggcgaagccctccgattactcgatgctcgcacaggcggtgatcgacaattgcctgcgcatggtcggtctcggtggggaagccgctggctag

SEQ ID NO: 355814 - DNA, 303 bp, Pseudomonas aeruginosa
atgagcaagcaacgactacgttttccgccgagttcaaacgagaggctgccgccttggtactggaccaaggctacagccatatcgacgcctgccgttcgctgggggggctcggccttgcgccgttgggtgaagcagctcgaggcggagcgccagggtgtgaccccgaagagcaaggcgttgacgcctgagcagcaaaagatccaggagctggaagcccggatcaaccggttggagcgggagaaagcgatattaaaaaaggctaccgctctcttgatgtcggacgaactcgatcgtacgcgctga

SEQ ID NO: 355815 - DNA, 240 bp, Pseudomonas aeruginosa
gtgcttgccggcacgccgctttgtcacgtcgccgagacgctcggcagcgctgaaagcctgctgggcaatatggaagtgccagtacacgaacagcagggtgacgatgcctttccgggcaatggcaaacagcgcggcaagagcgcagagttgcgtcgtttactccagcaactggttcaggtcaccatggagcgcggcatattaaaaaaagcgttcgccatcttcccgcagcctacgaagtga

SEQ ID NO: 355816 - DNA, 1167 bp, Pseudomonas aeruginosa; identical to SEQ ID NO: 338670

SEQ ID NO: 355817 - DNA, 963 bp, Pseudomonas aeruginosa
atgtccgatatgattcaacgcgcggccgaggtgccgttcgagctgggtggccagcgtctcgaccagatcgccgcccagctttttcccgaacactcccgctcccgtctggccggctggatcaaggacggacgcctgaccgtcgacggcgccgtgctgcgcccgcgcgacatcgtccacagcggcgcgcaactggtcctggaggccgagcaggaagcccagggcgagtggctcgcacaggacatcgagctggaaatcgtctacgaggacgagcacatcctggtgatcgacaagcccgccgacctggtggtccatccggctgccggccatcaggacggcaccctgctgaatgccttgctctaccatgtcccggacatcgccaatgtgccgcgcgccgggatcgtccaccgcctggacaaggacacgaccggcctgatggtggtggccaagacgctggaggcccacaccaagctggtggcgcaactgcaggcacggtcggtcagccgcatctacgaggcgatcgtgatcggcgtgatcacctccggcggcaccatcgatgcgccgatcggacggcatggcgtgcagcggcagaagatggcggtggtcgacgccggcaaggtggcggtcagccattaccgcgtgctggaacgcttccgtgcgcacacccatacccgggtcaagctggagaccgggcgtacccaccagatccgcgtgcacatgagccatatcggctatcccctggtcggcgatccggtctacggtgggcgcttcaggattcccccggtggccagccagaccctggtccagactcttcgcgagttcccccggcaggcgctgcacgcgcgcttcctcgaactggatcacccggccaccggcgtgcgcatgaagtgggagtcgccgctgccggaagacttcctctggctgctcagcctgttgcgccaggatcgcgaggcgttcgtcggatga

SEQ ID NO: 355818 - DNA, 378 bp, Pseudomonas aeruginosa
atgaagcacatcgctcgcatgaccaccgcagcgcgtctcggccgccggctgggcggcgtatggcacggttgcctgtgcgcggagcgtcgggtgcatcgatggctgatggcgcaggggctgccggcaggcagtgcgacggtgctgatctggggggtcaagctggcgatccttgggatgttgctgcacatcgccgtctgggcggcgctgttgctggtcgctctctttgttgcagcaaggatgacggagcagacgccggagggcgacgacgatttcgatctgcaatttcctgcgagtctggatgaactacgtcaaacgcctggctacgatccaaacctctacaacgacacctctcacgagatgtacagcgaagacgattga

SEQ ID NO: 355819 - DNA, 1251 bp, Pseudomonas aeruginosa
atgagcggatcaccatcgttctcgcgcacgcccgccaggctctggcctctgatcgcctgcctgtatgtatcccagggcattcctttcggcctggcgatggaagccatgcccgcctccctgcggcatgccggcacggacctgcaggccttggcctggctgccactcgtgggattgccctgggtgctgaaatggctctgggcgccatgggtggacaatcattggagcccacgcaccggtcgccgccgcagttggattctgcccatgcaaggtctggtactggcggcgttgcttgcggtcgccctgctgggcctgtcggcgcagacgctgccctggatcctgggcttggcggtgaccgcctcgctgtccagcgccacccaggatgtggccacggatgccctcgtcgcggagcagtttgcgaccgaatccctgcccatggccaatgcaattcaagtggccagcaccatggtgggtttcttctacggcggtccggtctttctcatgctctacgggatgctcggactgacttgggccatcgttggactggtcctgcccatcgccgcgagcctggtgctcacgttgtcatggcgcgaaccacaggcgctcgaagtggcggcaagaaccagcaaggccagtcaatggcacttcctgcgatcgggccgcaatgcatgggcgctggtcgtcgcggcatgtctgtccgccatcaccgtggtggcatgtcacggcctgggcaagctgttgctggtcgatgcgcaatggccgctggcccgcgttggccaggtcggcatgctgggaggcgcgttcacgatcctggtagggtgcggtggcggcgcatggctcgtgcatcggttcggggcctggcccgcgttccagttcgggattgccagcgctggcctgtcggccgtgacctgggcctggctcgcaacgcagacgccggccatgcccatgaccgctgtcgtcatggccacggtgctggccagcatcggatcgggttgtgcctcggtggcgatcatgaccgccgcgatgaatttctgccggcgacgcacccaggccggcaccgacatgacgatggtgcaaagcgcgcgcgacctcggcgaaacgatggcgtcctcgttcctgatcgctttggccgcgagggtgggctacaaagaagggttcctgctgggcctcgggctggcggtgctgaccatgcttgcgaccgcttggatgatgcgctcgcgtcgtgcgaggcgatcccacgccccgggatcgtga

SEQ ID NO: 355820 - DNA, 405 bp, Pseudomonas aeruginosa
atgaaaatcgatcccacccagatgctgaaacctttttccctgactcgcacactggcagtgctccaacccggttccgccttgcagttggtccccttcagcgaacgtggccgcgtgaagtccgactggatcatcggcatccgcgccttcagtgattccatctcggtgcatggcagtcactgggaacgtcacccccgcggcgatgagatgctcacggtgcttcaaggctgtatcgacgtcgtgctggatacgccccttgaggaaacgcgcctgcacgtcgatgccgggcattccctcgtcgttccccaaggatgctggcaccgattggaagtggtgcagccagggcaattgctgttcgtgacaccggcgaccgacagcgagcatcggcaacgagattcggaacgctga

SEQ ID NO: 355821 - DNA, 1674 bp, Pseudomonas aeruginosa
  misc_feature (1503)..(1503): n is a, c, g, or t
atgcggccctccggtttcaatggccgggcgcgaggactgctcttactggtcgtggcaccgctggtgagtatcggcgtagccgtcgggatgacatgccttgggcccggctccgatccactgaatcgcctctatgcagggctgttctgcgccgtgctcacgcagtgcgcgctgctcgcggtcggcctggtggctggccgtccggccagcttgccactgcgcagggcggtgtccatcagccaccactggatgggcgcgatgctcggcggcgtcctcttcgtcatctgcctgagcggtgcgctgtcggtgctgaagccggaactgcgcagttgggaaatgcccaccgaacggcagcttgcccaggcccccatcgggctggatgacctgctcgcgcaggcgctggcagcctttcccgaggcagactcacttcagttcgacaggcccgaggccggccctgggccatggcacgttcaacccatgcggtcgcaacaacgatgggcaggcccggcgccaaccctgtctgtgccacccgtgcctgccgtgcatggcgacctgaccggcatcgtcccccgcctgcacaacacctttttcgcgggcttccccggtcgcgtcttcgtgagcctgtttgggtttgcgctgggcgccctggtcgtcggcggcgtggtgttgcatccccggcaggaaggcacgctgtggcgtttgcgcctgggagccgtgttgcgtaccgcggcctacgatgcgcaccggctgttcggcctgtggctggcgccgctgctgttgctgatcgcggtcaccggcgtcttctcgggactcggggcgctggccacggtccagttggcaccgcttgccttccccgacaagccgggccaggtgatgcaggcattgatgcaaccctatgcgcgcccggccagcgggcatcgtgcgcccatggccagcatggacgaattgatgctgcgccatcgtcagatgaatcccgactttcgtgtccagggcatcagtgtccaccactggggcgacgcgcatgcctacgccacgctgcgcggcacgcagcgctggcaattgagcacggccatcttcgaacgctatcactatgcactcacggacctgggcctgctgcggcacgacagcgcggccaaccagggcccgttcacgcaaggcttcatcgccatccagcccctgcactttgcccgctatgccgatgcggccagccgctggctgcatgccctggcgggcctggccggcgcagtgctggcgggcagtggcacctggctttggctcaggcgacacgccagcgatagctccgctcagtacctgcggccatggctgagcggcatgaccctcggcctgctgctggcctgcagcaccatgtttgccatcacggcgttgacgcctgactcatggccgtcgcgccagcgctggcaggccatgggcttcgggctgacctgggcgggtgcgctgatttgctgcctgctgccggggaaatggcgcgcacgactgcccaccacnttgctgcagcttgctgcggcgcttctcgctgtggcggccgcagccagccttgcaacccaatggcgtagcgcctggcaagcgccgtggccagccctgtcgatcaatgtcctgcttctgtcgagcgccatcgcgttctggggcaccgcccgcaaactggaaacaccaccatga

SEQ ID NO: 355822 - DNA, 2112 bp, Pseudomonas aeruginosa
atgcctatctccagaacgcgtggatggctgcgcgcgagcagttgttccagcctgtcggccttgctgttgctcccaccaggtgccttcgcacaatcgaccaccgaaatcagccagctggacaccgtcacggtgacagccgaccgggaaaccacgccctcgctgctgaagggttcgcagacgctgagggaaacgccccagtccgtgaccatcatcacgcgcgaacgaatggaccagcagaacctgcaaagcctggataaggtcctgcagcacgcccccggcatcacggtgcaaccgtaccagttgctgaccaccggctactacgctcgcggcttcaagatcgactcgttccagcaggacggagtccccatccagatggggcagatggccagcccgccccaggatgccggtatctacgaacgcgtcgagatcctgcgtggcgcgaacggcctgatgcagggatcgggcaacccggccgcgacggtcaacctcgttcccaagcgcgctccgcgcgagttcctggcgaatagcgagctgtcggccggcagttggaatcgctatcgcggcctggtcgacgtgggcggcccgctcaacgagagcggcagcctgagggcccgcatcgttgccaaccacgaggatcgcgatttcttctacgacgtcgccggccagaagaccagttcggtctatggcacggccgatctcgacctggggccggacacggtgctgaccgtcggcctgcagcggcaacgcatccgctccaccaccaacatggccggcgtgccgttctacaaggacggctccgacatcggcctgcctcgctccacctatctggacgtggactgggatcgcttcgactgggataccacccgcgtgttcggcggcatcgagcatgccttcggcaatgcgtggaccgccaagctgtccgtcaactaccagaacggtgattccacgctgaagtacgccggcgccaacggggctgtcgaccccgccacgggcgcggggccgcgcctgactggtggggcctacaagttcgagaacgaccagaagagcatcgacggctacctgaatggccccttccagctcctggggcgacgccacgaggccacgctgggatggaactaccagcgcgcgagcctggagcaattctcggcaagcttcctgacgccggtgaaccagcccgtgaacgtctgggactgggaccccggcagcgtgcccgaacccggcatcggaccctacgcgtcccgtggcccgacccgcacgacgcagtccgggctctatgcggtgggccgattctcgctggccgatcctctcacgttgatcaccggggtcaggctgagccgctggaaacaggaaggcgcaggcacgtccaccaaactgggcaacgaactcacgccctacggcggcgtggtcctcgacatcgctccccagtggtccctctacgcaagctacgcgcagatcttccagccgcagacccagacgacctgggacgggaagacgctggatcccgtcaagggcaccaacctggaagcgggcatcaagggcgagttgctggatggcaagctcaacaccagcctggcgttcttcaacatccgccagcgcaatcgcgcccaggttgacccggcgtacccgtgcgccggcacggcctgcttctacatcagtggcggtgaggtggaaagccagggcgtggaagccgagatcagcggccggccgctgcctggtctcgacctctcgttcggctacacctacaacaccacgaagtatctgaaggatgcccagtcgcaaggacaggccttcgccagcttcacgcccaggcacatcgcacgcctgtgggccaactatgcgtttccctgggacggcggccgcctcagcgccggcatgggcgtgcaggcacaaagcgcctataccgtgcagtcgggtggcctgacgctgcgccagggcggctatgcgctggtcagcgcgcgcttgggctaccgtatcaaccgcaacctgagtgcggccctgcatctcaacaacctgttcgaccgccgctattaccaaagcctctccggcccgcagtggaacaaccgctacggggaaccgagaagcgtcatgctgacactgcgagcgcagtactga

SEQ ID NO: 355823 - DNA, 855 bp, Pseudomonas aeruginosa
atgtccgggcaatggcagttacaggcttcgacggcgccgatgaccatcggcggcggcgcgatgcgcgtgaagccggaccaggtcatcaccgaagacaacgagccggggttgaaactcgtgctcatgctcggggacggcgctgtccgctaccgcatgccaccgtcgcagcccacccaggtgagcgggccggccctccacctgagcttgagcgaccagccgttcacggtcacccatagcttccatgcccatacgcccctgcgctatgtggccgtacgcatgccccagtcgagcctgatgcagtggttcgacacgcaaggcaggcccatggatcgcctcctggacatggccggctcgacgccgttcatccacgatgcgaaggctggcccggcactgcaggcactggcaaagcaattgctgctatgtcccttgcagggcgcgttgcgcgacttgtacctgtctggaaaggcgctggaattgacggccaacgtgctggcaacgctggacgtacaaccgccctcgtcgacagcaatcaccctgccggtacgccatcgcgatcgcctccatcgcgcccacgaaatactgatgcacgatatcagccatccaccgggactcgactggctggcaagccaggtcgggctgagcgtcacgctcctgacgcgtggctttcgccagttgttcggcatgagcatctacgagttcgtgcgggagcagcgtctccagcaagcctatcgaatgctggcgaccggggaatgcagcgtctccgccaccgccggcatgtgcggctataccgactcgcatttctccaaggccttccaaaggcgcttcggcatcgcgccgcacacactctgccgctga

SEQ ID NO: 355824 - DNA, 462 bp, Pseudomonas aeruginosa
atgcaaccgaagaagccgatcgatttctcgcgcctgctcaccgtgggcgaggtggcgcatcgcgcgggcgtgccggtttccaccatccacttctacgagtcgaagggactgatcgccagcacacgcaacgccggcaaccagcgccggttcgcctcggtcgtgttgcgctacatcgccgtgatcaaggtggcccagcgcacgggcattccccttgaggaaatcaaggaggcacttggccgctatccaccgggaagcaagctcaccgcggcccagtggcgggaactgtccacacgctggcgcgccaatctggatgaacgcatcaccaaactgacccggctgcgcgacgagttggacagttgcattggctgtggatgcctgtcgctggacgaatgcccgttgcgcaatcctcaggacgcactgggggcggaagggcccggtccccgcatcctcgaacggccgtga

SEQ ID NO: 355825 - DNA, 420 bp, Pseudomonas aeruginosa
atgcgaaacatcgttgacaagacattggacagccgctggctgtggattggcgcccgcgtcctgctggcggtagtgttcctgtcttccgggctggccaagctgctcgacttccagggcgggctggccgaaatgcgcgccgcggggctggagccggactggctgttcaacatcgccaccatcgcggtgctgctgggcggttcggtattgctgttgctcgatcgtgcgctgtggctgggcgccggcgcattggcgatgttcctgatgctgaccattctcgtggtgcaccgcttctgggcgctgccggaaccgcaggcccaggcggccatgttctgggccctggagcacatcagcctcatcggtggcctggtcgcagcggcgatcgccagccgcctgcgtcggcagttggagggcaaggcatga

SEQ ID NO: 355826 - DNA, 1107 bp, Pseudomonas aeruginosa
atgaacgcccgctttgcttttcttggcttggtactggcgtgctcgatcgggctggttgcctgcacctcgggcgcggacgaaggcggtggctggccggccaccaaggtggcgctggcgccggtcgagcgtgcgcaggcgccgcgcgcgttccatggggtcggagagcttgaagcggcgcggcaggtggaactggcgtcggaaaccgccggtcgggtcacgcgcatcgcgttcacctccgggcagcgggtgaagcaaggcgacctgctggtgcagctcaacgatgcgcccgagcaggccgagcgctttcggttgcgcgcgcagctgcgcaatgccgagaccgtgctggcgcgcacccgcctgctgctggccgacaaggtggccacgcaggagcaactcgaccacgcgcaggccgcgcgcgacatggcgcagggcgaactgcgcgggatcgaggcggtcatcgcgcagaaggcgatcaccgcgccgttcgcgggcacgatcggcattcgccgcgtgcacgaggggcaaaccctcgctgcgggcgatggcatcgccagcctggtcgatgccggcaccctgcacgtcaacttcgcgctggaggaacaggcggttccgcacgtgcggcctggccaaccggtcgagatccgggtcgatgcctggccggagcgccgtttcgaggcgcaggtatcgggcgtcgatccgctgatcggcgcgtcgcgcacgctacgcgtgcaggcgagcctgccgaacgccgacggcgtgctgcaagccggcatgttcgccaacgtgcgcctgctgcgtgagcagcccgcgccggtgctggcggtgcccgagaccgcggtgacctacaccgcctacggccagacggtattcgtcgccgaagccgccgagccgcagggaatgaccgtgcgccgcgtcgcggtgaagacgggcgaacgctgggatggccgggtcgagatcgtctccggcctgaaggaaggcgaccgggtggtggtgtccggccagctcaagctcagcgacggcatggtggtcgagcccgttgcacgcgacgcgctgcatgggaacgccgcctcgccccaggcgaagacggcccgggagcaggcgacatga

SEQ ID NO: 355827 - DNA, 3096 bp, Pseudomonas aeruginosa
atgaggttcaccgacgtcttcgtgcgccgcccggtgctggcgctggtggtcagcagcctgcttgtcttgctggggctgttcgccctgggcaaactgccgatccggcagtacccgacgctggaaaccgccaccatcaccgtcagcaccgagtacccgggcgcctcggccgagctgatgcaaggcttcgtgacccagccgatcgcgcaggcggtgtcctcggtcgagggcatcgactacctgtcctcctcgtcggcgcaaggccgcagcctggtcacgttgcgcatggagctcaaccgtgactcaaaccaggcgctgaccgagactatggccaaggtcaaccaggtgcgttaccgcctgcccgagcgcgcctatgacccggtgatcgaactgtcggccggggattcgacggcggtggcctatgtgggcttctccaccggcagcctgtccacgccggagctgactgactacctgtcgcgggtggtcgaacccctgttctccggcatcgacggcgtggccaaggtgcaggtggacggcgggcagaagctggcgatgcgcctgtggctggacgccgagcgcctggccgggcgcggcctgaccgccacggacgtggccgacgcgatccgccgcaacaactaccaggccgcgccgggccaggtgcgcgggcagtacgtgatcgccaatgtgcgggtcaattccgacctgaccagcgtggaggagttccgggatctggtcatccgccaggatggcaacggcctggtgcgcctgcgcgacgtgggcacggtggaactgggcgccgcctcgacgcagaccagcggccagatggacggcgagccggcggtctacctgtcgctgttccccacgcccaagggcaatccgctggtcatcgtggacggcatccgccagttgctgccggacatcgagaagaccttgccgccgggcgttaaggtcgccatggtctacgagcgcgcgcgcttcatcgatgcctcgatccaggaagtggtcaagacgctgctggaagcggtgctgatcgtggtgctggtgatctggctgtgcctgggctcgctgcgcagcgtggtgatcccggtcgtcgccatcccgctgtccatgctgggcgcggcggcgctgatgctggcgttcggcttcagcatcaacctgctgaccctgctggcgatggtgctggccattgggctcgtggtggacgacgccatcgtggtggtcgagaacgtgcatcgccacatcgaggaaggtaagtcgccggtggcggcggcgctggtcggcgcgcgcgagatcgcgggcccggtggtggctatgacgctgaccctggccgccgtttacgcccccatcggcctgatgggcgggctgaccggcgcgctgttccgcgaattcgcgctgaccctggccggcgccgtgatcgtttccggcgtggtggcgctgacgctgtcgccggtgatgagttcgctgctgctgaagtccagccatcaaggcaacggaccggggcgcatggcccgcatggccgaacgggtcttcggcggcctcgcggaccgctacggacgggtgctgggtcggtcgctgcggcatcgctggctcagcggcggcttcgccctgctggtggtcctgagcctgccattcctgtaccagatgccgcagcgcgagctggcaccgccggaagaccaggcggcggtcctggcggcggtgaagtcaccgcagcacgcgagcctggactatgcggaacgcttcgccgatgaattgcaccgcgtcatgtccgcggtgcccgagacgatcggcacgtggatcatcaacggcacggacggcccggccaacagcttcggcggcctgatgctgtccgactggggcgagcgcgcacgcaaggagccgcagatcgtggccgaactgcagggcgccgtcggcgagatcgtcggcagcgacatcttcgtgttccaggtcgcgcccctgccgggcggcagcggcggcctgccggtgcaactggtgctgcgcagcgcgcaggactacccggtgctgtacgaggccatggaggggatcaagcagcgtgcccgcgacagcggcctgttcgtggtggtggacagtgacctggagtacgacagccccgtcgtgcaggtgacgatcgaccgcgccaaggcggcaagcctgggcatggcgttgcaggacatcggcgactcgctgggcgtgctggtcggcgagaactacgtcaatcgcttcgcgctgttcggacgctcctacgacgtgatcccgcagagcgtgggcgagcagcgcctcacctcgcaggcactggcgcggcagtacgttcgcactgcgggcggcgaactggtgccactgtccaccgtggtgcgcctggacatgggcgtggagcccaaccggctgaaccagttcgaccagcagaacgcggccaccctgcaggccattcccgcgccgggcgtctccctgggccaggccgtggcctttctcgaacaggccgtggccgagttgccacccggcttcagccacgactggcagtccgaatcgcgccagtacgtgcaggagggcaacgcgctggtgttcgccttcctggccgcattggtcgtgatctacctggtgctggccgcgcagtacgagagcctggtcgatccgctgatcatcctgatcacagtgcccttgtccatctgcggcgcgctgctgccgctggcgctgggctgggccacgctgaacatctacacccagatcgggctggtgacgctgatcgggctgatcagcaagcacggcattctcatggtcgagttcgccaacgaactgcaggtccacgaacggctggaccgccacgccgccatcatccgcgccgcgcagatccgcctgcggccggtgctgatgaccaccggggcgatggctttcggcgtggtgccgctgctgttcgccagcggggccggcgccaacagtcgtttcggcctgggggcggtgatcgtctgcggcatgctggtgggcacgctgttcaccctgttcgtgctgcccaccatctacacctggcttgcgcgcgaccatcgcgtgcagggtgcgcgcagccggcaactggccgagatcgaaagggccgagggagcgtcgacatga

SEQ ID NO: 355828 - DNA, 1386 bp, Pseudomonas aeruginosa
  misc_feature (878)..(878): n is a, c, g, or t
atgtcccccgccatcgtgctggccagtccgcaggccgcggaattcgccgcgcctggcaccgaatcgatgcctgccgcgtggtggcgcatcttcgaggacgacgaccttggtcgctggatcgagatggcgctggcgcacaaccacgacatccgccaggcccgcgccagcctgctggccgcgcgcgccgtcttcgacgagcgccggctcgaccggctgccgggcgtgaccagcggcgctggatacacccgtggcatccagcagcaacccagtcggggcggtgcgcgcacgctgtcggaatcctggcaggccggcttcgacgtgcagtgggagattgacctgttcggccggctggaccggctgcaggaggctgcgatggcgcgggccgaggccagcgaggcggaactggagatgacgcgccaaagcatcgcggcggaggtcgcccgcacctggttcgaggcgcagggcgaccggcggcaactggaggtggcgcggcgggaggtcgacaactggcgggaaaccgtgcggctcgcacaggcccgcctgcgcgctggcgccggcctgcccgaggacgtggagaacgcccaggccaacctgttgcgcagcgaggcggcgattgcgccgctgacggccgcgttgcagcaggcccgccatcggctcgatgtgctggccgggcgccagccgggccagggcggcctgcccgatccggggcacgcgcaagccgcgccgctggcggcgcagctgccgctgggcgatgtcaaccggctgatcctggcgcggcccgacgtggcgcaggcggagcggctgctggccgccagcgtcgaggacgtgggcgcggccaccgccgacctgtatccgcgcatcgacttggggggcttccncggcttcttcgccctgcgcgacggcgacttcggcagcgccgcctcgcgcgccttccaggtcgcgcccacggtgacctggcccgccctgcgccttgggaatgcccgcgcccgcctgcgcggggccgaggccctggcggacggcgcgctggcgcgctacgaacaggtgctgctgaccgcccaggaggaagtcgagaacgcggtgacccacctggccgaacagcaacgccaattggccgcgctgctgcaggcggggcagcatgcccaggccgcgttcgacatcgccgacaggcgctaccgcgccggggccggcagctaccaggcggtgctggagaaccagcgcaccctgttccagttgcgccggcaggtggcacagcaggaagccatctcccaggcgcggatcgtggccctgtacaaggcattgggatggcctgtcccgagtcccggggacgtggcgagcctgtctgccggcccgggccggcaggacccggggcgggattccggagcgtag

SEQ ID NO: 355829 - DNA, 903 bp, Pseudomonas aeruginosa
atgctgatgcgccatatccggtatttcatcgccgtggcggaggaactcagctttacccgtgctgcggagcggcttcacatcgaacagtcgccgctgtcgcgatccatccgccaactggaggatgacctgggcgtccggctgtttgagcgcaacagccatggcacccggctcacctgggctggacaagtcttcctcgaggaggcgcggcgcgtgctggcggcggccgagcaggcccgtgccggcgcaagggctgccgcgaccggataccgcgggctcctgcgaatcgcgctgtccgacggtatctcgccatcgcacttgagcaacctgctggcccgctgccgcgaggagtcgcccgaggtcgagatcagcctgttcgaagtgacgctcgcccagcagctgaaaggcctgagagagggcgactacgacgcggggttcgcgaaggcggagcatccgggggaaggattgctggccacgccggcgtggagtgagcctctggtcgtcgcggtgccggcgaggcatcccgccttgatccatcccgagctttccctgatggaactgcaggcccatccactggtgctgtgcgacccggacgcgtgcgcaggatgcagccggcagctcgacaggctcctgcgtgccgcggaatgcgaggtcaggattgccgaaagggtggcatcccatgacctgctgatggcgctggtggcggcgggctacggccttgggatcaccacccgcacgcatctgtccctatggcggcacccggatgtcgtctcgcgtccgctggccggtgaagtgcccccgttggtgacctatctgctgcgccgggatgccgaggattcggagcaactgcgcagcttcgtcgaaaggttgcaacgacccaggaggcaggtgcccgacaaggagtaa

SEQ ID NO: 355830 - DNA, 693 bp, Pseudomonas aeruginosa
atgacacgatccctccatgcgagcgaccttctcctcgtgcatggcgcctggcacggcggctggtgttgggatcgcgtgacctcactgatggctgctgcgggacgacgtgtggtgacaccgacgctgagcggcctggatggcgcccctgggcgcttcggactgagccaccacgtcgacgacatcctcgtccatgccgagaacctcgaatcgatcacgctggtcggccacagctatgccggattcccggtttgcgccgccgcatcacgcctgggagaaaggatcgaccatctggtgctcctcgacgcgttccttccagtcgacggagagaagttgctcgatcacgcgcctcatctcattgaccgctacgccagtgccatggactccgatccggattggcggatccctcccttgcccgctgcgcagtttggcatctccccggccgaccaggcatgggtcgacatgcgcctgaggagccagcccgcacacagctacttcgaatccgtccgcctggaaagcccgttgtccggctgccgcaggacctacgtccgctgtagccaggcgcccggcgagcttctcgcacgctctgtcgcacgggccaggaacgacggctggaactatctggaactggatgcgccgcatgatgcaatgatcagccatccgcaggctttggccgatctacttctggagatttaa

SEQ ID NO: 355831 - DNA, 609 bp, Pseudomonas aeruginosa
atgcgacccgacctgctccttgccttcatgacctatgcgttcgtgacttccatcacgcccggccccaacaacaccatgctgctcgcctcgggactcaaccatgggttcgttcgcagcgtgccgcacatcctcggcatcagcatcggcttcgcggcgatggtgttcggcgtgggtgcgggactcgggcgcctgttcctcgcgtacccatccctgtacaccacgttgcgcgtggtcggtgcgatctacctgctctggcttgcctggcagatcgcgacctcacagccgttgcaggagacggccgcccctggtcggccattcggcttctggaaggccgccgccttccagtgggtcaatcccaaggcgtggatcatggccatcggagccatcgccacctacgcacccgcagagggcggcgtgctggcggtgatcgtcatcgctgcactctatgccctcgtcaatgcgcccagcgttgccgtctgggccgccttcggcacgacgctgcgtcgttggctcacggacaagcgccatttgcgcatcttcaacatcgcaatggccatcctgctcgtgctgtcgctgtatcccctgctgtccaatcaggccacgcaatga

SEQ ID NO: 355832 - DNA, 621 bp, Pseudomonas aeruginosa
atgctcaagatccttggaaagcgatcctctatcaacgtccgcaaggtcctttgggcttgtgccgaactcggcttgccgttcgagcgggaagactggggcagcggctacaccgatgtaaacacggacactttcaaggcgctcaacccgaacgcgatggtgcccgtgctggtcgacggggacttcgtgctgtgggaatcgaacactatcctgcgctacctcgccaatcgccatggcgacggcgcgctgtatccacacggtgccatggcgcgcgcccgcgtcgaccagtggctggactggcaggcgtcggacctcaaccgcgcgtggagccatgccttcatggcattggttcgacgctcgccggagcacgcggacgcccggcaggtccagcgatccctggaagactggcatcggttcatgcgcgtactggacggccagttggtcgacacgggcgcctacgtcgcgggcgaggacttcagcctggcggacatcgccgttggactgtcggtccatcgctggtaccagacgcccttcgagcatccccgcctggatgcagtggacgcctactaccgccgcatcgaacagcgcagcggattcgtcgcgcattgcaccggcgcaccgtga

SEQ ID NO: 355833 - DNA, 597 bp, Pseudomonas aeruginosa
atgcccgaaagcaacgacgaaaaacgacagactgctcagcctgtcagcagcatcttcatggaagaaaaagcctttcgggcacggatggtgttggtgttcggaaccgtgacagatgagttggctcgcgaaaccgtccgcaagctcctggcattggacgccgaatccagcgctcccatcaccatgatcgtttcctcgccgggggggcatcttgaatccggcgatgcaatccacgatgtggttcgcttcatctccgcgcccgtcaacatggtgggcaccgggtgggttggcagtgcagccaaccatctttacttgggagcgccacgcgagcggcgcttctgcctgccgcagacgcggttccttatccatcagccaagcggaggcgcgggcggaccggcaagcgacattgccatccaggccaaggagatcatcaaggcccgggaacgcatcgcccaagtcatctcgcgtgaaacaggccaaccgctagagcgggtgcagaaggatatcgagcgcgatctttggatgccggccgaagaggcgatttcttatgggcttgtctctcgcatcatcacgcatcgtcaggaattgcctctcacctga

SEQ ID NO: 355834 - DNA, 1332 bp, Pseudomonas aeruginosa
atgccgactgcacgctacaaacgcttggttgacagatttgccaccgagattcggtctggtcagttgccgccgggtactcgcttgccgacgcatcgacaactggcggcaaaagagaagatcgcgctggacaccgccagtcgtgtctacgccgagttggaggaaatggggctggccataggcgaagcagggcgcggcaccttcgtgcgcgagattgcactgccggcggggctgggcatggatcagcaggcgatcgctgcggacatggttgatctgaacttcaactaccccgccttgccagagcagaccgagctgctacgggccgccttgcggcaactggctagcgccggcgatctggacgcgttcttgcgttgtcatccgcatgggggccggacacatgagcgagcggtttttgccgcgtatctggcacggtccggcctgcaagtgaaaccagaacacgtattggtggtcaatggcgctcaacatggcctggccgtcgcggttatggcgctgttgcaacccggcgacgtggtcgccgtcgatgcgctgacctacccagggttcaaggccttggccgatcagtgcaggctggatctggccacgcttccagtttccggcctggagcccgatctggatgcgctggagcgcttgtgccgcgaaaggcccgtgcgcgccgtctatgccatgccgaccatccacaacccgctgggatgggtccaatctgccgatagtcgccagcggctggtcaagcttgcccgaaagcatgacttgatcctgatcgaggatgctccctacgcctttcttgaaccgaatccacccgagccgcttgcggcgctggcaccagagcgatgcgttcacgtcactacgctctccaagagcgtggcagccggactgcgcgtgggtttggtcaccgcgccggcagactggattgcccggctcgaacgcgcaatccgggcgacgatctggaatacgcccgcggcgatgaccgcgctggcttgcgcgtggctgacagatggaacggtggacagattgataaccgaaaagcgccgcgatgcggcagcccggcaagcggtggcagcacaggtgctcgccggattgaacccggtcagccacccggtttcctacttcgtatggctgccactgggcgaagaagtgcgtgccgagtccgtggccatgtcgcttctggagcgaaacatatcggtgtctaccgccacgcccttttccgtgggttcgaataccccccatgccttgcgtatcgcgttgggatcggtcgacctcgccacgttgaagcaggcgttgggtacggtacgggacaccatcgagtgtgcgtgttga

SEQ ID NO: 355835 - DNA, 777 bp, Pseudomonas aeruginosa
atgtcctcgaagcgaaccaccttgccgggccgggcccaggccattcgcaagcgcgccgggcgcctgccacggctgcactggatggtggctggcatcctggctgcgggcctgctgggatggctcctgtaccgcacgcccggtgcgccggcaccgcgcacggggcccgaggtcgcgcaggcgcatccggccggcccaccctggcgccgcggcccagccgatgcgcgcttcacgctgacgctgtacgccgacctggagtgtccgttctgcaaggcctactacccgaccctgatggcctggatcgatgcccatcccgagaccagcctgcggtggcatcacctgccgctggcgatgcacgatcccgaggcgagtcggctggcccgcatggccgagtgcgcaggtgaggcgcaaggccacgaggcgttcttcggtgccatcgcatggctctaccaaaacacccggggcgatggccaggggctaccggcagacctgacctggccaggcataaccaccgccatccaggcatgcctggacagcgagcgccccgcagccatcgttcgcgcgcaggccgacgaggccctgcgcagcggcatcaccgccacgcccaccgtgcggctggaagacagcctcacgggaagatcactgctgctgcatgggttggtcgagggcgatgcgctgctgtctgcacttgatctggttgccagcgatgcgtcgcgcgctccagggcccacccatgccgccgacgcggcactcagcgaagacacccgcactccgcaatga

SEQ ID NO: 355836 - DNA, 351 bp, Pseudomonas aeruginosa
atggcgcaacccaaccgttacacgctcgcatggccgctgctggccatgttgcttgcggccgggcaacccgccagcgcgtcagacgatgccatcgaacgcgagcagcttgcggccttggttcgccagatcgacctgattgaccaccaggccgagtacgccgtccttaccgctcagcagcagcgcgcccgctaccacttcgaccatgcccgcctgcgcgaggacctccagcgcgttcggacgggcatccaggactacctgacgccgccgcgagcccagccgcgcgatccggtcgagctgtccggtgactaccgccagtccagcccgccctccgaccaggaggcaccccaatga

SEQ ID NO: 355837 - DNA, 264 bp, Pseudomonas aeruginosa
atgcgaatcaacgcttccctgggctgctgtgcgatgccaaccgatcccgatgaaatcctgaccattgacgagctggccaactacctgaaagcaggcaagcgaacggtttatcgcttggcagcggagggaagaattccggcttttaaggtcggaggcacttggcggttcctgcgcacggacattgaggtctggatcaagcagcaatcgacgggccatctagaacctacaacgcaggagaaactgcacaagggggagcgcaagtaa

SEQ ID NO: 355838 - DNA, 1029 bp, Pseudomonas aeruginosa
atggcgcaagctgatttattagttgatctgatcaaaaccgcgactagcggggatcagcttgcctttcgcaaagcggctgaagcgctgatccaagaggagaagcagaaggggcaccgactgcttgcggagcggctcgcgaaggcattgcaccccagcgctattcaggccgcacgcccgccggcgggcaaggccgtgggcaacagcccgcacaaagacctgttctatgagattacacctgagcgagacctgcaaagcctcgtattgccagaaaagatcaaggcacagatacaagaattggtggaggaacagcatcgggcggagttgctgcactcccacaacttgcgcgccagaaaccgtgtcctgctcgctggaccaccaggtaatgggaaaaccaccttggcggaggcgctggcattcgagctgatgtatccgctaattgtcattcgctacgaaaccttggttggcagctatttgggtgaaacttccagccggttgaagaacgtgatggactacgccagaacacagcgttgcgttctgttcttcgacgaatttgaaacgctgggcaaggagcgcggcgatacccatgaaacgggagaaataaagcgcgtcgtcagctctttgctgatgcaactggatgaaatgcctgactacgtagtagtcgttgcagccagcaaccaccccgagcttttggataaggccgtctggcggcgctttcagttgcgcattgagctggcgactccaacccgtgagcaactgacgcaatacatcgcctccattggcgagcgatgcggcgtgaaattcggctatgaacccgaaacgttggcgaagcacctgctggggctgaattttgcagaggtcgaagaattttgtttgggtgtcgttcgtcgtgccgtactcgacatgaaaacggaaaacgcccaacaaattaccaagctgaagctggaacagtggaaaggccgcctgaagccagccgaaaaaaagcgcacagaagccgctggcgatgtgactgaagaggggacgaaccgctga

SEQ ID NO: 355839 - DNA, 2520 bp, Pseudomonas aeruginosa
gtgacgcgcctgggcgcgcaactgaccacgctgcaacaagactttgatcgctacaaagccagcgtcagcggctccgtggctggctttgagcctgaaacggtcttggtgatcgaaattgcaggtagcgtcaacgagtttcggcaggctgtcgaagccattggcctggagtggatgggcgaatgggatattgacgacattccgcccgatgaggattttttcgagcgcaacactaaaggggaacgcacgaacaaggccgtcaaaggacgcatgttcctctcgctcggcaacgaagcaggaatgcgggaacttctctcgctgtgggagaagtggcgggacaacaaaacgctgccaaacggcaaaaccaaatggcgcgatgtgttcaaccagaccgtacaaatccgccgctggggaattggagaggcgctgcgcgagacaggcatgctggatcgctggcaggatttactgaaccctattgatccagcgaaaaagattcgatttcagatcgagttgttctatcgccgatcagaagacaagcgcagacagaacgaacgcaacgtcgccacccttctgcaagctgcgggcggtaaagccctgggcggtttcatcgacatgccggaaatcgcctttcatgcggtgaaggctgaattgcctgcagagcgcatccagcagcttttgaacgacctggaatcccagagccacgacaccgacatacagctcttcaaatttcatggcgtcatgtatttccgcccaaccgggcaaagccttgccgtcacggaagatggtgaaggcgtcgatacagaaatagccgaaggggtcgttagctttcctcccatcgcggccattctcgacggcgtgcccaatgtgcagcatcaggcactgaagggccgtttgctgctggacgatccggacaatctttctgcgcagtatcaaccgggcgaacgaaagcacggtacagccatggcatctttggtggtgcatggcgatatggctgacaaccaagcagagcctttgccacgtctggtgtacgtgctgcccattatgcagccagatcccctctctgatccgagaaacagaatcgagcacgtccccgacgaggtattttttgaggatcgcatcgcgcgcgcagttcggcggatgtttgagggcgaaggcgcggtgcctgcacaggcccccagcgtctgcgtcatcaacctctccatcggcgaccccgcacgccccttcatccatacacccagcccttgggcaagactgctggattggctgtcgtggaaataccgcgtacttttctgcgtcagcgccggtaactatcccgacgccatcgacattgcattgtctggaacggactacctggctttgaccgacccccaaaaggtggagcatgtgctcaagtgcattcaggcccaattatccaggcggcgcatcctgtccccggcagaatccatcaatgccatcacggtcggcgcaacccacgccgacagcggtggcaactactaccaagggcagcggacagatttgctgcccggcgcatcgttgttcagccctgccgcacggcttgggcatggcttccgtcgctcagtcaagccggaaattctgttccccggtggtcggcagttgtatcgcacgccggtgctggacagccaaactgtctatcaactggatggcgggcttgcagcgccggggcaacaagtcgcctgggatagcaaccaggctggcgctttgtcgcaaaccgtccatacacgcggcaccagcaacgccaccgcccttgccacgcgcagtgcggcacgcatttatgaagtgctggatgcgctgcgcggggaacacgaaggcagcattccgcagaggctaatttccgtactcatcaaagcgctactggttcatggtgccaagcaggatgatgatgcttgcaaggccatcaccgccgcgctgaaaacgcgagataactcacgccaattcaaagaggtgatggcgcgctaccttggctatggcgcagtgcagatcgaccgtgtgttggcgtgtgctgagcagcgcggcacggtactgggctgtggcgaaatccgtgagaacgaaatccacgagtatcgcctgccgctaccgccaagcctgtctagcagccaggaatggcgtcgcatggtggtgaccctggcatggttcagcccagtcaatcctggccatcggaatttccgcgaggccaagctggaaatgtcccctgccagtaattggggcgctttaccgctgaaacttgcgcgtcaagacggagatcacaatcaggtgctgcgtggaacggtgcagcatgaggtgcttgaaggcacagaccaaatcgcggcatttcaagacggcgacaacatcttgctgcacatcgcgtgcaagaaggacgcaacggcacgtctcgacgacgccattccttatggtctggctgtcaccctggaggtggccgaaggcatccagattccaatttacgaacaactgcgcacgcggctccagcctcaagtcgctgtcggtgcagttgggggtacaccttaa

SEQ ID NO: 355840 - DNA, 1836 bp, Pseudomonas aeruginosa
atggctcgcatcgagaaccacaaatacagcatcgaagaagccttcagggagtgcttctacatcgtgccagactaccagcgcgagtacgtctggacggacaaggaagtgcatcagttgctcgaagacatcgatgagcagatcgatgcggggacgacgcgggaatacttcatcggcaccgtgctggtgtcgccgaccgaccagaaaaaccactacgaggtcatcgatggtcagcaacgcctgaccacgttcttcctgctgctgtgcgcgctgaagcacctgtttcagggtgaaccgcagcggcagatcgtcagcggtctgatctcgaccagctacacggacagcgatggcgagacgcgaaccagcctgaagctggagccgcgctacgagaatgcaggcgaggtcatcaccaagctggtggagctggacgccgatccgcaggccgtgcgcgcgggcattcaatcgtcgggcatcgccagcttcggttcgctggaaaacttgatcagtgcctatagcacgctgcaccgctacctgaaggacaactacgacagcgcggccaagctgaagaagtattggggctatctcgccaacaacgtggtgttcatccagatttccacggacgtgagcagcgccctgaagattttcgagaccatcaacgagcgcggcgtcggcctcaacccgatggacttgctgaagaacctgttgttcacgcaggtgaagcaggcgcagttcactcagctcaaggacgagtggaagaagatcaccaaaccgctggagaaggagaaggaaaaacctctgcgcttcctgcgctacttcctgatggcgaactacgtcatcaagaacgaccgtggcgacgccgtagtgcgcgaggacgaaatctacgactggttcgtggacaaggagaacgccgcgctgtgcgactacgcgggaaagcccttcgaattcgtccgcaaggttatccgcaacgtcgagcactacctcgcgttttcaaacggtctgggcaacgatggcaagcccagccttgcgatggacagcctcaaacgactggcgggcggcgctttcagcttgcactacgtccttctgctggcggcggccagttttccgaagccgctgttcgatcatttcgtggcgcagttggagagctttcttttctactacatcttcaccaagacgccgaccaaagatctggagcgcagcttttcccaatgggccgatgaactgcgcgcgattgctggcgcgaccgatcccgtcaagcagaaggtgcagttcaacggattcatcgccgaccgcttcgacacgaatatggcgggcaagtcgcaggagctggtggacgcgctccggcgcttcaccctgcattcgatgcagcagtaccgcacgcgctacttgctggcgcggttgacgcaacacgtcgagatggctttcagcgggttgaagactccgggcagtctggagccgttcaccaatctggaaatcgagcacatcctgcccaacaagccggaggccgatctgcgcggcaagtgggccaccgagaactcgggaacggcctacgacgactacaagaaccggctgggcaacctgaccttgctggagaagcccatcaacatcgtcgcgggcaacgacttctacacggcgaagcaggttgagtaccgcaagagcggcaactacctgacccgcagtctggttgaactgaccagtgttggccagaacacctccatctccagaatcaacgagaaactgaaagcatttcctgcgtggaacgccaagaccatcgaggagcgccacggactgctgataactttggcgcaggatgtctggaaggcgctacccattgatatctga

SEQ ID NO: 355841 - DNA, 3258 bp, Pseudomonas aeruginosa
  misc_feature (331)..(331): n is a, c, g, or t
atgcgcattcgcttggaggtgggagctgagctgccggacttcgaccaagcgctggcgaggggatggtttcggctcatccagggacgggtagttcctgccgttgcgttgagagactattaccttcggcgcgatgtgccgtatgcagaggcgctacggtcttttgtctactggcttagcgacgtgaaatatcaaatcgcgcagccaggcgcacatgtcagtgcaagtacctttgaagactacctcgtcgctggagccgaatcggggcacaagccgcccgtccagacgccgacctggattgcggcgcgactttgggatgaccagccaccagtcnatctcgcaacgtgggccatgcgctgggaagtgctcgatttggtccccctgattccttatgccgtttggtctgagcaggatgcacagcggttcagggaggcttcacttcaagccctacgcaatgccaatctccccacatgggaccacgtgtccgttgccgaaagcctgcgggcctccggggacatgcaagagctggtacctatcgaagtgaagcctgatctgctgggacgcgtcctcgctcgtacgcgctctcactacgggaccgacctctatgaggcgcatgcgctctgcgcactcatgagagtactggtgcttgagctggcgcatgtcgaggctggaccggtcccttccaagatgacgcaggaactggtcgcgctggcgatgtgccatcctgaactttgcgacgtgctgattaactgctgcctacaagcgccgcaggtccttgccgacctcattttctgtccgcctgcagcgggtctggtctgccacctggtcgctacatggcatgtgcagttccagatcgaccgggactatcgcaatgaggctgccgactcggtgcaagcgtcattgttggcggactgcctggaggttctccggtatcactttgttcagggcgacgcagctccggctgaatccgcacgcttgctgatcgtgatgcaggagcacgattgcggggggagtgatggcgtgcctttgctacccattggcctagaccacctgcgtggactgcccgtggatatcaagcggcaagttcgccagtcacttatagaaatggcaagcgcccatgccacctccctggagtttgcggtcatgctgaaggccgttgccgtggtgggtgagtcgttgcctcctgcagaagcggagaccgtggcttctgcttatcgaaaggcattccatgcaaaggaacgggccgatacacgatgggtagacgttacgggcgcggccgcgctggcccgactggcaatggatcacggccacctccaacccaggatcttctatcccctcgacttgcaggtcgaactggctcgtcgaccggacgatgtcgtgggtctgggtttgtccatgcgtgagcagatacgaatgctgagccgtgcggtggtgggctaccccgaaagtgtacctggcgacctcgtcgaagcattggctttggcgatccaggctggggcgagtaatcgcccggacaggggccgggtcgacgccttcacattccagatggacaaccaggtccgaggtcggcaagggccgcgcctggagtcagatttgatcgaggccgtgaacaggctggaggtccctgctcaacaagagcgcctcgtacaggcgctcctgctggtcgaggatcctctgatactggccatgttgttgccccgtgtgccggcggtgtaccgagagcgcattgttgcccggttgcgggtattgacacccgacgaagctagccgtgcagcgttcgtcacacaagcgtcggagcgcgggcaagcgcttctggatgcagggcttcctgagcttgccagtgcatatctgcgagaggcccaagaagcgcaacgtggaagaaatcttcccgcgttggccgtgcagaccctgaatcagcaattgcagattcactacctgagcggcacgtttgatgcggttgcatcagccaagattccagacggtctgcggccggaacaccaggccgaggcgcagagaacactggatttcttccgcgcgctggtgtgcctcaagaacgagccacccgaagccttgaaagctgcagggatttttcacagcctgtatcggcagcacccgttgcctgcatacgcgatcaacctgctcgccgcacgtgtggtcaagctcctcggggagaacctgtttcgtgtcgtggtcggggaggatgctgagatggcccgcctcgcaatcgatgaggctgaccgggccattccttctatcaagggactcagcgacatgtcccgcgccatccatgtgccaaattgcgcagccatgctgctggccgttgggcgccccagggaggccatgaatcgcctcaaggaacttgcgtctgcggagcgcaccgccgagagcacggcattcgaggcggtggccagcgcgaggcttggcgagtcggatcgtgcccgtgcgttgattcagtcagtcgaggaacgctatcgtgatgcgccattgctcgtcgctgccaagaaccatatcgatcattcggctggtttcggcgcgcctcccctcgttattttcaagcaggaagcgacggtcgagatgcaggcgaccctgtttaggttcctgaaactccccgcttcggagcaggcagaggtgcttttggggcctcacagggcgctggagaggctgctgatagcggcctttcaggatgcgttggctgcatttcaacgaatgttgtctttcctgaaactcgacaggaacaaatttcatgaagacgacttcaacgggatcatcgcagcactcgtcgaggcgcggctcgaagggagcttgggctggcaggcacacgaacaggcccctggcggaaaaacgacgaaaggaaatgccggtgagcgcgacttggtgatacgccggaacggcgctgatctcactgttttcgaagcgctgaaagcgtcatcaccaacaaacgtggagattgcaaggcattttcataaattgttcgcgtactcttcagctgacgttctcttccatgtcacctacagcgaccacaaggatgtctctgagatgcgtgctgcagtcgaggaggtggcaaagcggccacctccgggcacaacgtatcaatgccaatcggcgatacccgccaaaggggaaatgcccggtgctgtcaggggaagttatcgcaggaatggagacgatgtcacagtcattttctttgtgatcgacatgcggcaggaaggccagcgtgcggcggtgggggcgccagcattgatcgtgaacgccgatcagtga

SEQ ID NO: 355842 - DNA, 1887 bp, Pseudomonas aeruginosa
gtggattcacgcacattcaccattcagcagatctaccaggatcgacgccagtatcgagtgcctttttaccaacggccctacgtgtggaatcgggatgaccaatggggacgactctgggaagatattcgagacaaagcagaagcgcgcttgttaggcgacaaggccgtacctcatttcatgggtgccgtcgtgctggagccgcagaaaaaaaccggattgttaggcgtggaacgtcaccacatcatcgacggtcagcagcgactgacgacgatgcagtatgtgctgactgcactaaccctcgctctacgagagtgggggcaaccgacgttccagccgatcatagaagcgtgcttgcgcaacggaaacccggagacgatggaggaccgcgaggtcgaagccttcaagttgtggccgacttttcgagatcgggagccatatgttcgggcgatgactgccacttcgctggaggaacttcgtgagcgttttccagcgagcttcacgcagaccggaaaccttcgaaaaatcggtgttgatcatccgcccgccttagaggcaatcgttttctttcgcggagcgatggttgaatgggcaaatgagcataaagatcaagcgatcgaagcaatcgcgatggcactggcaacagccactctgaccgatctttccatcgtgtgcatctccctcggcgaagaggacgacgcccaggtcattttcgagaccctcaacgggcatggcgccgagttgcatgccaccgatctgattcgcaatttcatcttcatgcgtgccggtaccaacgcagatgatctctacgccaatctgtggtgccaatttgagtctccgctatggtctgagtcgcagtcgaggggacgtctaagccgcccgagattggagtggttcgtgcagaccgccgttcaggcggaaaccggtgacgagatagatattggccgcctatatgctggatatcggcgcttcgttgacaactcagcgacattgcgtgatgcggatgcacagttaggcatgctcaacaggcacgccgaacattaccgtgccttggtcacaggtaccggcgatttacctatcggtgtatttggtcgtcgcatcggcgtgtgggatgcatcacctgtgcatgctctagccctgagagtggccgcgtcctctctgtccgtggacgagcagtgcgagatattcgattgcgtcgagtcctacctggtgcgccgggctatatgtgggctcactcgcaagaactacaacaaggtcttcgctcagcaattaaagaaactccaatcaggcgaactaagtgcaactgcattccgtgccacattggcggaggggacgggggaaatatcccgctggccacgcgatgaagaattccgtcgccattggctgaatggtgatgtctacccgggaaggctcgatgcgggaaagttgcgagcaatcttccaccgtctggaaacggccatgcgctctgaaaagagcgaggagcgtgtcccgttggctttggatacgctggatattgaccacatcttgccccagacatggcatacgtactggcagcttccagacgatacacatgcgacggccaacgatgtatcccaggctcgtatccttcaatatgccccggataaccttgatgagcgatcgaaattgattcttgcgcgagagtccgcggtaccgcgcttgggaaatcttacgctcgtccactatggcgtgaatcgtgcgcttcagaaccatgcgtatgcgcaaaagcgccaagctttgttcaaccactcaaacctgcagctcaatcgcgagttgatgcaacgagatcaatgggatgaggatgcaattctcaagcggggtgaaatgctgtttgaagttgctcgaactttgtgggccggccccgattcataa

SEQ ID NO: 355843 - DNA, 1518 bp, Pseudomonas aeruginosa
atgaacttgagccgcctgttcacgttgctcgggcgccaggccggctacaacggcgtgctatcggtcgggcgcgtgcagacgccgacgctcaagctggtcgtggaccgtgatcgcgagatcgcgcgcttcgtctcggtgccgttctgggccatcgaggtcgcactgtcgcatgcaggccagacctttgtcgcaagctggacaccgccgcagggtagcaccgacgaagccggccgttgcctgcagcagcctctggcgcagcaggcggcggaacgcctgcgcgcggccggcaccgcccaggtgctgtcggtggagaccgagcgcgtgcgcgaaggcccgccgctgccgttcgacctcggcaccttgcaggaagtgtgttccaagcagttgggcctcgacgtgcaggagacgctggacattgcccaggcgctgtacgagacgcacaaggcgacgacgtatccgcgctcggattcgggctacctgcccgagagcatgctggccgaggtgccggccgtgctcgacagcctggtcaagaccgattccagcctgcggccgttgatcgaccgcctggaccgccagcagcgttcgcgagcgtggaacgacggcaaggtcacggcgcatcacggcatcatccccacgctggagccagccaacctctcggcgatgaccgacaaggagttggccgtctaccggctgatccgcgcccactacctcgcgcagttcctgccgcatcacgagtttgaccggacggtggcgcagctcacgttcggcgggcagtcgctggtggcggtcggcaagcagatcgcgacggccggatggcgccaggtgctggcggcgccggcccttgacgacacggacggagaggatgcacggcgcggccaagtattgccagcgttgaaggctggcgatgcctgtcaggtcggcgaggtcgagctgaaggcattgaagacgctgccgcccaagccctacacgcagggcgagctggtcaaggccatgaagggcgtcgccaagctcgtgactgacccgcgcctgaagcagaagctgaaggacaccacgggcatcggcaccgaggccacgcgcgccaacatcatcagcgggctgctggcccgcggctgtctcttgaagaaaggccgcgccatccgcgcatcggatgcggccttcacgttgatcgacgccgtgccggcggccatcgccgacccggggaccacggcggtgtgggagcaggcactggacatgatcgaggccggccagatgacgttggacaccttcatcgccaagcaatcgagctgggtcgcccagctcgtgcagcagtaccgcagcgccacgctcgccatcaagctgccgcccgcgccgaactgcccgcaatgcggcgccccgatgcgccagcgtagcggcaagagcggcgcgttctggtcgtgcagccgctacccggactgcaagggcacgcagccggtcgaaggtgccgcggcaggcaagcgcggcgcatccagcccgcggcgtcggcgccccaaggcgaactga

SEQ ID NO: 355844 - DNA, 681 bp, Pseudomonas aeruginosa
gtggatccggggcaggatagcgcagcgagatctaagttaagtttcgatagccgaactgtttcagtcgatagtgtttcacaaggaaagcgaatgaacatacaacaggcaataacgcgctctaggatccagcgaggtgttggtggtgcactactactaagtggcgcaactttctactttgttagcttgctgatggcgatttatcgtacagcgcaagctatgagcaattcggctctgctgtggcagcttggtgcggtgatccaaaattttatcgcagcactctatcaagcaacctcgccctacatcggctttgtctggcgtaacgtgccaaccatcaatcaaacagatccatttacctacggcaatcttctttttctggggcttgtcggcgtcatgattgtaggtaaacagcttgtgcttgccgggcgacgacttaaagcgcgcattcaacgtcagattgatcgtgtcgaagaccttcagtggcgcaattcgatgatgcagagtcgagttgttgccgacacaacaatctctgccggcaatatcgggcaggtcaacgtcttccaacaacctatgccaccgagtcctgaaggggagtggtggagtcgtccatggggagtcattggtctgtctattatcagcggctacattgtggccgtgatggccaagctaaccggaatgctttga

SEQ ID NO: 355845 - DNA, 825 bp, Pseudomonas aeruginosa
atgagcgaaggtaaccgcagtcgatcgcgcctgctgccgagcctgctcggcctgttgatcctgctgtccggcctggcgctgctggccggcggcatcaagctggcgagcctgggcggctcgctgtactacctgctggccggcatcggcctggccctgagcggactgttgctgctgctgggcaagcgtgcggcgctaggcctgtacgctctggtgctgttcgccagcaccgtctgggctctgtgggaagtcggcctggactggtggcaactggtgccgcgcctggctctgtggttcgtcttcggcctgctgctctggctaccctggttccgccgtccgctgctggccgacggtccggcgccgctgggcaccgcggcgctgggcgtggcggtggtcctggccggcgccgctgcggtgggcagccagttcaccaatccggggcagatcgtcggtcgcatcgaccgcgacagcggcatgaccagcaccgccccggcgatgccggacggcgactggcaggcctacgggcgcaccgagttcggcgaccgctactcgccgttgaagcagatcaccccggccaacgtcggccagctcgaggaagcctggcgcatccgtaccggcgacctgccgaccgccgacgatccgctcgaactgaccaacgagaacaccccgctgaaggtcaacggcatgctctacgcctgcaccgcgcacagcaaggtgctggccctcgacccggacaccggcgcggaaatctggcgcttcgacccgcagatccagagcccggtaggcttcaagggcttcgcccacatgacttgccgtggcgtctcctaa

SEQ ID NO: 355846 - DNA, 264 bp, Pseudomonas aeruginosa
atgaagaaatccattccgttcctgctgaccgtactgctggccgcttgcggcccatcggaggcacccaagcaggccaacgtgcctaccgtggaggaactggccgccgatccggcgcggttgaaggagctgcgtcagcaatgcaagatcgaccgcgcgacgctgggcgaagtgctgtgcaatcgagtggccgaagccacacgcaaacgattctatggcgacggaaagacgccctacacgccaccggaaacaccaccgaagttctga

SEQ ID NO: 355847 - DNA, 594 bp, Pseudomonas aeruginosa
ttgactgacaaggaagatttggcgaccaatgtctgcacagtggacgaaccgccatccgagaccatcaaggccatcctggcgcaaatccacgaagatgtgcagatgcgcttttacggttgcggggcgccgttcccgccgctgctggaaggcgccactgtgctagacctgggttgcggcggcgggcgcgattgcttcgtcctgtccagtctggtcggtgagcaaggcaaggtaatcggcgtagatgccacggccgaacaaatcgccttcgctcaagattatgtggagcaccaccgcgaggtattcggctatgccaaaagcaacgtccaattcctacagggcaagatcgaagccctggacaagctaggcattgcacccgaaagcgttgatgtcatcgtttccaactgcgtagtcaatctgtccatgaccaaggccgatgtattggcgggcatggcaaaactgctcaaaccgggcggggaaatctacttcgccgatatttatgcggatcgcaggctggcaccggagttgaaaaacgatccgctcatcgtcggtgagtgtatcggcgacgccctgtatttcgaggacttcgtgcgttag

SEQ ID NO: 355848 - DNA, 1251 bp, Pseudomonas aeruginosa
atgaccaggaaagcgattagtgaggtgttcacccctcgtagcagagaactcaaccccgaaatgtacgtgcctcgacccaggctggaaagggatctagctcgttcgttctcgcggcacactcacaccttgctatttggggaaagtggtaatggcaagacgtggctattcaaaagagctttgactgaaagcaatatcccgtatatagcggttaactgtgctaacgcatcacgcttgaagtcacttaccgcagagatatgtggctgtataattgagccaggcactgcgatcaaaatgaaattcaacgaagagaaaatagctgagctgagtgcatatatagcaaaaggtggcttgaaacacacgggcatgtatgatgtggctcaagaagaacctttgcttcgagcattcaaactttttgccgacagcggagcaagtggccgagcacagaagaaagtaattgtcttagacaacttagagtcgatatttaataacgatgaattaatgtcagagttggcggacctcatcattctattggatgatagccggtatgccgaatgtaatatcaatttccttatagtgggagtgcctaatggtgtgctccagtattttcgcgagacaaaaaattcagaatctgttgctaaccgtatatctgagataaggaaagttgacggactggattctgggcaggttcagcagatactgcgaaaagggttcgcacagctcgaaatcgcaatgacaggcccagagtttgtagaggtttcaaatcacatctggtctatcactctcgggattgcgcaacgtgtacatgagtattgtgaggcccttgcacacgccatccaagataatcaatggcgttattctccagagcttcttgatattgcagatgaggattggttggttaccgggttgcgtcaatgctattccgtcattgaagggcatctcaatagccgagatacgactgtcgccagaagaaatcaagttatttactgcatcgcccaagcgagtggacaccaatttgatttaaacgatattgatagaattgtcagggcggaattcccaagtacagtttctaaaaatatggggattggtaacattctttctgaactcgcgtccgggggaagcccgcttatatcaaaaaatgaccgatctggctcatacagcattcgagatcctaggtaccttatgtgtatcaaggttatgctgcgtaaagatagtgccagctcgaaagttacaaagagaaaatttactaggtga

SEQ ID NO: 355849 - DNA, 612 bp, Pseudomonas aeruginosa
atggaaagatcctcacatgcccagcgcgctcttgccctgctccacaagcagggcttcctgcgcacccgcgacttggacaccatcggcgcgccgcgggtggtgctgacacgtctgtccacttccgggcagttggagcgtgtcgggcgcggcctctaccgtttgccaggcaaccccatctccgagaaggaggacctcgcctcgattgcagtcaaggttcccaaagccgtgttctgcttgctgacggcactccagttccacgaactgaccacgcaactgcctcgccaggtttggattgccatgcctcgtggcagccacaccccacgtatcgagcacccaccgatcaagatggtgcagatggcgggtgatgcctatgccttgggcattgatgagcacgaacgcgatggcgccagactgcggatctacagtgccgcaaaaaccgtggcggactgcttcaagcaccgcaaccagatcggcctggacgtggccattgaggcgctgaaggctgcctggaagacacgcaaggcttcagccgatgacctatggcgccatgccaaggtctgccgggtcgcaaatgtaatgcgtccctacctggaggcggtttcgcatgagtga

SEQ ID NO: 355850 - DNA, 1476 bp, Pseudomonas aeruginosa
atggcactcgaccacctcacactcaccacataccgcgatcggcatcctgcatggcgattgctggcctcgccacatgcgccattggtagcaagcttcctgtaccgggtgttcgttgcaccgaacgtgcggctgacgagcgaagcggatctggccgaaatgctggaagacgagctgtttgcgctgcgcgaacaactcggtgtcgaggtgtatccgaaaaccgcaaccgaatatctgaatgactggtgcgcgccggacaagggctggctgcgcaagttctacaaacccggcaccgacgaggcccagttcgatctcacccctgccacggaaaaggccatcgcctggctagtgtcgctgaccgaacggcctttcgtcggtaccgaatcgcgcctgctgaccttgtttgcgctgctggagcagatcagcaccggaagcgaggctgatccagccaggagcctggaggaactgcgtcgcaagcggaacgagatcgatgccgagatcggccgcgtcctgtccggtgatgtaccgctcatggatgacacgggcatcaaggatcgttttctgcagttccagcagttggcgcgcgagctattgagcgatttccgccaggtggaacacaacttccgccagctcgaccgcagcgtccgcgagaagatcgcgttgtgggacggcagcaagggggctttactcgacgaagtcatgggcgagcgcgacgccatcggggattccgaccaggggcgcagcttccgtgcattctgggatttcctgatgtccagccgtcgccaggaagaactgtccacacggctcgaccagatcctcgacctgcccgccgtggctgcgctcaagccggagccgcgcacccgccgggtgcaccacgattggctggaagcgggcgaacatacccaacgcatggtggcgcagttgtcgcaacaactgcgccgcttcctggatgaccgggccttccaggaaaaccgtcgcatcctcgaactgttgcgcaacatcgagaccaaggcgctggccttgcgcgacatgccaccgaccggcgaagtgatgctcctcgacgagatgggcgcggacatcgccttgccgcaggaacgccccctgtttgcgctccatgccaagccacgcctagcggaactgatacttgaatccggcgaagacgacgacatcgacaccacacgcctgttcgaccagcacgtggtggacaagacccgcctgcgtgaggccctgcggcaggcattgcgccagcagtcgcagatcagcttgcgcgcgctgctggagacgcagccgctgcaacagggattggccgaactggtcacctggctggaactggcccacgcaggcagccgcgggctggatggcctcagagccacggtggatgacgatgtgcaggagatcatcgaatgggccgtgcaggacgcgcctggctcaacggtacgacggcgggcgcgaatgccccgcgtgatttttacgcgttga

SEQ ID NO: 355851 - DNA, 675 bp, Pseudomonas aeruginosa
atgaacgatatgcaccaggatgatccagaaggcggcattgagtcgcgcccgcccgttgtagcggaactctcgcaactgatggtgcatttgctcaagggcgtgttgtaccgtcaggacgacgagcgcctatgggccagcctgttgagcctgcaagcgcgggtgcgggagcaggcggcggtgttgttgctggatctggtactggacgaagccgaggggtacgccttcttcaaaagccagccggagccggagcatgctgacgccacacctcgtccgccacgcctgatcgcgcgacggccgctgtcctacccggtcagcctgatgctggccttgctgcgcaagcgcatggccgaagccgacgccagcggcggcgatacccggctggtgctgtcacgcgaggagatcgccgaattgatgcgcgtattcctgccggacggcaccaacgaggcgcgccttatcgaccaagtggattcgaccatcaccaaggtggtggaactgggttatctgcgcaagctcaagcccgctgccggcgcagctcagcaggcacctcgctacgaggtggggcgcatcctcaaggcgttcgtcgatgcacagtggctggccgacttcgatgcgcgcctggagggctatcgcaccgcattgtcacgtaccgatcgcgacaaggatgccggccgatga

SEQ ID NO: 355852 - DNA, 3378 bp, Pseudomonas aeruginosa
atgaacaatttttcgccacaggagctcgatttcgtggccgacgacagccgcgtcggctttcgcctgcagcggctggaagttctgaactggggcacattcgaccggcgcgtctggcgctatgaactcgatgggcgtaacggcctgctcactggcgacatcggttcgggcaaatccaccctggtcgatgccgtcaccacgctgctggtgccagcgcaacgcatcgcctacaacaaggccgcgggcgccgagacgcgtgagcgatcactgcggtcctacgtgctgggccattacaagagcgagcgcgttgagaccaccggcagcgcccgcccggtggcgttacgcgacaccaccagctacagcgtgattctgggtgtcttccgtaacgaaggctacggccaggcgatcacactggcgcaagtattctggtttcgcgaaccacagggccagcccgcgcgcttgttcgtgactgtagagcgggaactgtccatcaccgagcacttttccggattcggcagcgacatcaacggcctgcgcaagaagttacgcgcgatgggctgcgaactgaacgacagcttcccgccctacggcgcctggttccgccgccgcttcggcatcgagcacgagcaggcgctggaactgttccatcagacggtttccatgaaatcggttggcaatctgaccgatttcgtgcgcagccacatgctcgaaccgttcgacgtgggggggcgcatcgaggcactgctcggccacttcgatgacctcgaccgcgcccaccagtcggtactcaaggcaaagcgccagatcgagttgttgactccgctggtggaggatggccgtcgccacgggcaaatagccgccgagatccaggcattgcgcgaaggacgcgatgcactacgcccgtacttcgccggcttgaaggcagcactgctggagaggcgcctggaattgttgacccaggatgcgacccgctgggatgcccgcatcaagcaactgggagagcaacgagacaacgcccgaatcgagcaggggaagctcgaaggcgcactgcgcgagaacggcggcgaccgactgcaacaactcgctgtcgccattcagcagcaggaggcagagaaacagcaacggcaggagaaagcggacgcctacaccacgctattgacgcgcattggagaagcagcgccgggagacgaagctgctttcatgacacaaagatccaccatcggagaacacgccgaagcgctgcgcacaagcattgcggaccacgatacgcagatcaatgaagacggatatgcgctgcggcggggtcaggaagaacacaaagcgctcagcgacgagatcgacagccttgcgcgtcgaaaaagcaatatcgatgcggcccaggtacgcatccgcgacgcattgtgcgccgccttgtccatcgccgaggaagacctgccctttgccggtgaactgatccaggtgcgtgaggacgagcgcgactgggagggcgcggccgaacgcctgctgcatggcttcggcctgtccctgctggtgccggatgcgcactacaaggacgtggccgattgggtggaacgccagcacctgggcacgcggctggtgtacttccacgttcgtgcgcgcaagcccacccaggccatcagcctgcatccccaatcgctggtgcgcaagctgctcatcaagcccgacacgccgcactacgactggctggaacgcgaactgcaccaccgcttcgacctggcctgttgcgacagcacggagcagttccgccgcgagacccgcgccatcacgcgcgctggacagatcaaggacccgagcggacgccacgaaaaggacgaccgccgccgcatcgacgaccgcagtcgctacgtgctgggctggagcaacgccgacaagctgcgcaccttgcgtgacgaacgcgagggcctggagcagcgactgggcgacattggtctgcgcattgccaacacacagcgattgcgcgggcaatgccaggcgcaactggaggccttggccaaactcgaagtcttcacccgctacagcgagatcgactggcaggcaccggcgcgcgagattgcccggctgaccgatgaacgcgaccgcctcaaggaggcctccgataccctgcgggaactggaaagccaattggcgcaggtcgttgagcgcctgaaggagatcgaaggcgatcttggcgaggcacaaggcaaacgcggagaaacccgcagcaagcacgaaactgcccaggcacagtatgcgcaggctctcgaaatccaagcgcaagccgcactcgacgatgtgttgctgcaatctctagaaggctggcgcgccgaagtcctgggcgaccaccagctctcggtggaatcctgcgacaaccgcgaacaggacgtgcgcaacggcttgcaggcgcgcatcgatgccgaagacaagcgtctctcgcgcctgaccgaacgcatcatcaacgccatgcgcggtttcaaggaggccttcaaggcagagaccgccgagatcgacataagcctggccgcgctgcccgagttcgagcgattgatgaaggatttgcagcacgacgacctgccgcgcttcgaagcgcgtttcaaggagttgctcaacgtcaataccatcaacgagatcgccaatttcaacgcccagctcgcgcgcgagcgggaaacgatcaaggagcgggtcgatgtcatcaaccaatccttgcaggtgatcgactacaaccccgggcgctacatccggctgctggcgcagcccagccccgatgcggagatccgcgacttcctgcaggatctacgtgcctgcaccgaaggcgcgctgagcggctcggaagacgaacagtattcggagaccaagttcctgcaggtcaaggccatcatcgaccgcttccgggggcgtgagggcctggccgagatcgaccggcgctggatgcagaaggtgaccgacgtgcgcaacggcttcctgttttccgccagcgagcgctggcgcgaagacgatgccgaacatgagcactactccgactccggcggcaaatccggcgggcagaaggaaaagctggcctataccgtgctggccgccagcctggcctaccagttcggcctggaatggggtgcggtgcgctcgcgctcattccgttttgtcgtgatcgacgaagccttcgggcgcggctcggacgaatcggcccagtatgggctggaactgttccgccagctcaacctgcaactgctgatcattacgccgctgcaaaagatccacatcattgagccctacgtgtccagcgtcggcttcgtgcacaacgagggcggccgtgagtcgcggctgcgcaacctgagcatcgaagagtaccgggcacagaaggctgctgccacgggaggcgctgtatga

SEQ ID NO: 355853 - DNA, 1206 bp, Pseudomonas aeruginosa
atgacatggagccagcccgccgaccttcgtgcgcaggtcgagcggctgtggcggcgcggcgagttgctgcgtgccgtggtcggcgacggcacgctgggctggccgttgcggctgtcgctaaagtcgccgtccaccgccgacctcagcaaccgtttcgatgccgtgcgcggctgggtgcgcgacatcagcgccacgccatgcgtgcgcattgaatggcgcgagtggacgcaccgggtgcagggccggcagcgcctgccggacacgctctggatcgatacgctggaagacgcgctggcgatgatcggcaagacaggcgatgcccaccggttccaggcgctctggcagcacactgccgaagcgcaacccgccctgctgccgtggctgcacagatcgccgctgcagaccttggcgctggccgaacactggccacgcctgctggccgtggtggcctgggtgcaagcccatccgcgccccggcgtctatcttcggcaggtcgacgcgccgggcgtggacagcaagtttatcgaagcccatcgcggtacgctggctcagtggctggatctggctttgccgccggaagccatcgaccacgctgcggccgggatggcggggtttgcccgtcgctacggctttctcggcaagcccgtccgcatccgcctgcgcttgctcgatccgcaactgccccagcttcccggctgcacgggactgaccgacatcaccctggatgaggacagcttcgccacgctcaccttgcctgcgcagcgtgttttcatcaccgaaaacgaggtgaacttcctggcattcccaccggtctccagtgccatcgtcgtgttcggtgccggctatggctggggagcgctcgcccgagccaactggctgcatcgcgcctctctgcactattggggagacatcgatacccatggctttgccattctggacagcctgcgaaagtatttcccgctagccgcttcgttcctcatggaccgctctaccctgatggcccacgcacctcaatggggtgaggagcccctcgacaaacgccatacgctgcccttgtcccgactgatcgatgaggaagccgctctctacgacgacttgcgtaatgaccgaatccggccacagctgcggctggaacaggaacgcatcggctatcgctcgctatgcgcggcgttggcgacaacagttcaagatgattctcggccgtag

SEQ ID NO: 355854 - DNA, 1245 bp, Pseudomonas aeruginosa
atggcaacgcctcggcccacacgacgtccggacctcgaagtccacctgggcgcgagtggcttggtcgtggggcgcctgcatcttggcggcggccggcgcagcgcgttcagctacgacgaaggctggctgcgggatgcccggttcttcacgctgtcgcccgacctccagccggtggccggcgtgcagcatccccggcaagtgttcttcctcgcgctggaggacaccgcgcccgacgcctggggcgagcgtgtgatccgacgcgcccatgcgaagctgcgacaggaagaccgcgacacgcctgcattggacccggtggacttcgtgatgtgggtggatgacgaggcgcgcgtcggcgcgctgcgcctgttcgatccgcactctggcgcctacctgcgcgccggaggcgcgaaccggcaggtaccgcccctggtggaactgaagaaggtgctccacgcggcccgcgccctggaagacggaacggaaagcgcgcaggacctgcactacctgctggggcaaggcacgtcactgggtggtgccaggccgaagtccacggtgcgggacaccgatggacgcctggcggtcggcaagtttcccagccaggcggaccggcgcgacgtgatccggggcgaagtgctggccatgcaactggcggccaaggccggcatccgcgtggcgccggcccgcgcggaagtgatcggcggcacggcggtcgccgtcatccggcgtttcgaccgcacccatgatggcggccgcatcccttacgtgtcggccgcgacgatgctccagtccgatggtcgcgacgcgacgcatgcctacaccgaactggtggatgtgctgctgcagtcgggcgccgatccgatcgccgacatccatgaactgtggcgccgtctggccttcaacttcctggtctgcaataccgacgaccatctgcgcaataccggcttcctgtacgacgcgcgccagcgcggctggcgcctgtcgccggccttcgacctgaacccgatgccgggcgaccggcgcgagagcaagacctggctgagcgaggacacaggcgttatcgacagccgtgacatgctgatggccaccgcgtcgtatttcaggctggatgctgcgcaagcgcaggcgatctggagcgaagtggcccaggccgtggcgggctggcgtgcattggcccggggattgggcatgcgcggtaccgacctgctggatttcgagccggcgttcgtcgaatcgaccacgccctga

SEQ ID NO: 355855 - DNA, 411 bp, Pseudomonas aeruginosa
atgtcttcttccgagcaaaagcgctctggtgcgcaagtggcgatgccgcagcctgttgcgcgtgcgctgcgccgcctggggcaggacatctcggcggcgaggcgcatgcgccgcctgagccaggaagaccttgcgcagcgcatcggcacgtccttgagcaccgtcaggcgcatggaagatggctatcccggcaccgcgctgcacaccttcctgcgcgcgctgcacgtgctgggccggcttgatgacctggcccaggcgatgaccctggagaacgatgcgctcggcatggaactggtgcgtgagcagctgccgcagcgggtacgcacctctgccggcaggaagcggcaggcagcatccgtcgttgacaaaggcgatgcgcgcacgcctgccgatgacttggagggcttctga

SEQ ID NO: 355856 - DNA, 1317 bp, Pseudomonas aeruginosa
atgactcccccaaacagcctactgcaccccttgaaggcccaagtcctgggctttcaagaggatgagcacgactaccacttccaggtggagtacccagaccccgacgcctgccacacctgcggtacggtcggccagctggtgcgcttcggcaagaagcaggtgaagttccgcgacgtgccgatgcacggcaagcgcgtgtcgctgtgggtgatccggcgccggttccagtgcaagtcatgcaacagcacgttcacaccgcccatctacgagatggcggaggatcaccggatgacccggcgatgctacgactacatcatcaagcgctcgctgagcggcaccaacgccaaggttgcccaggacatcgggttcgatgagtcggtagtgcgggctgtgatcaagtcgcactgcgacatgaaggccatcggctacaggccaaccctaccgcgcgttctcggcatcgacgagctgtacctgaaccggcagttccgctgtgtgctgaccgacatcgagcggggcaccatcctcgacattctggagtcgcggcagtatccggtgctttacaactacctggccaacatgcaaggccgggagaacgtccagatcgtctgccaggacatgtggaagccctaccgcgacgtggcctcgcagttgttccccaaggccgccatcgtggtggatcggttccacatccagcgcatggccaacgaggcgatggagacgctgcgcaaggggctcaagaaggagctgacccagcaccagcgccgacagctcaagggcgaccggaagatgatgctgatgcggcgccgtgacctgaacccgatgcaggagctgatcatccatacctggttggatcagttccccgagctgggcatggcctacaagctcaaggaggcgttcttcgacatctgggaggccacaaccgaggctgaggcaagggcgcgctaccaggagtggctgaacgcgattccagaggggcacaagtcccactggaagccgctgattacctcgatgacgaactgggagcgggagatcttctcgtacttcggcccagcccagcgcaacaccaacgccttcaccgagtcgatcaaccggcagatgcgcgacctgaacagggacgccaggggcatgtcgttcgagatgttccgggccaagacgctgttcagcctggagcacaaggtgagcatgcccaagccgaagcgggagtcacctttcgttggctacgcacgccccatggagcgggtcatgtacagcatcccgatctacgaccacggcgtttccatcgaggccgttctcaaggccatccagggcgcccagtag

SEQ ID NO: 355857 - DNA, 864 bp, Pseudomonas aeruginosa
atgcaatcgctcaccttcaacaacacccaattcgacatcgttgatcgcaacggcaatccgtgggtaagggcaaaccagatcggtttggccttggagtacaagaacccagagctgtcgattgccaagctctaccgcagcaacgccgaagagttcagcgacaagatgaccgccctgatcgagatgcccaccaaaggcggcgtccagcaggttcgcatcttctccctgcgcggcgcgcatctgctggctatgttcgcccgtaccaaggttgccaaagagttccgtcactgggtgctcgatgtcctggaaggtgtggctgaggttccttcccccgccaaagagaagcgcgcccccaaggccctgcccaacggcctctccatcgaccagcaggacgccatcaaggcgctggtgaaagcccgcgtcgaggcgctgccgaaggagaagcaggccaaggccgcagtgacctgctggagcgccctcaagtccaagttcggctgctcgtacaagaagatcgagtccgaccagttcgcagaggctgtcggcctggtggcgcgcatcgagctggagggcgagtggctgccgaaggcgaaagaggacgagttcgtgctcggcttctacgaagctcaggaggtctgccacctggtgcatcacgccatctggtgtgtctaccgctgggacagcggtatcgccgccggcgtgaaggcgatgaactaccccgtctggctcagcgccttcgagcacttccaggaggcgagccgctccgcgcgcaggatcgagcgcctgatgccggagttgattggctacttccgccagaagaatggcggcctgctcccggagcagtgcgcagcaaaaggaatcgtcgcatga

SEQ ID NO: 355858 - DNA, 195 bp, Pseudomonas aeruginosa
atggagcgcctgttccgcagtctgaagtcggagtgggtcccgtcaacgggttacctgacggcgcaggaggcccaacgggacatcagtcattacctgatgcaccgctacaactggatcaggccgcatcaattcaacgacgggttaccacctgcggtggccgaagaaaaactcaacccactgtccgggatgggttga

SEQ ID NO: 355859 - DNA, 279 bp, Pseudomonas aeruginosa
atgccggcgctcgccctcggcgtaggcatgccccaggccgaccccggcgttcaggcgcagggcctcgaacggctggtagctcagcggcaggttgaagccggcgccttcgaaggcgtgccggcggtccaggtagagatccgccgagagcgcgaaggccaacgccaggccgaggtcgtcgcgggccagcagcggtgtcttcagctcggggctgaggcggctgtgccgatcgcctgcgtcgccctcgcgcaccagcgccgcgccgagctgcaccgatggtag

SEQ ID NO: 355860 - DNA, 1806 bp, Pseudomonas aeruginosa
atgggcggtgtagaacagcagccagacctgggccatttccagcagggcgctgccgagggtggcgttctggccgcgggcgtccagcagcagggccaggccggcgacggcgaaggtcagggtgccgggcagggcgaggaggatggtgatcaggatcgccagcggggtatgcagctggctgtcgcgcttgaagtggccgatgtcgtcgttcagctccgccagcttgtcgtacaggtagcggcgtttccacagcagcgcggcgatcagcaggaacagcggcaggaacagcagcggccgatcgaccaggccttcgcccagttcacgcaccccggagccccaggggatctcggtgagctggttcttcagcagggtcggggtcatcttgaaccaggacaggtcgagcggctggttgctgggaatccagaacatctgctcgtcgagggtggtgcgcaggctctcgctggtggaaagcaactgtttctggttcaactgcaaggtgatcgcttcgttgagcagcgcgttgagttcgtggttgagccgttcgagcaactcggaacgggttgccaacagggtgtcgagatccttgcgcagttccggcgtgacctgctcgctgggctgctgggcgagcaggtcgtccaggtattgctgcggggtcgccagcttgtcgcgttcctggttcagttcgaactggccgaggcgcaggtcggcgatctcgtcggccaggctctggtcggccttgatcttgggcagcgcctgtttctgcttgtagaggatgcgcgacagcagcaggctgccgcgcaggacgttgatctgttcctcgagggcctggttggactgggtcaggttgtccagttgctgcttggtctcgaggttgcgccgggtgagcacgttgaggcggtcggtggcacgcaggaggtagtcggagagacgcaggttcttggcgttctcctggctcagcaggctgtcggtgccggccccctgggcgccttccttggacagctcggcgacggtcttttccgactgctcgcggcgcttctcgctgatcagcgcctgcaggtcgagggtttccttttccaggcgcgagatcttctcggtgagcagatcgtgctggctcttgccgaggtcctgcagcaggttgttgccggccagctcctggcgcaacagctggctctgcacggtcaatgcggcctgctcggcgagcagctcgccgcgacggtcggcgttgatcgtcttgccgctttccttgccggccttgagcagcgagccgatttccaggatccgtgcctgcatgctgctgatgccggcctgggctcgttccggacgggtctcggcggtgatcgacaggctgttggcctcgcccagggctttctgccactcggcctgctgggtggtgcggtcgttgagcagcatttccaggcgggccgcgctctcgccgctgtagcgttcgctgaccggacgttctttggtcttcttcaggcgctccagttcgcgctggttttcctcgatctgccggggcgcgtcgctcaggcgctttttcaggtcctccaggctctgcagcgcttcgtcgcgcgcggcgaggaacttgagggtctgttcgaggctggcctttgcgaccttctggtcggcttcggcgagcttgcgctcggccagcttgtcgaggctttgctggacggcctcggccgagggcggctcggactgggcgaggagcggcggactggcaaggcagaggccgaggaaaagaatagcgatcagggagcggagggcaggcatggtcgagaagagactcgaagaagggtgaatgcaggttag

SEQ ID NO: 355861 - DNA, 171 bp, Pseudomonas aeruginosa
gtgttcaagcagcgcacttcgctggtgttcaaaagcatgcaggtggtgcgcttcttcgatcgcaagcgcaatgccttggtctatctggtctacagcgaccgggtgatcgaaggtagtccgcagaacgcggtgacggcgattcccctcatgccctggccgaccgctcgctga

SEQ ID NO: 355862 - DNA, 876 bp, Pseudomonas aeruginosa
atgtaccgcgccaagtcgcggggccgcagccgcatcgagtactacacccgcgaactgacctacctggccaccgagcgcatggcgctggaaaccgaactgcgccgcgccctcgagcgcgacgagttgcagctctactaccaacccaagctgagcctggagagcggcttgctggtcggcgccgaggcactggtgcgctggtaccatccgctgttcggggaaatttccccggagcgcttcatccccctcgccgaggattgcggcctgatcctgcccctcggcgactgggtgctggaacacgcctgccagcagatgggcgaatggcaaaagctgcacgcgccgttcggcccgctgtcggtcaacctcgccggcgcccagctcggccagccgcaactgatcgaacgcctcgagcaactgctggagcagtccggcctggaaccgtcgcggctgcaactggaaatcaccgagagcttcatcatgaaccagaccgaggaggccctcgccgtcctccacggcctcaagcgcctcggcgtacagctggcgatcgacgacttcggcaccggctactcctcgctcagctacctcaagcgcctgccgctggacatcctgaagatcgacaagtcgttcatccgcggcctccccgacgatccccacgatgccgccatcacccgcgccatcatcgccctcggccgcagcatgcagctcacggtgatcgccgaaggcgtggaaaccgaaggccagcagagcttcctcacccacgaaggctgcgagcagatccagggcttcgtcctcagcccgccgctgcccgccgagctgttcgccagcaaattcctcaaaccgcgccagccgattggcgctccccgagaagcgccggtataa

SEQ ID NO: 355863 - DNA, 207 bp, Pseudomonas aeruginosa
atgagcatccccgccaagaaacaagacgccgccatcccggcgccgaaggaggagaaggtgaaactcaccgctcgccacacgcatgccggcatgacgtaccaggccggtgctgaaatctacgtcaacgctctcgacaaagcctttctggtgaagcaccggaagatcgcggtcgaaacccaggacgcggccaccgccgccaaggagtga

SEQ ID NO: 355864 - DNA, 225 bp, Pseudomonas aeruginosa
atgccagacgcttctctcggtgaatcctctgcgaatatcagacggagacgagttgcccgctatctacgcactgagtctggcgctgcggtgctgctggtgatcgtcacggtcgtggcgctggcgtgggcgaactcgccgctatccgatgcctatttcgagttgtggcacctggacgtcgggtttgacttcgggccgctgggcctgcacatggacctgcatcactag

SEQ ID NO: 355865 - DNA, 1626 bp, Pseudomonas aeruginosa
atggtcgtcttcttcttcctgatcggcctggaggtgcgtcaggagttcgcccacggatcgctccgggatcgcagccgtgccggtctcgccctgatcgcgggggtcgcgggtgttgtgcttcgcgctctggtgtacgtcctgctcgtggggctggccggaggtcagggcctgcacgggtggggtgcggtggtcggcaccgatacggcgttcatgctgggcaccttggcgatcgtcggtccgcggctgtccggtcaattgcgtgtgttcctgctcaccctgaccgtggtcgatgacttcctcgcagtgtccatcatcggcatcgtctatagcgaggagatccggatcgtcccgttgctgatcgccctcgccagcctcgttggattgtggttgttggggcgcacccgacagtggcgggcaatgccgtatgtgctgatcgtgatcgtgctgtggctcgcaaccgtgtattccggcatccatgcctccctcgccgggatggccgcggggctgctgatccccgcctatgcgacgcaacgtcacggggtcgttgcggcaagacagttgttccgtgacttctggcagtctccgagtgccgcatcggctcgcgcggtggactgcgggctgtcccagggtatctcggtgaacgagcggctgcacgagttcctgcggctgccgacagcgctgctgatcgtgccggtgttcgccttggcgaacgccggggtggacctgcgtggtgggctgctcgctgaggccttcggctcgcccgtgacctggggcgtcatcgcggggctcgtgctcggcaagctcctgggcatcgggctcaccacgctcgtcgccgtccgtctcggcctgggccggctgcccgagggcgtcggaatggggagcgtgttcggtggtgcggcactgtccgggatcgggttcaccgtgtcgctgctcatcatcgggctcgcgttcggcacgacctccgacctgggccgccaggcgacggtcggcgtgctcgtgtcgatgatgctcgccacgttgctcgggtggctcatcttcaaggttgccgctcgcaggtggggtgaggagaacgccgatctgccgatggtgcttgagccgccggtcgatcccgaggtcgatcacattcgcgggccagaggacgcgcagctcacgctggtggagtacgtggacttcgagtgcgagtactgtgcgcacgctaccggttcttgggaggatctgcgcgcccacttcggggacgacctgcggtatgtggtgcgccacttgccgcaccacccgcatgggccgatcgccgcgcgtgcgtccgaggcggcatcgaatcaggggatgttctggccgtggctggacttcgtgttcacccgtcagcacgcgctggagcgcgaggatctgatcggctacgccgcagagcttgggctcgacgtcgatcggttcatcgccgatctcgacagccctgcggtgatcgagcgtgtcgagcgcgacctcgccagtgcggtcgccagcggtgcgcacgccacgccgacgttcttcgtcgagggtcgccgcctgcgcggcagctacgacgcccgctctgtcaccgcagcgctcgaagccagccgccgcggcatccgaactcaggaagtcccgtcctga

SEQ ID NO: 355866 - DNA, 849 bp, Pseudomonas aeruginosa
atggcaaacaattctttcggtgaatcctcttgtaccgctgcggccagcggcctcgtgcaggtgcgtggcgcgcgcgagaacaacctcaaggaggtggacgtctccatcccgcgcaatgcgctggtggtgttctccggcgtctccggctccgggaagtcctcgctggccttcggcaccatctatgccgaggcccagcggcgctacttcgagtcggtggccccctatgcgcggcgactgatcgaccaggccggcgtgccggacgtcgatgcgatcgacggcctgccgccggcggtggcgctgcaacagcagcggggctccagcaacgcgcgttcctctgtgggcagtgtgaccaccttgtccagcctggtgcggatgatgtattcgcgcgccggcgcctacccagccaaccagcccatgctgtacgccgaggatttttcgcccaacacgccgcagggagcgtgcccgacctgccacggcctgggccatgtgtacgaggtgactgaggccatcatggtgcccaatccctccctgagcatccgcgagcgggcgatcgcctcctggccccccgcctggcaaggccagaacctgcgcgacatcctggtcagcatgggctacgacgttgaccgaccgtggaaggacctgccgaagaaggatcgcgactggattctgttcaccgaggaaacaccgacggtgccggtgtacgccggcttcacgcccgccgaaacccgcgccgcgctcaagcgcaagatggagccgagctacatgggcaccttcaccggcgccaggcgctacgtgctgcacacctttgccaacacccagagcgcgttgatgagaaagcgcgtcgtatag

SEQ ID NO: 355867 - DNA, 201 bp, Pseudomonas aeruginosa
atgagctgggcgcaacggctcaagcgggtcttttccatcgacatcaccacctgcgcccactgcggcggcgcggtacggatcgtcgccagcatcgaggaacccaccgccatccgcgccatcctcgcccacttcgagaagcacggcgcgctggagcaagcgcactaccggcccgcagcgcgcgcgccgccgccggccgcgtga

SEQ ID NO: 355868 - DNA, 807 bp, Pseudomonas aeruginosa
gtgccgcgcttcgccgcgaccgtgtcgcagctgcaggatgccgtggcgcacgcaacgtcgccggcagcgcatctgcccacggctcgctatgcgcctcaccgtcccgagcgcacgctgctgtattcgctggtgcaggcgcattggccggactttctcgcgcgccgtgaggtagaagaccgcccgctgcccgagtatgtgcgcgaggagttcgagacctacctgcgctgcggcgtgctcgagcacggcttcctgcgcgtggtctgcgagcactgtcgtgccgagaggctggcgtattcctgcaagaagcgcgggctgtgcccgagctgcggcgcgcggcgcatggccgagtcggcgcggcatctggtggacgaggtgttcggcccgcggccggtgcggcaatgggtgctgagtttcccctacccgttgcgcttcctgttcgccggcaaaccggatgccatcagcccggtgctgggcatcgtgcatcgtgtgatcgccagctggttagccgatcaagctggcgtcgaccgcgccagcgcgcaatgcggcgcggtgacgctgatccagcgcttcggcagcgcgctgaacctgaatgttcacttccacatgctgtggctcgacggcgtgtacgacgcgaacgtcgagcccccgcggcgcaagccgcgcctgcgccgcgcccgtgcccccacctctgcgcaactgacgcagctcgccaacaccatcgcgcatcgcgtgtgccggcacctgtcgcgccgcggctggctcgaaggcgaagacgaattacccgttcctgtccgacagcgcgggtag

SEQ ID NO: 355869 - DNA, 267 bp, Pseudomonas aeruginosa
atgaggaagagcaaattcacggagagccagatcgtggcgatcctcaaggaaggcgaggcaggcgtgccggtggcggaggtctgccgcaagcacgggatcagctcgccgacgtactacgcctggaagagcaagtacgcaggtgcgacggtgtccgacctgacgcgcatgcgcgagctggaggcggagaacgcgcggctcaagcgcatgtatgccgacctggcgctggagaacgcagcgatcaaggacgtgctgacaaaaaaattctga

SEQ ID NO: 355870 - DNA, 828 bp, Pseudomonas aeruginosa
atggtgaccgagcaccgcttgtcgattcagcgagcctgcagagccacaggcttgtcgcgggcggcgtactacaaggtgccgccgttgccgcaggagaaggatgccgaggtcatcgacgcgctcaacggcgtcgtcgagcgtaatggccgctggggattctggaagtgcttcgaccgactgcgcctggatgggcgggcgtggaaccacaaacgggtctggcgggtgtactgcgagttgggcctgaacattcctcgcaggacgaagcggcgcattcccaagcgcgagccggtgccgttggccgcgggttcgttcgtcaaccagggctgggccttggacttcatgcacgacgtgctctacgacggccggcggttccgaacgctcaacgtgatcgacgaagccaaccgcgaagcgctggcgatccaggtggcccagtcgctgcccgcctcgatgctgatccgcacgatggaccgcctggtggagtggtacggcgcgccgctgtcgatccgcatggacaacgggccggagatgaccagccacgacttcgtcgaatgggcccagcgcaaaggcattgccctgaactacatcgagcccggcgagcccaaccagaacgcctacatcgagcgcttcaaccggaccttccgcaccgaggtgctcgatgcctacctgttcaattccatcgagcaggttcaggccatcgccgacgactggctgacccaatacaacgagtaccgaccgcatgacgcgctgggtggcgtgccgcccaagcaattcatgcccagactgatccacacaaccgccgcaaactctaggaatcaactgtctgcttga

SEQ ID NO: 355871 - DNA, 831 bp, Pseudomonas aeruginosa
ttgcagcgcgtgcttgggcgcggccatggcgcgcgccggatcgccgcccagttcctgggccacggaggcgcggtcggcctgcaccacgagttcgcccagcacaccggcatgctcgtactggccggccaggacgtagagcagcggtccccacaggtcgcgatagtcactgagccagtccaggagttgggtgtccagcagttggcggtagagcaagcccgtcgccgcgctgtgcaggcggtattcgcgatcgtcgcggtagcggaagcggtacggctggtgcagcggaccgtaccacgggtgccacagcgagccatcggccagttcgacgtgcagatcgacggcgatcttgccgatgtcgtgcaacaacgcggcataggcgaccgcagcagtccaggcttcagcctgcgcagcttggtcctcggggcttgcgccgatgggaagcagatgggactgccgcagcttgagggcataggcaacgatctccaggccatggtcgagcatcccgcccgggtacgcatgatgatgcgattcggaagccgggaaggcctgaaccagttcggcgtagcgctccagcggcgcgcggtacaggacggcgaactgcttgcgcgacagagacgtgcgctgccagatgtgctccagcagcttctgccgacgcggggtggccagcagcgatgcggccgactcgggccgcatcaaccctttcgggaggtcggatgcgggtggtggcgttggagcggtagcgaccgcgggccgttttcgctggaacagggaaagcatgtgggtgtcctgatgacgggccgatcgggaggccttttggccttttcgaggtag

SEQ ID NO: 355872 - DNA, 723 bp, Pseudomonas aeruginosa
  misc_feature (521)..(521): n is a, c, g, or t
atgttcgaggaaacgcacgccgcgcgccggatggctccagcgctgctcggcgcagatcgcttcgagcagcgcgcagggcagcttgacgatgaatttctcgcagtccgccgaataggtcaggtcgaccggatcgtccgggttgatcagcaacagctcgcccggcgccagggcgtgttcctgcccgccgccgcgccacaggcagtggccgcgcaggaggatctgcaggtggaagatgctctccagcgccggcgaggtgacccgtaccgccgcgccgtagctgatccggcacaggtcgaggctggcgaaggtgcggtggtcgaggctggcttgcggcctgccggaggccggcaggcgtatgcagtgcgtaccgacgtgccggttgacatagccggacaccgcataggggtcggcacgttcgaacacccggctgcgctcgctgagcaaggaggcattcatgggcaggacactcaggctgctatcgttgttgttatcgccgcgcggcgccaagcgccgggcgcggnacatccacccacactacgcaagccctccgccggcgacaatccgggccggcaatcgcgtgcggtaatcgaacggaatccgtccaacggccaacgaaaaagggccgccagggtttcccctgccggcccgcttgcgcgcccgcttcagccggccgccggcgtctcctcgcgcggtccggcgtcgcgcccgtgggtccagcgatag

SEQ ID NO: 355873 - DNA, 486 bp, Pseudomonas aeruginosa
gtgttccaggcattctcccgtgccatccgtgaagggggcagaaagttcgtggtgatggacaccgcgcccacgggccacaccttgctgctgctcgacgccaccggcgcataccaccgcgacatcgcccggcagatgggtgagacgggcgttcacttcacgacgccgatgatgcagttgcaagacccgaagcagaccaaggtgctcattgtcaccctggccgaaatcacgcccgtgctggaagcggccaacctgcaagacgacctgcgccgcgcgggcatcgagccgtgggcctggatcgttaacaacagcgtggcggccgcacatccgcattccccgctgctgcgccagcgtgcacgcaacgagttgcgggaagtcgacgccgtggccacacaacatgcccgacgccatgctgtcgtgccgcttctgaccgaagagccggtgggagtggagcgtctgcgggctttggcaaacaggaaaacctcatga

SEQ ID NO: 355874 - DNA, 435 bp, Pseudomonas aeruginosa
atgaaagccgtggtattccatgacatcggcgacatccgcctggaagacgtggcggagccgcgcctgcaggagcccaccgacgccatcgtgcggctgaccgcctcggcgatctgcggcaccgacctgcacttcgtccgtggcagcgtcggcggcatgcgtccgggaaccatcctcggccatgagggcgtgggcatcgtcgaggcgctcggcgacgaagtgcgcaaccttcaggtcggcgaccgggtggtgattccctcgaccatcgcctgcggcaattgcgtgtattgccgagccggctactacgcccagtgcgacgtcgccaaccccggcggcagccaggccggcaccgcgttcttcggcggccccgggccaacggcggcttccatgggctgcaagccgagaaagcgcggattccctatgccaacatcggcctga

SEQ ID NO: 355875 - DNA, 720 bp, Pseudomonas aeruginosa
atgcatgtccccggcggcgagaccgtgtgggtgggtgaaaggcattggctgctcgccgcgggagtcgagggcatgccgccggaagatggcctgccagggctggtacacgtagccaatggccgggattggctcggctccttgcgtctgcaggatgcccctcgcgacgacgcccgttcgtcactgcagcggttacgtgcgcagggattgaaactctggttgctgaccggggattccagcgcagcgtccgaacgcctgacggctgacctgggcatagacttcgaccgggtcgaggccgattgctctccggaagaaaaagccgacatcgtggcaaagagcccagcgcctgtcgcattcgtgggcgacggcgccaacgatggcctggtcctggcccaggcagcctgcggaatcgccatcccaggatcgagttccgtggctgtttccgcagccggggtggtgatcgcgcacggcagcgtgggcgctgtcgtcgagacccgtgagttggctcgcaagtttgatcgcatcgtccggcagaatctcgcattttccgtcgtgtacaacctcgccgtgattgtcgtgctgttcgaagcaggcgtgacgccctttgccgccgcgctcgccatgctggccagcagcgcgtcggtgctcctgaacacctgcaggctgctgcagggccgcgtcgtctgtgacaagtcgatgcaggccaagccggctgcgtcctga

SEQ ID NO: 355876 - DNA, 270 bp, Pseudomonas aeruginosa
gtgggctggaatttcggcttcatcggcgccacggcgctggtgaccgactgctacaccgcgcccgagcgcgccaaggtgcaggcactcaacgatttcctggtgttcggcaccgtggccgtcgcctcgttcgggtcgggccggctgctgaacacctcgggctgggaaaccatcaacggcctgatgctgcccctcatcgcgctcgtgctggccctgctgggttggctggcttggcgcaaccgccggcagtcggcggcggccgctgcgccatga

SEQ ID NO: 355877 - DNA, 435 bp, Pseudomonas aeruginosa
gtgattcccaacctgctgccctaccagttgaacagcgtcgacctcgaccccaacggcatggccgacgagatcgaactgaggtccagttcgcgcaacgtggcgcccaccgccggagcggtggtgcgcctcgactatccgacgcgggtggcaaggtccttgctggtggatagccggatgcccagcggcgagcccctgccgttcgccgcggaagtgctcgatgcccacagcgggcagtcggtgggcgccgtcggccagggcagccgcctggtgctgcgggtcgagcaggatcgcggctcggttcgggtgcgctggggcaacgagccgcagcagcagtgcctggtcgactatgcgctgggcccgcgcgagacgacgcctcccgtcctgcaactggcatgtcgcccggcgtcggccgccgaccgggagcgcacgctgtga

SEQ ID NO: 355878 - DNA, 978 bp, Pseudomonas aeruginosa
atgcaccctggcccaggtctacaagcgcagcgacggcgacggcctgtatcgcggcggcccgtcctactacatccagcacggcctgaagctgcgctcgatggcggtggtcttcgcggtactcctgctggtgacctacggcttcgccttcaacggcctgcagtcctacaccgtcacccattcgctgcagaacgccttcggcttcgccccgcagcacaccgggatcgccctggcggtgctgctcggcgtggtcttcatcggcggcatcaagcgcatcgccgcggtctccgacctgctggtgccgatcaagaccctggcctacatcggcgtcaccctgtacgtcatcgccagccagatcgagcacgtcccggcaatgctggaaaccatcgtcaagagcgccttcggcctagacccggcgttcggcggcctgctcggcagcgccatcgtgatgggcgtcaagcgtggcgtcttcgccaacgaggccggcctgggcagcgcgccgaacgtcgccgcggtcgccgccgtgcgccatccggcggcacagggcgtggtccaggccttcagcgtgttcctcgacaccttcgtgatctgcacctgcaccgccctgctgatcctgctctcgggcttctacaccccgggcttcgaaggcgacggcatcgtcctcacccagaactccctggccgcggtggtcggcgactggggccgggtgttcgtcagcgtggccctgtcgctgttcgtcttcacctgcatcctctacaacttctacctgggcgagaacagcctgcagttcctcagccgcaaccgcctggtgctgatcggctaccgcgcgctggtgctggccctggtggtctggggctcggtgcaggacctgtccaccgtgttcgccttcgccgacatcaccatgacctgcctggccttcgtcaacctgatggccctggccctgctgttcaaggtcggcctgcgggtgatgcgcgactatga

SEQ ID NO: 355879 - DNA, 609 bp, Pseudomonas aeruginosa
gtgcaggcccgcaacgtgttcgcggtgatcttttccggtacctacagcgccggcaccctgctgctctggctgacctacttcatgggcctggtgatcgtctacctgctcaccagctggctgccgaccctgatgcgcgatagcggcgcgagcctggagcaggcggcgttcatcggcgcgctgttccagttcggcggggtgctcagcgccgtagcggtgggctgggcgatggatcgcttcaacccgcacaaggtgatcggcctgttctacctgctggcgggggtgttcgcctggtgcgtcggccagagcctcggccaggtcaccctgctggcgaccctggtgctgctggccggcatgtgcatcaacggcgcgcagtcggcgatgccgtcgctggcggcgcgcttctatccgacccaggggcgggccacgggggtctcctggatgctcggtatcggccgcttcggcgccatcctcggcgcctggatcggcgccaccctgctgggcctgggctggaacttcgaacaggtgctgaccgccctggtgctgccggctgcactggccaccgccgcggtgctgctgaaggggttggtcagtcacgcggatgcggggtga

SEQ ID NO: 355880 - DNA, 675 bp, Pseudomonas aeruginosa
atggtacggcgctcagtgtttcaacgaccggtcgggcccacgcgttccacttcccccgaccggaagacaattagcaataccaatggggaaaagaccaatgaagagtcgcaagatcaacaagtcacgactggccctggccatcactgccggtaccctcggtgccctggcgcaacaggcggtcgccgccggtttcatcgaggacagcaaggcatcgctgaccctgcgcaacttctacatcaataccgacaaccgcaatggcaccgcctcgccgagcaagcaggaagagtggggccagggcttcatcctgaattaccagtcgggcttcacccagggcaccgtcggcttcggcgtcgacgcgctgggcctgctcggcgtgcgcctggacggcggcggccgtgccggcaagagcggcctggaccgccagccgggcaccgtgttcccgctggaaagcaacggcgagccggtgcacgacttcgccagcctgggcctgaccgccaaggccaaggtgtccaacaccgagttccgctacggcaccctgcagccgaagctgccggtggtcacctacaacgacggccgcctgctgccggtcaccttcgagggcggccaggtcacctcgaccgacctcaaggacttcaccctggttgccggccaactggagcactccaagggccgtaa

SEQ ID NO: 355881 - DNA, 660 bp, Pseudomonas aeruginosa
atgacggacatgccagccaccgccgacgagccggttcgcctgctgctggtggacgaccatccgatgatgcgcaagggcgtcgcccagttgctcgaactggaagacgacctcagcgtggtcggcgaggccggcagcggcgaggaagccctgcgcctggccgccgagctggacccggacatgatcctgctggacctgaacatgaagggcatgaacggcctggataccctgcgcgcgttgcgcgaggccggagtcgacgcgcgcatcgtggtgttcaccgtgtccgacgacaagggcgacgtggtcaacgtcctgcgcgccggcgccgacggctacctgctcaaggacatggagccggagcgcctgctcgagcacatccgccaggccgccaccggacagatgaccctcagcccgcagttgacccagatcctcgcccaggccctgcggggcgacgaccgctcgaagagcctcgacgagctgactgagcgcgaacggcagatcctccgccagatcgcccacggctacagcaacaagatgatcgcgcgaaagctggacatcaccgaaggcacggtgaaggtccatgtcaagcgggtgctgcacaagctcggcatgcgttcgcgggtcgaggccgcggtgtgggcggtggagaacgacctggtgtga

SEQ ID NO: 355882 - DNA, 678 bp, Pseudomonas aeruginosa
atgagaattttcaagacgattcccgagcgtggcgacttcggtttccagcaactggtcggcccacacaaggtgaccggcgcggcgatggccggcagccgtggctttttcggcctgcgcctgagcaaaagctcgccattcggttcggtgcgcgacgaggacggcaacatctattccttcgtgcgctcgctgatggccccgggcggtacgcccaacccgaccaagttctactacctgaacaaccatgtggatggcgtcaacctgcgcatggaccacgagaagatggcccgccaggcgctgacgccactacctgtacagaccctggaaggcgacacggtgcgctggaccaaccagcccggcgaagcgggcaacggctgggaaatcaccgccaacagcgagcgcctgacctggcgcgaggatggcctgttccaactggaaggccgcctgcttagcccgggcctgcagtggtatttgcccggcgtggagtggggtaccttctacgtctcgcagctgtgggagctgtccggtgtctgcgagggacggccggtgaggggggggcgatggcgcttgaccagttctacatggccgagggggggcgatccacttccagaaggatctggtggtcaacaacaacaagcacgtgatctggtggtcgttcgccaacctgtacgaggacggtag

SEQ ID NO: 355883 - DNA, 387 bp, Pseudomonas aeruginosa
atgcgtcgtaatacagcaggaaaacccagcgccgcctgggaactcggtcgctggtgcgcggatcgctaccgggcgttcctgcgccaggaggcgcgctttgtcggctggctggccggacggggtgtgccggtgaagctggcccgcgtactgccctggatattcaggattgtcgctgttctggcgttgctctatctcgccttctggatggccctggtgtttttgggcgtcgcagtgttggcgcatgtatcgagcacagacgccgatcatgatcaggattgggtgattccagaccctgacgagcacatgaagaatccgggctacgatccgaatctctacaacgacccaccagaccctagttactacgacgctcgatacgataaggactag

SEQ ID NO: 355884 - DNA, 456 bp, Pseudomonas aeruginosa
atgctctacgtaccgcgacatttcttcgtcaacaaccacatgggcatcgaggaagtgctgggcgccgacgcctacgccgagatcctctacaaggccggctacaagtccgcctggcactggtgcgagaaggaagccgaatgtcacggcctggagggcgtggcggtgttcgagcactacatgaagcgcctgtcccagcgcggctggggcctgttcgagatcgagcggatcaacctcgaggaaggcaccgccgaggtccgcctgcggcactccgccttcgtctacgtctacggcaaggtcaatcgcaaggtcgattacatgttcaccggctggttcgccggcgccatggaccagatcctcgccgcccgtggcagcagactgcgcaccgtggccgaacaggtctacagcggcgccgaggacggtcacgaagacggcctgttcgtcgtcaaacccctgtaa

SEQ ID NO: 355885 - DNA, 231 bp, Pseudomonas aeruginosa
atgaacgatatcgtccgtcgcgatccacgcgccgaatggatcgcccgcaaccgcctgcatccgctgcatgcggccatgcagtccgcccaaggcggcgaggtgcgctggatgggcccccacggcgtgatccgcaagaacccgcacgccgtcggcttcgtcggcccaacggcatccgccgcatcgatcgctccggcggccagcagggcagcggcgcgcgccgcgccagcgtag

SEQ ID NO: 355886 - DNA, 1107 bp, Pseudomonas aeruginosa
atggtccatgccccccatcatgccgcccatcatgtcgttcatggtcagccattcgaccggatcgagggcaggcacgggagcttgaagaccttcacgcacggccagcgtggcacgcgcgtagcctgtccggtccatcgcctgggcgaagatcgtgtaagcgtcatcccgtggctggacgatcacgtcgacggtttcgccaggaccgaatcggaactcatcgacggtcaccggctccacgtcaacaccatcgacgtgcaccaccgtgagtttcagtcctggaatgcgtacgtcgtagaaggtgttgcccgcaccgttgaccatgcgcagccgcacgcgctcacccggtcggaacagcgccgtccaattgccggcgggggtgacgccgttggccagataggtcagcgtggtggcagacagatctgcgagatccgtcggattcatccgcatctcgttccacatcttgcgcttgtcgatcgcagcggccgtgccttcgcgcgaggcgtcccggaagaagtcgaagacggtaggttggttgtagttgtaatagtcgctttgggacttgagcttgatgaacacccgcatcgggtcttcgtcggtccaatccgagaacagcagcacgtggtcacggtcggcgtggatggtctcggcgccagcggggtcgatgatgatcgccccgtacatgcccgtgagttcctggaagccggagtgcgagtggtaccagtaggagccgctctgctgaaccttgaagcggtacgtgaaggtctcgccgggagcgatgccattgaagctgatgcccggcacgccatccatctgatacggcaggatgatcccgtgccagtgaatggatgtggcttcacgcagcttgttggttacacggattgtgacggtgtcaccctcgcgccaacgcaatgtcggtgccggcagcgagccgttgatggtcgtagccacgcctggcttgcccgtgaagttcacgggcgattcggcgatcaccaagtcgaactcggtgcccttcagcacaggggcggcaccgcgcgtcgcggagccttgctgggcaaatgccttgaacgccggcgtggacagcccagcgagaacgccgccggcggctaa

SEQ ID NO: 355887 - DNA, 513 bp, Pseudomonas aeruginosa
atgtttgcgcgcatggcggctctcgtcgccatcgcagcccccggcatcggctgggacccggtggtcatcttcgtggccatggccgtggctggcggtgttctggggacgttcctggcggcgcggtcgcccgccgacgacttgcccgaacttcagcttggcaacccattgcagctgcgctccgcgctccagttcgcagccttcctggccgcggtgatgctggcaggccgctttcttgccgatcgcttcggggatgctggcgtcatgctgaccgccgctgcctcgggtctggtggacgtcgatgcgatcacgctctcgattggccgcctggtgaccgagggcgccgtcaccgccgcttcggccaccctggccttgttcatcgccgcatccgtcaatcaggtcaccaaacttgtcctgttgatgtcgctgggcggtagggcgctcgcatggagagtgctcccgtcgtacgcggccatggctgctgctggctttgccgtcgccctgggcttgacctga

SEQ ID NO: 355888 - DNA, 1419 bp, Pseudomonas aeruginosa
atgcgcagtaacggcctgctcaagtggctgatgatccctgtcgccatcctggtgctgttcgtcggtatccggctgttctcgggtggaggcagcacggcgccacccgcggcggacaacggcgcccagctcacgcccgaggaaatgaaggcgctgggcatcgaaggcgacaccccgcgcgacaccgtggcgacgctcgttgcccaagtgaagcagttgcgcaccgagcttcagaccgcgctctcggacaacaagtcgcagcgtgaagagaaccagcgactgcgccagcgcgagaactccatcgaccagcgcatcaactcggcgctcgaatccgagcggtccaacctgcgccgcgaccaggagcaggcggccagcgcgcgccagcagaccgaagggctgctcgccgacctgcagcggcgcctggacagcatcggcgggcgcggcggcggccatgcggacctgcccgtgggcctggggctgcagggcggcgacgaggccggcatggagggcggcgtgcggtgggtcgagccggacgacgcaaagcccgccgaggggcgcaacggcggtcgtggcgcgagcggcggaatgagcttccccacgagcttcggcccggcgcagagcacgctcgaaaccaccgcggaaaccgtggccaacgcgggcgcccgcgcctctggggtcaagagtgccaagccggtctataccgtgccgaccaactccacgctcatgggttcggtcgccatgaccgcgctgatcggccgcgtgccgatcgacggcacggtcaacgatccctatccgttcaaagtcctggtcgggccggacaacctgaccgccaatggcatcgacattcccgacgtggccggcgccgtgttcagcggcaccgcatcgggcgactggacgctttcgtgcgtgcgcggccaggtgcgcagcatcacgttcgtcttcaacgacggcacgatccgcacgatccccgaagaccgcgagggcaaccagcagaacaaccagcaacgcgacggcttgggctggatcagcgacccgcacggcatcccctgcgtcagcggcgagcggcgcagcaacgcccagcagtacctcggctcgcaggccctgatcaccgcggccggtgccggcgtggcctcgctcatcgagagcgacagcggccgcatgtcctatgtcggctcggacggctccatcggcaccgtgggcatcaccggccaggaagcggtcggccagattctcgcgggcggtgtccgggacatgtcggcctgggtcaacaagctctacggccaggcgttcgccgccgtctatgtgcagcccggcgccaaggtcgccgtccacctcgaaaaaccgctcgccatcgacttcgatcccgaaggccgcaaggtcgatcaccgcgcaggagaaagccatgctctcgaactcgattaa

SEQ ID NO: 355889 - DNA, 441 bp, Pseudomonas aeruginosa
atgctctcgaactcgattaagggcctggtgctggccctcgccgtcgcggtgctcggcggctgcgccaccagcaaggaaaagctgctgacccacggtgaccgcacgatgatggacatctggcagcaggaggccggcgacggcggtggcgcagccggacggaacgccggccgccagctgctcgatgcgcgccagagcctgcgtcggcccctgaccgacgccgacgtgcaggccgcacctgtcgagcagatgcgctacacgcgcaccgcgcgcaatgaggtccaccgccagttccagcgcctgcccaatcccgatctcgtgatgtacgtgtacccgcatctggccggcaccgatcccgtgccggtgcccggctacacgaccgtcttcccgctctaccagcgcatccagtacgcgatgccgggcgagcgcgtggaggactactga

SEQ ID NO: 355890 - DNA, 765 bp, Pseudomonas aeruginosa
atggaacagaaacgcccatccattccgatgcaggtccaggcgttccgtcgtcggcgctggcagttccgctggccctgggcattggccgcggtgctggttgcgctgctgctgatctggctcgtgtcacgttcgccaggcgggtccacacctcagacttcggcgccagtcagcgacacgcaggtggctgggcctccgtggcagatgggcaatccggaagggcgtttcacgctgacgctctacgcggacctcgaatgcccgttctgccggtcctattttccagtgctcaagcgttgggtggccggcaatgcggacgtgaccttgcaatggcaccacctgccgttggccgcgcatgagccagccgcgtccgccgaagcgcgcctggcggaatgcgcgggcgaagccggcagccatgccgccttttggcaggccgtcgaatgggtctatgcccacacgcggagcgacggccagggcttgcctgaagggctgcgctaccccgacctcactccagcgatcgagcagtgtctggcgagcgagcggcccgatgcaccgatccgcgcccagacggcggaagccacgaacagcggcgtgatcgccacgccatcgctgcggctgcacgatcgcgaaaccggcaaggcgatcctgctgcagggcccgatcgagggcgatgccttgctgtcggccatggacatgctcgcggccggcgatcccgccgccatacccacatcggaaatgcctgccgacgtcgtcggcgacatgcccaggtag

SEQ ID NO: 355891 - DNA, 495 bp, Pseudomonas aeruginosa
atgtctttcgtcgtcaatgactcctgcctggagtcgctttccgccatcgctgcccagcacgaggactggatcatccagcaagccattgcgctgctggagaagcgggttttcaaagcgggtccgaaactcctcgaccccacggccgtgcgcgactacctgcgcgtgaagctggtggccgagcccaacgaaatattcgtcgctgtgttcctggacagcatgcaccaggtactggcctacgagccgctgttcaggggcacgatcaacgcgacttcggtctatccgcgtgtcgttgtgcagcgtgttctgcagttgaatgcggccgcggtggtcttcgcgcaccagcacccctcgggcatttccgagccgtcgagcgcggatcgcatgctgacccagcaactgcaggccgcgctggcgctcatcgatgtgcgggtactggaccacatcatcgtcggccagggtgccccgttctcctttgcggagtccggcctgctgtaa

SEQ ID NO: 355892 - DNA, 447 bp, Pseudomonas aeruginosa; identical to SEQ ID NO: 335748

SEQ ID NO: 355893 - DNA, 951 bp, Pseudomonas aeruginosa
gtgacctatcgcccattcgacctgctgcgccgcctgcgcgtcgccgtggcctcgctgctgctggtcagcgccacgggcagctacgccctgaacaccgtcaccatcgtgtcctccgtcatgtcgccggactgcctggagtaccgggtggtgggcatctgctactggctgtattgcacctatggcggctgctcggtgcgcacgtccaccaaggtccggcactacgtccccgatgcggtcgtctccagctacagcaacaccggagagaacccctgggtcgaagtgcgagcgatgagcatgccgaacgcctcggcccaggcaggcggcgacggcaccaccaacgaagaccacgaaaacaacctcgccaaattcaagaacgccgatgtcatcggccatcccggcggcgaggtgttcaaccagttcgcctcgtcctcgggctatttttgccaaggcgcgggaacggccttcatgccgtatctgctcagcaccttggacacgctggcctggcgctacaacgtgcccgagatggcctacccggaggcgctgatcccgggccggcgcgaggtcggtgcgcgcaccacgatgaacctctggggcaatgtctatccgcgcggcggcttcctgcaccagaccgacgaccacaaatccggggcggtcgtggctcagcgcgccggtgacgtcgtcacgcggcgcgggcagttgcacgtgtaccagccgctgctcgccaacgcgcgtgatggctactggccggccggcgcgctgatggaaggtgatgcctcgaccggcaagtggcaggaactgacgccgcgcctgtcgaacacctgcgtggtgttcccccacagcggcacgctgacccaagcccagcaaggcgactacgcgtgggcgctgtggcgtccgtatgcgtgctgcgaacgccggggccaggtgttcctcggcagcgtcgatttcctctga

SEQ ID NO: 355894 - DNA, 1395 bp, Pseudomonas aeruginosa
atgaagcgtcctgaaccgaagaacctgtccaccaaggcgtgccgcctgctgcgcccgacggcactggccggcacgctcgccctggtctgcggcctggcgtgggcacaggtcggataccagaacagcggccccgtcattggcgatgacgtcatgtactcgatcggcggcggcagcgcggtgtccatgggccgcgcggccggcatgcgctccatcggggtcggtgtggggtggaacagcaacctgatctgcggcgacatgagcatccagaccacgctgcgcaatcagctcaacggcatcacgaacggctttcagcagatcatgagcaacgtaatccagagcgccaccagcgcggtagcgtccctgccggcgctgatcattcagcgcgccgatccgggcctgtacaacctgctgaccaacggcgtgctgcaggcgcggctggacttcgaccgctccaagctgacgtgccgcgccatggcggagaagatggccgagacagcgggtggccagcttggctggagccagatggccgaaggcatggccttgcgtgacgcggttggcagcaacgatgccgtgtcggccgtcgagcaggccgagacgcgccgcggcaacgacggcgtgccctgggtgggtggcagcaatgctggtggcgcaggccagtccgccatccgggtggtcggcgacgtcacccgcgcgggctacaacctggtcaacggtcgtggcgtgacggacacatcctccatcgcgtccgccagttgtgcgagcctgtcctgccagacctggacgtcgccgcagcaggcgaccgaatgggccacgcgggtcctcggagagcaggtgcagcgcacctgcgactcctgcaccaagaccgagacggtgcccggcgtcgggctgacgccgctgatccaggaagagtacgaggcgaagctggaggtccttcaggagctggtttccggcacgcgcactaccacctttgagaacctgcgcgaggctggcagcacgtcgctgccaatcacgcgtggcgtgatcgaggcgctgcgcgacgagccggaccaggaccttctggcgcggcgcctcgcgtcggaggtggcgctgtcgtcggtgctggaaaaagcgctgctgctccagcgcacgctgctcacgggcaagaaggagcccaacgtcgcagccaacgaactcgcggtcaaggccgtgaaccacgagagcgacacgctcgaccgggagatccgcaacctgaagacggagctggagcttcggcgcgagctggcaaacaactcaccgatggccatcatccagcggcacggtacgcgcgcggcaggctcgcgcggcatctacgagggtgatccggtacccgaccgcctcgaccagttgcagaagggcaatccaggagccaggccatga

SEQ ID NO: 355895 - DNA, 357 bp, Pseudomonas aeruginosa
atgagcgcggcgcgcatgacttggcgccccttgcgctggctgttcagccggcgcgcggcgaaggcgctgctgtggacggtgctgatcgttgccgccgcggtcgcggccaacatcgccggcatctacctggtcggcagcgttgccggctgggagcggtggctcgccgccgctgcgggttacttattcgtgtggcggctgtgtctatacggggcgacggtgtacgggtggatctggatgcgccgccggctgctggtacgtgaggacgacgcccaggcgcggcaccgcctggtgcgcaccgagatcgcaggcgtcgtcgccatcgtggcgctggaagccagcctgttgatgcagggctga

SEQ ID NO: 355896 - DNA, 1548 bp, Pseudomonas aeruginosa
atgactctgttcacgaccgactacctggagtattaccttacgctggtgtcctggatcgtcaacaacggcatctgggccgtgctggtatccagcggcgtcttcgcgctgcctttcgtggcgatcatcgtgcaggagtggttgaaggcccgtgcagaaggcgccgacgagggcaataaaggcgtgctgagcgccgcccgcatcgagaaccgggtcttcgtcgccatcgtggtggtgatgttcgcgggcatcccgttcatcgacgtggacctcaacaccatccagtacgacagctcgcgctcggcgcaatgccaggtcagtgtgccgcagccctcgaataccggctggtcgcaatctttcagcaccatcaacaaccagtcggcgaaggtgccggtgtggtgggtgttcatgcacgcgctctcgcgcgccgtcacgggcgcttcagtggcagcgatcccgtgcggcacggacctgcggcagatgcgcatggagatcgacgcgactcgcattgacgacccagtgttggctcaggaagtagcggatttctcgcgggattgctatggggctgcgcgggcgaaattgttcatgcagcggcctcaactcgatgagcagcagctgcacgacgtaacctggatcggctcacgcttcttcacggacacgaacggctactacgacacataccgttccagcaccccgcgcgaggactggccctatgacagcacgcgcgacgcagggcttgcgcaggtggccagcggcggcggctatccgacctgcaggcaatggtgggccgatggcagcaatggactgcgggcacgcttgctgggtcaggtggacccgagcctgctcaatcgcctggcgggctgggctggcttcctgagccgtgccgaggtggacgattcggtgatccgcgcgatcgcgtcaccgcgacagcagaagctgaaccaaggcagcgtctatacggactacggtggccagatcgaaatgaccgacccaaacatcatcacccgggcggcggccgacgtaggactggcggtaggctcgctgggctacttcccctccatggatgcaatgcgccaggctcttccgatggtgctggcgctcttgaagatggcgctggttgtctgcattccggtggtgctcatggttagcacctacaacctgaaaacactcgtgacggtcagcgtggtgcagtttgcgctgttcttcgtggatttctggttccaactcgcgcgctggatcgacagcaccattctggacgcgctctacggatggggctggggatggaaccggccgcatacgaatttcgatccggtcatgggcctcaacaatgccttcggagacatgctgttgaatttcgtcatggcgacgatgttcatcgtgctgcccttgttctgggtaaccgccttgggatgggcgggctacgccgtggggggcatgttgcaagggcttgctgctggtacggcaggcgccaaagcggccggcggcaaagccgccgacatggcctttggcggcgctatgaagtgggcatcgacacccagcaagaggaagtag

SEQ ID NO: 355897 - DNA, 360 bp, Pseudomonas aeruginosa; identical to SEQ ID NO: 335749

SEQ ID NO: 355898 - DNA, 633 bp, Pseudomonas aeruginosa
atgagccacgagctgccttcgttcctgatcgatgccggtgaactgctccagcatgtgagccgcgtcgtctatcggggcagcccgctgtactatggccgcagcagcaccaatcgctacgatgacccggcgcgggcctacggcgtgctctacctggggcgcgacctgcccacggcgctgatggagtcggtgtttcataagcaccagtggcttgcggacacgaagcgctcgatcgcgctgaaagaagtccaggcccggatggtgcgcgcagtaggcgtgatggacgatgtgctcttggccgacctcacggcgccgggcgtcatggcgggctacttcggcctgaacctggagcagttggccagccgcgactacacgcacacgcagcaagtgtccgcccaggtgcatgcaattctcggagacgacggccaagcgctgttcgacggggtgctctatccgtcgcgcaacaactatcccgccaagagcatcgccctgttcgagcgtgcggcagcaaaggtaggcgttgtcgatgacatcgacctggtggaccatgtggactggccgcacttcgttgccacgtatcgcgtcgacgtggagcctgactccggcccggtggaaccggatgacgaagcgtcatga

SEQ ID NO: 355899 - DNA, 627 bp, Pseudomonas aeruginosa; identical to SEQ ID NO: 348281

SEQ ID NO: 355900 - DNA, 831 bp, Pseudomonas aeruginosa; identical to SEQ ID NO: 355871

SEQ ID NO: 355901 - DNA, 273 bp, Pseudomonas aeruginosa
atgatggccatcggggtggccagccccagcgcatcagggcatgcgatcacgaacacggtgatggtcaaggtgagtgcgaacagtaatgtctgtcccatcacccagtaccagacgctgaaggtcagcaggccaatcacgatcgccgccagcaccagccactgggatgcgtggtcggccagcagctggccgggggccttcgagttctgggcctcctggaccagcttgacaatctgcgccaaggccgtgtccgcgccgaccttcgtggccttgtag

SEQ ID NO: 355902 - DNA, 243 bp, Pseudomonas aeruginosa
atggaagatggacttcacaccggcagcgtcgtacgccctcttgttgaccgcggcgactttcttgggtgtgcaatcgaccacgacgtccgcgttggcgagcaggtcggccagatcgcccgcgacaggaagccccgcagcacgcatcgattgtgcggcttcagcggtcgccgcgtaaatcgggaaagcgcgctgcgcggccacctgcaggcgatagtcgtgcaccacatccgcgacgccggctag

SEQ ID NO: 355903 - DNA, 822 bp, Pseudomonas aeruginosa
atgccgacggcggtcaccgagaacttcaccaacatcgatgggcaaggcgcacgggccactatcgggggcgagacggtgctcctgggcaaccggctgctgatgcagtcggaacaggtggatctggccccccttgccagcgaggcggcgcggctgcaaggcggggggcgcactgtggtccacgtcgcgcgcggtggccggctgatcggcctcatcgcgatcgccgatgccgtgcggccgacctcgcgcgagacgatcgccaagctgcaggcacgcggcgtgaaggtcgcgatgctgaccggcgacaaccaggcgaccgccgagcgcatcggcaaggaactgggtatcgacatcgtgcttgcggatgtgttgcccgggcagaaggcctccaagatcaaggaactgcagcagcagggtcacaaggtcggcatggtcggcgacggcatcaacgacgctccggcgctgacgcaggccgacgtgggctttgcgattggcgcggggacggacgttgcgatggaaagcgcccaggtggtgttgatgaagagtgacccctacgacgtggtcggggccatcgaactgtcccgggcgacgctgcgcaagatgcaccagaacctctggtgggccgtggcctacaacgtgatcgccttcccgctggcggccggggtgctgtatccgttcaccttgtcgcccgaggtcgctgcattgtccatgtcgggcagttccgcgatcgtcgcgatcaatgcgctgatgctcaagcgcacgcgcctgccggggatcaagcgcgtgacgtcgcgtgtcagtgtcccagcggccgcgtcagcctga

SEQ ID NO: 355904 - DNA, 1038 bp, Pseudomonas aeruginosa
atggcgtattctattatcagagttgctaaagtaaaatcaaaaacgaatacaaaaggtattcaaaaacatgtacaaagacaaaataaaaattatgaaaatatggatattgatttagaaaaatcatacttaaattacgatttagtcaatgatagtccgattgattataatcaaaaaatcgatgagaaaattgaacaaaattataatgggaaacgcaaaattagaaaagacgcagtaaaacatattgatggtttaattacatctggtaatgaattttttaaaaatcaaacacttgaagaaacaaagcagttttttgaacatgctaaaacgtttttagaacaagagtatggaaaagataatttattatatgcaacagtgcatatggacgaaaaaacacctcatatgcattatggggtagttccgatcacagaagatggtcgattgagtgcgaaagaggttttaggtaataaaaaggcactaactgaatttcaagatagatttaacgaacatatcaatagttgtggttatgacttgagtagaggtataacaaggggtgttacaccgagacgacatgagcagataagtcgttataaaaatttaacagattatcacaaagaagaatatgagcatgagagccgaaaattagaccgtataaagcaagaaagcgaagaagtaatggaacagtatcaaaatgctttagatgttctaaaaaagcctataaatgtctcatatgagcttgaaactgaaaaagttggtggactgttcaacaaagaaacacaggaaacaggtaacgtcgttattgataaaaatgaatttgatttattgcaggaacaagtaaaagcttctcaactcattactgatgattatgaatatattaaaagcggaaaggctttaaaagattttgaggaaaaaaacaaaagattagaagatagattattagacgaacagattaaaaatggaaaagtaatagatgaatacaatgatttagcggatagttataataatttattggaacaaaatcaagaaaaaaaaaagagttaa

SEQ ID NO: 355905 - DNA, 1686 bp, Pseudomonas aeruginosa
  misc_feature (1630)..(1639): n is a, c, g, or t
gtgctgttcaaccatcagagcgagatacgctcggtgacgcccgaggttcagttggaggacctgcgtctggaaggcctggcctgggacggccagactgcgcagttcgacctgacgctggatattcaggaagacgaaaacggcatctgggcctccttcgactatgccgccgatctgttcgacgcctccaccgtggaacgcctggccggccattggcgcaacctgttgcgcggcatcgtcgccaacccacgacagcggctcggcgagttgccgctgctggatgcgccggagcgccggcagaccctctccgaatggaacccggcccagcgcgagtgcgcggtgcagggcaccttgcagcagcgtttcgaggagcaggcgcggcaacggccgcaggcggttgcgctgatcctcgacgaacaacggttgagctacggcgaactgaatgcgcgggccaatcgcctggcgcactgcctgatcgcccgtggcgttggcgcggacgtgccggtcgggctggcgctggagcgttcgctggacatgctggtcggcttgctggcgatcctcaaggccggcggcgcctacctgccgttggacccggcggcgccagaggagcgcctggcgcatatcctcgacgacagtggggtacggcttctgctgacccaggggcatctgctcgagcgcctgccacggcaggcgggggtggaggtgctggccatcgacggactggtgctggacggctacgccgagagcgatccgctcccgacgctatcggcggacaacctggcctacgtgatctatacctcgggctcgaccggcaaacccaagggcacattgctcacccaccgcaacgcgctgcgcctgttcagcgccaccgaggcctggttcggcttcgacgagcgggacgtgtggacattgttccattcctacgccttcgatttctcggtctgggaaatcttcggcgcgctgctctatggcgggtgcctggtgatcgtgccgcaatgggtgagccgttcgccggaagacttctaccgtctgctgtgccgcgaaggcgtgacggtgctcaaccagacgccgtcggcgttcaagcaactgatggcggtggcctgttccgccgacatggcgacgcagcagccggcgctgcgctacgtgatcttcggtggtgaggcgctggatctgcagagcctgcggccgtggttccagcgctttggcgatcgccagccgcaactggtgaacatgtacggcatcaccgagaccacggtacacgtaacctaccgtccggtgagcgaagccgacctggagggtggcctggtcagtccgattggcgggaccatcccggacctgtcctggtacatcctcgaccgtgacctgaacccggtgccgcgcggcgcggtgggcgagctgtacatcggtcgcgccgggctggcgcgcggctacctgaggcggcccgggttgagtgccacccgcttcgtgccgaacccgttccccggcggtgccggcgagcggctgtaccgtaccggcgacctggcacggttccaggcggatggcaatatcgagtacatcgggcgtatcgaccaccaggtgaaggttcgcggcttccgtatcgaactgggtgagatcgaagcggcgctcgccggcnnnnnnnnnnctcgccggtctggccggggtacgcgatgccgtggtgctggcccatga

SEQ ID NO: 355906 - DNA, 1353 bp, Pseudomonas aeruginosa
gtggtgctggcccatgacggagtcggcggcacgcaactggtgggatacgtggtggcggactcggcggaggatgccgagcgtctgcgggagtcgctgcgggagtcgctgaagcggcacctgccggactacatggtgccggcgcacctgatgctgctggagcggatgccgctgacggtcaatggcaagctcgaccggcaggcgttgccgcaaccagatgcgagcctgtcgcaacaggcctatcgagcgcccggtagcgagctggagcagcgcatcgcagcgatctgggcggagatcctgggagtggaacgggtcggcctggacgacaacttcttcgaactgggcggtcactcattgttgctgctgatgctcaaggagcggatcggcgatacctgccaggctacgctgagcatcagccaactgatgacccatgccagcgtcgcggaacaggcggcatgcatcgaggggcaggcgcgtgagtcgttgctggtgccgctcaacggcaggcgcgaaggttcgccgctgttcatgttccatccgagtttcggctccgtgcactgttacaagaccctcgccatggcgctgcgggatcgtcatccggtcaagggtgttgtctgccgtgccctgctgggcgctggtcgcgaggtgccggagtgggacgatatggttgcggaatacgccgagcaattgctgcaggagcaccccgaaggggttttcaacctggcgggatggtcgctcggcggcaacctggcgatggatgtcgcggcccggctggagcagcgtgggcggcaggtggctttcgtcggctggatcgatgcgccggcaccggtcagggtcgaagcgttctggaacgagatcgggccgacgccggaggcagtcccgaacctatccgtgggcgagatgcgggtggaactgctcggtgtcatgtttccggagcgggccgagcatatcgaacgggcctggtcatcgatctgctccgccacgacggacgatgagcagcgctggacgaggatgagcgactgggcggaagcggagatcggcgccgagttcgcgacactgcgcagcgaaatcgcacagagcaacgaactggaagtgtcctgggagttgaaacagatcctcgacgagcgcctgaaagcgatggattacccgcgtctgacggcgaaggtcagcctctggtgggccgcgcgcagcaccaatgccatccagcggagcgcggtggagcgctcgatggccgaggcgatcggggctgagcgtgtcgaaccggtgcgggtgctggatacccggcacgacaagatcatcgaccaccctgagtttgtgcagagcttccgggccgccctggagcgtgccgggcgttga

SEQ ID NO: 355907 - DNA, 660 bp, Pseudomonas aeruginosa
atgaccgaccaggctgatgcccttggcgatcacgtcgacgctcacggtgaccttgccggtaacggtctggttgccggtctggatgtagtcgccttggtgggtgatgtcgccgacgatgcggatgccgccgtcgctgatgagctcggtggtaccgccggcgggaagaactgcgcgcaggtggtgggctgcgctgtcgtactcaatcaccgcgccgtcgcggtaggtgatgcgatgcagggcgtcgcggtcgccgttgggcgggatcaggtcactgaacaagccggtcaggaccacgccattggcggtctgcccggatgggctgaagagcagtacctgctcgtccagggtgggggcgttccattcgcggtcggcgccggcccgcggcgatgcccagggcagccagccggtcagcaggtcaccggtcaacacacggacgcgctgcgcggcatggtccaccgcggcgatggtgccgaggcggatcaggttctcgatcatgcgggagagggcggcgaagtcgttcatgccgccgatagtgggcgacgcgcgcgcgggaggcagccagcggcgtttgtagcggccacgtgtacatgctcaggctggaatgtgagcgagcagcccctcacggatcatctcaaggtcggcttcggtgaaaccgagtag

SEQ ID NO: 355908 - DNA, 1140 bp, Pseudomonas aeruginosa
atggcaggtgtaaatagaagagcaattcaatatgtacaacagttagaccatttgaaatttgatagtgtagatttattattggaaaatattgatgaacatattagagaaaataatttagattatgattatgcatgtatacttcatgataaagatatcgatgatgaaggtaagttattaaaaccacatattcatatacagttttattgtgaaaacaaattgtcgtctagagaattgaaagctatgactaaagaatctaatatgcactatttcgagtatatggataataaaatcgaaagttttaaatatttaatacatgcgactaagaatagtgaatctaagtatcaatattcgcaacatgatgttaaggcaaattttgattatgttgattatattcaaaatgcacgttctgaatctgaaaatcttgattcaacattaagagatattattgatggtcgaataacatatagagatatagcaaagaataatcaattgaatcttgagtatgttaagcatcgtcagaaatttgataatgcgtttcaaatcgcattagagaaaaaatctcaaaccgatgagggaaattctgtttcaacaatatggattcattcaaaaatgagtggtattggaaaaacttatttagctaagcagaaagcgaaagagtatattgaaaatgttggaaaagaaatgagtatttatcaaacgagtgcaggcaatgacctatttcaatattataaaggtgaagaaattatcataattgatgattttaggagttctgatatttcgtatcatgaattgttgcgattattagaccctcataattcaaccagtgtgcgttcgagatatagtaataaagtgataactgccgatttaattattattacatcgatgttatcgccatttgattattacgctcatgttgttgatttaatgaatcaagataatgaaccaattgaccagttattacgtcgtttaacttatgtgttggaattatttagacctgaagagtctaataagaaagaatatctatctacgttttatgtatatagtacattgaaagacgatagaatgaatgaaaagattttaggatataaagattatccaattaaatatacctatgtatttaaggaagaaaaaaagagatga

SEQ ID NO: 355909 - DNA, 384 bp, Pseudomonas aeruginosa
atgaaagatattcaagaatttattagtattagtgatgagtacttagacgcaattgaggatatgcaatggaaggttacgcccgtcggtgcgtacaacgataaagaagagataatagatgcagtgccaacatttaaagacggtaaacctgtaaaagactcagtagattattataaaatgagattagtagcaacaaaggaatcagatgtgattttagaagatgatgaaatttatgtgctatcttatacgatggataagttcaaagatttagagcgtagagatagagtgaaaattatgcttgatagagatgcgttagaaattaagcttggtaaattcgatttgaatgtaaaatactttgttagcgacatctcgaaagtgggcatttaa

SEQ ID NO: 355910 - DNA, 1110 bp, Pseudomonas aeruginosa
  misc_feature (1092)..(1101): n is a, c, g, or t
atgctcaaaagaacactactcagcgccgctgtagcttcggcactgtttgctggagtcgcgaacgctgccggagtggttgctattgccacaagccccactctggaggcgaactcgcctggtgcaaccgagcagtacggaccaggacaggccaactatgtcgtcggcaagagtgtggaaaatggtgccaacctcgacagcaaggcggccaacatcaccctggctctacccagcgttacctacaccatcgatccagtgaaggctggaaatgccgctgcgggccacaccatcaagctgacccttggtcgtaccgtcgtgcgcttcgccaaggccgtgaccgccaaccagatcaagatcggcgccctggcggcgggtagcggcttcgtcatcaccagcggcactggcgccactgacaacacgcttgagctgcgcctcgaccaggcgggtgccgacatgatcaagcagaccgcgaccggcggcaacgtggtgttcttcaacttccgcgagccgagcagccaggacagccagcctgccaaggtcaccaacatgcgcgctccgcttcagggcgatgccaccttcgtggctggaagctggaatccgaaagtgagcctgcagaacgacccgctgaacgaattgcgtttccaggtcacggtttccgcccagttcgataccaccactggcgccgatgccggcaaccctgcgaataacgattctgcaccgcccctgaccattttcacttcgctgcccgcggtttactgggacgttctcaacaccaaccagtatgggcagaatcgcgtcctgcatccgttgaacctgaacaatcaggatcgctccttcgataccacggtgtccgtcggtggcgataacaccgattattatggtgccaactatgcgcgtctgggcgccgtacggctcggcatcaatacggatgtgctcaacgaagcgggtcgaaccgtgtttggtttcgccggtggcgacaaggtgaccagcaccctgtcgggtaacttcaacgggatcagcgacatcggcctgaccaccgggaactgctccgcctttgccgccaatccggggtctgccgccaagctctggaattcnnnnnnnnnnaaggtgtag

SEQ ID NO: 355911 - DNA, 654 bp, Pseudomonas aeruginosa
gtggatgcgcagggcaacggtactttgccggtatcgttcgacaactcgaatatcaaccagacctacaacgtctgcgtgaaggcttccggcaccgtgccgatgcaggcgctgcaacgtttcgacgtgggtgatctgaaggtcgacttcgagaacgtacgctatgtcgaccgtaccattgcaggcaaccgtctcgacgagttctggaagaacagttgcgtcgccagtctgttcaatctgcctggctccaatgtttccgaccagttcttcattcgtctgaccaacaccagcgacgatggtcgggacggcaaggtgcgcggggtactgttcgaccagaacggtaagcgttatccggcgactggcagcacctacctgaccgactcgagcgggaagaccgccctgaaagcgcacgaaaccggtgtgtacaccgtaaccgaagtagccaaggccttcggtatcgacggcaccaactggaacggtgccaacggtcgcgcacgtctggtcctggaaggcgagttcccaacttgcgaggcgctcggcctgatccgctctgccaatggcaccatcaccaacatgacctccaccacccaaggcaacttcaacgaagatggctcgtccacctcggagaaccacaaggctggtaacaaccgcaactaa

SEQ ID NO: 355912 - DNA, 1287 bp, Pseudomonas aeruginosa
gtgatccttcaaacgactaacgttgtcggcatccgcagccaggaaaatcagccggttctgcttttgacgcggctgctcgcctcgacttttaaggatctccaacgccttgttcagcgccgcattcggcccggttttgctgtaaggcgaatcaggcgccagcactaccagacgcaacgtccagtcatccggtacatctgcactgccggtaaaaacgtgcacaccaccaaaacagccgcccaggttgttgagtcgctgacgcaaggtcgggaacacatcctcacgatccttgaagcgcttcttgcgctcctccatctcgcgacgcaggttcgggcgagtgtcgaaccagtaacggctgttggcactgttcaagtaatgcagcttgtcacccaagcggcgcagtgcatcttcatacaggcccagttgctgctccggctgagcgctgcccagcagcacgcgctccagctcgataccgcgaaccaactggctggaggtggtcggcgcactgccaaggaagatcgtacgtgcagttcgacggcaggcatgcacagccccaaggcgtgcatcatggttctcgatggcgacggtttcggcgcgcggcccgtcgatatcccgatccacgactggatcccagcctgccggcaggtaataggtgaactcgttgcgggtgtcagtatccgcaaacggcaggctgccggccatgatcaatggatcgttgtttccgtctttccacaggctatagatgatcttggccatcatcttcagcacgccacgggtacgctggaagttatccaggctcgaccagtcgtcatagagccggtcaaacacctcaggatgaatgggataagcctgcttcagacgctcgtagtaatggctttcctgggtttcagacgggaacttgccgctatgggcaatgtagaaatccgcgaactgacggcacacctgttcggcagccaattggtcattgattcggctgaacaagcgacgacgaacgatttcgaacgcctcctccgtcgccaccggtttccaaagcgcctgcacacgaccgaagtagtgcgacagcgcctccaaggcacgcacgccacgctggcttccagcttctttttcggactcaggcagcgaggccaacataactgccttaggcacagccttgagcgcctcggtcagcgcctggacaaaagtcaggttggagtcgaaggttccgccggccagcgaaacgccttcctcgaactggcggatataggccaccagttcgtcgacaaggatgacgcaaggtgcataacggcttag

SEQ ID NO: 355913 - DNA, 1062 bp, Pseudomonas aeruginosa
atgccccgcctttccgccctgctgttcctcgccctcgcaccctggctggcccaggccgaggagaccctgcgcgtctacaactggaacgactacatcgacccgcaggtgctcgagtccttccagaaggacaccggcatccgcgtcgagtaccacaccttcgccaccgccgaggaactggacaaggcgctgcgcagtggcgaggcgatcgacgtcgccgtcccctcccacgacaccctgccggccctgctgaaggacaacctgctgcggccgctggacttcacccagctgcccaaccgcagccatctcgaccgtcaattgctgagcaaactggccgcggtcgatcctgacaatcgccacgccgtcccctatctatggggtgccgtaggcctggccatcaataccccgcaggccgaagccgcctatggcgggccgctgcccaacagctggagcctgctgttcgacgccagccagagccagcgcctgaaaagctgcggcatcagcctgctggacgcgccggacgaaaccctggcgatcctcctcaactaccagggccgcaacctcggtcgtactgcgccgagccaggtacgccgcgccgccgaggcgctgcacggactgcgaccgaacctgcgctacgtcgacagcgagcgctacatcgccgacctcgaaggcggtcgcctctgcctggccatggcctgggtcggcgacgccctgcgcgcggccaaggcgggccagccggtaagtttcgaggtaccgcaggaaggctcggtgctgttcatcgacaacctggtgatcccggccggcgcccagcatccacgcgaggcgcaccgtttcatcgactacctgatgcaaccgaagatcgccgcacagatcaccgccgccaccctctaccccagcggcaacgccgacgccgccggcttcctcgatcccgccctgcgccagcaaccgggcctgtatccggaccgcgacaccagccgccgcctgttcgccctggaaacgccgccggaaaaactccggccggtggtcgacgagatctggaaggccttccgcggtgccagccactga

SEQ ID NO: 355914 - DNA, 546 bp, Pseudomonas aeruginosa
gtgttccgcgctctcacgatccagctccgcctccgcaagcgcgatctcggcagccagaagatccgactctggattgcgagctgcctctacgccggcagcgacctcccggcgggtacgctcggcctgctcaatacgttcttcgatatatttcagccgctgctgtccggcgaccacttcaatgaagcgcgtggcggtcaggctggccagatcaatccgtaccgtatcggcccggtgctcctgctcgcgaacctcggcccgaccgagcgtctggcgggcttctcgcttgccgccaagttcaatgacccgaccgatacgcaatgtcgtttcagccgaatcggctccgctcaggctgccggtgccagcgacattttccacctcgccaccgatggtgtaagacggtggcaagccctcgcgatccgcacgggcttgcacggcctggagctgagccatttcggcgacgacggagggatgagcggccagcgcgcgcgcgacggcatcttccaatcgcaacgggtcagcggcgtgggccgcggacgtaccgcataa

SEQ ID NO: 355915 - DNA, 966 bp, Pseudomonas aeruginosa
atggcgaacacaaatttagataagtttctagtgatagaacaaatgatggacgaggcacagggattaatggagccgtatttaagcagtttagagcaacgttatgagtatatgaatgtgttgagaaaagaatatagtaatctatcgcatacactaggcaagatacagcaacgtgtaatcaagcaaggtgataagctcgaagtagacgcagacgtaaagaatgtagcacaaagtgcaagagaccgaatagacgagcatatagaggcgatagaagaagataaagcagatggagataatcaaccatcggttaagcaattaaaacgtgctagagaaaagttagacggcgaattagacgaagacagcataggagaagcatggcgattgttgaaagttcgaaaaatagaaatcgaagagttaaatgtgcttatggacttaatcgacgctatggaagacggtaaacaagataaagcagagagtattgttaaaaagattgaaaagctaagaagtgattatacaagtggctttgtacgctatagagaagcattagagcaaggagaagacgtacaaaaagaagttgataatgttatcggcgatttagaagatagtggctatatacaagaggctgagagccttacagacgcaagacctagtattgcagaagaaagaggattaagacctgacgcacaaccgcttctagaccttttaaaccctattaagagtgcaggtttagagtattttcaaagtagaaataggaactcagcatcatatgatttaaacgttgcgtttgcgaaagaagttgcttatacaagaagagcgttattagaagaccgtgaatatatcggtactagaaacgcatttaaccgtttaaatacggcgtttgaggagctttcaggctatatgtacgaccgtttttatcaactaggaggcacaccagtaaattatcacggacatgatgatagagttagataa

SEQ ID NO: 355916 - DNA, 990 bp, Pseudomonas aeruginosa
  misc_feature (761)..(790): n is a, c, g, or t
atgtggcgctgggatgactttctgaggcagccggtcgtcaaggggcgcgtcgccgcgctcccgaccagcggccaggccgagggggacacgtacattttcactggctccggctccaatcagaaccgcctggcgcgctggtgggcaacgggtgcgaccacggctatttgggagtacatgccacccaggctgggctggcgtgttcaggttgcgaacgagacgacgccgagcgggcaggtcaagacgtatgagtattccggcagcgcctgggtggagctggtgggcggtatgtcggacgcgcccagcgatggcagcaactacgcacgcaacaacggggcgtgggggaagcttggaaccgctgccgtggcagacctcaacggcatgccgtttctcaatctgatgcccgacagcggacgattcgccggcatcatcaatccgctgattctgcgcttcactgggtcgttttccagcacgttcctctcgccgtggaacggggcgacgattacggacggcgggaagtatatttacgacaacaccacaaacggcgggacggcgggcaacatcaaccagcgcgtccaagatttgctagtggcgatggggcggccgagcggcagccttgcccgctacggggtggagttctataccgccctggtgacagcagggccgaacgcgacaacgggttcctctgggctcgacgggactacccgctatcttcaaatgaccaacgtatcgcgagcgctgttcatcgccgatggatggagtannnnnnnnnnnnnnnnnnnnnnnnnnnnnnaggtactaacccccgctgatgggtggaagcatgtccgtctttcgaagcgatccgcgcaagggtacgacaacagctttccgtacttctacatgactctaggcggggttgcggctatggcgtgtcccgctttcttcggggggctagttgaccccggaatccacttcgcgcccattgcaacagtcaactcacagagcgcatga

SEQ ID NO: 355917 - DNA, 333 bp, Pseudomonas aeruginosa
gtgctcgcgaccgtgaccgagccggtcgtaccgcctgcgcaggtgcccacacgtaccttgggaaaagcggtggccaccgctgagacacctccgccgaagaccgccgaccagcagttggatgacgcgctccgcccgaccaccgaccgatggatcgaccaagtccgtgcgctggtgcagagtgcatccagcctggatgaaatccgtgatggcctggagcaactgcttccggacatgaccctggaacagtacgcagatgcgatggcgcaggccctggccgccgcggcgctacaggggcgagtcgagatcctgcaggaggtggccggtggcgcttag

SEQ ID NO: 355918 - DNA, 639 bp, Pseudomonas aeruginosa
ttggccccccttagcgaccagaaccgccacaccttcggcgaggacttcgcgcgccgcggcgacctgaccgtcttcacgcctttggcgatctcgccgaccctgcgcaagcgcgtccccttccaggtcgaactacggaacctcacctacgaagcccagcgcgacatcatgcgcttcatctgcgatcgcctgccgcgactcagtgggctggccttcgacgccaccggcaacggcggctacctggccgagcaggctgcgctgaagtacggcgccgggatggtcgaccaggtgcagctcaacctggcctggtacgccacctggatgccgaagctcaagggcgaattcgaggcattcaacctggagatcccgcggcaccagaccgagctggatgacctgctctcgatcaaggtcgagaaaggcatccctgtcatcgacaaaggccgcaccaaggacttggagtcagccagcggcaagggcaagcgtcacggggacgccgccatttctttggtcatggccgtccgagccagctacatggagggtggcgagatcgccttcacggcgctgccacgccatagccgcggcttcgacaacgtccaggaccacaacgatgacattgaactaccggagccttccgcatggtga

SEQ ID NO: 355919 - DNA, 675 bp, Pseudomonas aeruginosa
atggtgatgcagacgctacgcgccactgtcgcgcgcattttcgggcagcagagcatggccgatgctgacctgaaagaagcccagaccgcccacctgaccagccttcaccaggaagtcgctggtcacccatcccgtggactcacgccttcaaagcttgcctcgctcctcgactccgccgagcaaggtgacatcgtcgcccaatatgagctgttcgaagatatggaggagaaggatggccatatccacgccgagatgtccaagcggcgccgcgcggtggcccagttggactgggacatcgttccacccgacaacgcgacagctaaggagaaggaagctgcggcggccttgtacaacctcatgcaaggcctggacgactttgaagaggtaatcttcgataccaccgacgccatcggcaagggcttcgcctgccaggagttcgacggctggcaacgcgttgatggctccccaaggcgatcatccatcgtccccagtcatggttccaactaccgcgaggcgttcggcaagagatccggttgcgtggtccgtcgggagggacgccgttgcaacccttcggttggatcacgcacgttcataagtccaagagcggctatctggaacgctcggctctgttccgtgtcctggtctggccctacctgttcaagaactactcggtag

SEQ ID NO: 355920 - DNA, 816 bp, Pseudomonas aeruginosa; identical to SEQ ID NO: 320959

SEQ ID NO: 355921 - DNA, 339 bp, Pseudomonas aeruginosa
atggccagcctgctggtggaagagctaggcgagaacccagacgaacgtgcaggggcgctcttggtgcaatccatcaccaccttgacgacccatgcggccttcgctgcgcagaacgaggacgaggtcgacatcgaggatgtccgcaagctggctcgggcagccaaggatgtcctgcaggcccgcaaagccagtatggaggagcgccgccagatcgagcgagaagcccgcgagaagctgctccaggagcaggagcagcgcttggaagagcagcgtggcagcgacgggatgagcgagcagctcgaaaaccggatccgcggcatcctcctggggaaagcctga

SEQ ID NO: 355922 - DNA, 498 bp, Pseudomonas aeruginosa
atgttgcttgatcttctccagcgtgccttgacgctgttcatcgccggtttgcggcggcgcgggctgattggtgacatagaacaccgcgtgtgcggtctggacggcacgttcaatctcgctgagtaccaggccttccttaccttcgataccgggcacgtccaacagggcgaaggggtagccgttcagctcgaggtcataacgctgtgtttgacgggtgaagtcggctctgccgtcgccgatgattccaccgtcagcttgcctctccagttcagccagcagttgcgccagctgactttcattttccagacgctgtttcgtcaggagctgctgatgttgcgtcacctctgcctgttgcgcgacaagcgctgcattggcgctgtcccgtgccatcacgatttcgcccaattgccgctccaggacaagccgctcctgctcggcccgctgttgttcggcgtccagggtcgcggaggtactgtcgcgtgtcgccgtggccgctga

SEQ ID NO: 355923 - DNA, 321 bp, Pseudomonas aeruginosa; identical to SEQ ID NO: 330183

SEQ ID NO: 355924 - DNA, 207 bp, Pseudomonas aeruginosa
gtgctcgacggcatgagcgacaaggactggagcgagcgcatcggcaacgccgtgccgccacacgcagctgaggccatcgccgatgtcatggccaccaccctgctgctggccgagcagggcgagaccttcaggctcagcaacaccccaatctgggtgcgcaacgtggcggtggcgttgagcgtttcacaacccgctgaaagtcgctga

SEQ ID NO: 355925 - DNA, 855 bp, Pseudomonas aeruginosa
  misc_feature (806)..(815): n is a, c, g, or t
gtggccgagaccactcacgactgcggcgagctgggaggcctggcccagtcgcgcaagcgcttcctgctggtcgcccgccacgtcgagaaggtgccgccgttcctgtacgagccagagaagaagagcctgcgcgccgtgggcgacatcctcggtcgcatgccgctgcccggcgacatcgaagccgcgggcccgatgcaccgcgttccgtcgctgcagtggaagacctgggtacgtctggccttggtgcgcgctggcagcgattggcgcagcctgaacgacctcgccgtcgaggatggacacctgcgcgacctagtgatcgtgccggagtgccggtccggctacatgggcgtgcatgggtgggacgacaccgccggcaccatcgccggccgctccggccccaccaatggagcgttctcggtcgccgacccgcgctaccgccaggcttcgaactggaaccacggccagcagttcggcgtgatccgctgggccgagtcgtcgccgacgatccccggacagaccatgccgggccaaggcaccttcagcgtcgccgacccgcgccccaactggaaccgccacagcggcaactatcgggtgatccgctacgaccaacctgccggcacgatcatcgccggcggcaagggcgtccagggcggccagcagtcggtggcagacccgcgcatcctgcaccgcggcaagggcgacaactacctgaccggcggccactacggggtgatcggcttcaaccagccttccggcgccatcgcggccagctcccgctacgacagcggccgattcagcgtcgctgnnnnnnnnnngtcgctgacccacgcatcccatcagcggacgaacgcctga

SEQ ID NO: 355926 - DNA, 1065 bp, Pseudomonas aeruginosa
atgcagttccggcgctacttcggctcgcggatcttcgccttcgacatggggcgctcgatgcgcgccaccatcctcggccttggcggtgagcactacgacctcggtgccgatggcggcatcgccttccagccactcgcgcgaatagcccacgagggctaccgcacctgggccgccgaatgggtggagggccggctgctgcacgaaggcgtgacggtcggcccggacgagaaggctgccatttggtcggcgctgcgaagccttgccggtgcgccagtggagcagcgcaccatgaccggcttgtcggtgttattgcagtccaacgcgctgcgccaagcgctcgcgccctatgtgttgggcggcgcccacggcaagctgctggacgctgaccacgaccggctgggcatggccgacgtgcagggctttgagatggaagaactgatgcacagccccgccgccgtgcaagcagtgctgcgctacctgttcgcccgcttcgacgaacgttttgacggcgcgcccacgctgctgatcctcgatgaagcgtggctgttcctagatgacccggtgtttgccgcgcgtatccggcaatggctcaagacgctcaggaaaaagaacgtcagcgtcatctttgccacgcagtcgctggccgacatcaaggactcgaccatcgcgccagccatcatcgaaagctgcgcgagcaggatcttcttacctaacccgcaggccaccgagccgcagattcgcacgatctacgaaggcttcggcttgaacagccgccagattgagatcgtggcgaccgcacagcccaagcgcgattactactaccagtcgcgcctcggcaatcgcctgttcgacctcgacctggggcctgtcgcgctcgcattcgcgggcgcatccacccctcaagaccaacgcgatattgaccgcgtgctgacgcaggccggcgctcccggcttcgccggcgcctggctgcgccatcgcggcctcggctgggccgccgacctgctgccgtccgctccggcggcagcttcctttctcgcttctcaaccgctggaggtttcaccatga

SEQ ID NO: 355927 - DNA, 858 bp, Pseudomonas aeruginosa
atggacgagcccggactcctccaggtgctcgtggccggtgaagccacgccgggtggaggtggcggtgggttggttgccgttgtccttccagtcagcgccacggtgttcgccgaacgcggcgaaagactggcgttcgctgacggcaccgttggcgtcgagcaggatttccaccgagccgagcgcatcgcgcagcaggtagagctttttgacggcgcccccttccttgcgcaggatcaggtagtcgccgacgtaggcgtcctgccaactgcgcccgccgtcgttgacctcctcgaaacgcccctcgtccaggtagacagaggtgcgcccatccaccgtctgcaggtagcgcttgcgctcgggatcgtaggagaagcggctgaggctggaacctgcggaaatttccacgggtttatcgaacgatgcgtacttgacttgtcgccccggcccgctgagctggttgccgcgagcgtcatagcaatacgtcccggcgctggtgccgcgcacggcgtgcggtccgggctgggccaccccgccgcgaccagcgcagagctgctgctcggcgctcgaatagctgccgtagcgataggcgccgacaccgctcttgccggtcaggttgcccagggcgtcgtaggtaaagtcctggaccacctgtgtgccatccagggtccgcgcgctgcgcaacagtcgattgaggtcatcgtagctcagcacttcgctgtagccgcgggcgtcgctgcgctccagcaggttgccgaggccatcgtagcggtagctcaggctctgcaggacactgccgcccttgctcgcctggatgcgcgtcaaccagccggtggcgggctggtagtcgcgctggcttag

SEQ ID NO: 355928 - DNA, 576 bp, Pseudomonas aeruginosa
gtggctggagtaacccttgaatacagcagtgagaaggtacttgaggcgctgagggcagccgctgatttcatgcgctccccggccccgatgttccgtgatatgggcgagtacatgctcatcgccttggacgaacgcttcgagagccagagcgcccctgacggtacgccttggcaggcgttgtccccgacctatcagcggcgaaagcggaagaaccaggacaagatcctggtgctcgatggctatctgaaaaacaccatccgatatcaggccagcgacgacgaactggcggtcgggtccaaccgtgcctatgcagcaattcatcaattcggtggtgaaatacagattgcggctcgcagccagcaagcgtatttccggcatgacgccaagaccaacgaggtcagcccccagttcgtgaacagacgtcgggcgaacttctctcagtgggtgtccctcggtccctacactatcaagatcccggctcggccgtggctaggcaccagcaaccgcgacgatgacgagctgctagcgatcgcacagaagcacctcgatcgagcgctttccgggaaaagctcctga

SEQ ID NO: 355929 - DNA, 318 bp, Pseudomonas aeruginosa
atggctgacccccggaggtacccacgcacggccgccaacgggtacacgttttccgtgacggataccgtattcctcaacagcagcttcaagacgtgcagcccggtatccgtcatctaccactcccacccggacgtcggtgcctacttcagccgggaggatatcgacaaggcattgtatgccggggagccaatgctgccggtcgactacctggttgttgatgtggccgccggcaacgttcgcggcgcaaaactgtttgcctggcgcaacggacgctttgaatgcacacgagagttcgggccatcgagccaggacgagtag

SEQ ID NO: 355930 - DNA, 540 bp, Pseudomonas aeruginosa
  misc_feature (316)..(325): n is a, c, g, or t
atgcttcgcaggttcccagttcccctcgggcctgcggatgagcagcatgagttgctctgccagctagatgtgctgatcgaacaactggaccgccaggaaaaagcggtcgagcttggccttaaacagtccgctgcccaacgccaaaacatcctccgcgccgccttcgccgggcagttagtgccgcaagacccgaacgacgaacccgctagcgtgctaatggaacgtatccacgctgaacgagctgaacgcgatcggcaacccaaggtgcgcaagactaaacaacagaaggagatcaccgccgtggtgagcaaattgnnnnnnnnnnaattgatcgacgtgctcgctgaggagggcgactggatcccggcgcaagaggccttccgccgatgcggcgtggccgatggcgccctgaccgagcgcatcgaagagctttatgccgagctgcgcaagctggataaggccggccgcttggcggtggaggccgtgatcgatgcgcagggccgcaagctgcatgacaagctcaaactactggcgggctaa

SEQ ID NO: 355931 - DNA, 720 bp, Pseudomonas aeruginosa
  misc_feature (354)..(363): n is a, c, g, or t
gtgtggccgttcaccgatggcgcgctttatcaggtctatgcgtcgccggggcgcgtgacggtggtttcgcttcaaccgggcgaggaactggtaacggtcgccgccggcgataccgtgcgctggatcgtgggcgacacgtccagcggcggcggggccgatctgcgcgtcaatgtgctggtcaagcctatccgctccggtctgaaaaccaatctcgtcatcaccaccagtcggcgcacctacctgctggagctgacctcgaccgagagggcatggatggcgtcggtgtcctgggactatccgaaagaccgaatgctcgcgttgcagcgccaggcgcaggcagcgcaggcaacaacnnnnnnnnnnttgcagcgccaggcgcaggcagcgcaggcaacaacgcctgtcgatacgggcctgtcgctggacaagatccgcttccgctacgcggtatcgggcagcaacccgccgtggaagcctctgcgcgccttcgatgatggagagaaggtctatatccagttcccgccgggcatcgcccagggcgagctgccgccgctgtttgtcatcggcgcgcagggcgacgggcaactggtgaactaccgttttcgctcgccgtactacgtcgtggatcgcctgttcggcgcggccgaactgcggctgggcggcgatggcggcgacgtggtgcggatcgagcgcaccgatggtgttgcacggaggaactga

SEQ ID NO: 355932 - DNA, 183 bp, Pseudomonas aeruginosa
atgcacagcggccagcacgcgctcggcctggcgctgaatacgggtcttcacttcactgaagtgctcgggcaccagttgttgcgaggcatgctgcagtgcgagattttccaggttctgttgcaaccaggaggcgctcagcacgtcctgcaccagggcaagctcctccggtttgatcggcaatag

SEQ ID NO: 355933 - DNA, 936 bp, Pseudomonas aeruginosa
  misc_feature (168)..(177): n is a, c, g, or t
atggctctcgggcagcgttctgtacagtatgcatctttaaaagtgtgtgatgttggagtcgcatccgctcaggacggcacagttatctatacgcttcgagttcccagggcaaagcagcgtaatcagttatctcgcgtagagtttaaagatcgagtgcttgtttcacannnnnnnnnncttttggtgcggcagcgggatgatgtttataggaagttcaaacggcgcctgtcagacccatcgaaggcaccgttattccctgcaaggcgccaatccggtagctgtccagatggatttgagtatcaccgcacgggaccttcgctcggtctcatgctgcgtgttggccttaataagttatctgcgatgtcagagcgcacgggacagccgttgcacgtcaccgccgtccggttccgtcgcaccatagccaccagggcagcaatagagggtcacggagaactgattatcgctgaactactggaccacactgacacgcaaaatgttggggtttacatagaggcgcggcctgaaattctggagcggattgatcgtgcgttggcattgcaacttgcgccaatggcacaggcctttgccggaatgattatcccagatgaatctcatgccagacgtgccggtgatccgagcagtcgggtatgcgacccaagattcgatccttcgatgaagcccatgggaaattgcggaaaacatggcttttgcggattttccgcaccaattgcttgttacacctgcgtcaatttccagccttgggtggatggtccgcacgagaatgtgttggagttcctgcttggggagcgtaatcggcttgcgtcacaaacggacatgcgcatcgcatcggtgaatgatcgcactatcctggcggttgccgaagtggtacgccaatgtgatgaagtacggagcggaaaggcggatagcaatggctga

SEQ ID NO: 355934 - DNA, 720 bp, Pseudomonas aeruginosa; identical to SEQ ID NO: 325965

SEQ ID NO: 355935 - DNA, 624 bp, Pseudomonas aeruginosa
atgggtgtagtcggcttcagcgccatcctttggctctacagcaaagtcttcaagcaagatggcagtgaattcaatcgcctggacggcatgctccgcttcaagcgtcgcttccgccgcctgttcgtcgctcccttcgacgagttcgatccggtgctgcaattgctgcccagtggctacggcagccacgactatgcgctctggttgcatcaccgctataccgacaacaaggtctgtctggccacccgcgtccactccctcggtctcgacaaggtcaatgccctggccttctgggactgcctgcaacgctacatggacgtgacccagccgttgcccgacctgccggtcctggagccgagccgccccttagatccggtcaccgccgagcatgatcggcataccggacgcgatccccattactggcgccagcgcacctaccagggctggccagccaaggagcgcaaggagctggaccgacgcctgcatgagtatccctggcaacagcagccctgcatcgtcagggcgcgcatcgatcccgggctaagcatcgaagcctattaccggcgccaggaagccaagggcatttttgccacgcccagggccgatgatttcaatgatgagcactga

SEQ ID NO: 355936 - DNA, 180 bp, Pseudomonas aeruginosa
atgctgcaacgggccatgggcgatgccagccgtgcggagttctccagcggctacgtctcctggcgcaaggccaaggacagcatcggtctcgatgtcgcccaactgctccaagacaagccccacctgcaagccaagtacccggtgctgaaacccggtgcgcggcgtttcctggtcggctga

SEQ ID NO: 355937 - DNA, 354 bp, Pseudomonas aeruginosa
gtggtgcaccacctcaagtcattcgcgcccgaccatcgcaacaccatcctgttcgccggctaccaggcgggcggcacccgtggcgccgcgatcgtgcacggcgcgtccaccgtccgcatccatggccaggacgtgccgatccgcgccgaggtggcctcgctcgacaacctttccgcccacgccgatgccgacgagatcctcgcgtggatgcgcggcttcacgcaaacaccgcgccgaaccttcgtgacccacggcgagccggaggcggccgatgcgctgcgcgcgcggatcgaccatgaactgggctggtcggttgccgtgcccgagtacctgcagacggtggatctggtatga

SEQ ID NO: 355938 - DNA, 300 bp, Pseudomonas aeruginosa
atggaagccgagcaggaagcattactgcgcgcccatcaggctgagctggaaggcggtattgccgagcttgagcaactgcgcaggaccttgtcacgcaccgaaaaaaccttgatcccgcttgcaagcaaacgtgccgatctcgaactggccgcctaccaagccggtaacagccagctcacatccgttattactgcccagcgcgacctgattgatgcgcaactgcggcagattgaacagcagcgcaagttgagccagctctccgcaagcctgtactacgcctatgtggagggcctgaaatga

SEQ ID NO: 355939 - DNA, 327 bp, Pseudomonas aeruginosa
atgctcgacctgctgcgtcaggtggattcggcaagactgtcgctcctcggcgaagatcgcctcgtccagttcggcctgatcgacctcgcccctgagcttggcgagcgggccgtcgagcatgttgctcagcacctgtgcatagcgtccgttgggacggtgcggcagcagtgcattgaggctgcgcaagtaggcagcgcagtggcgcgcctgcgccgcagcgtggcgcaaggcgaacagcgagtcgtcgagcatcagcccgatgaggttgggatggccacgcagcttgagggtttccagtacgtcctctccggcctccagagtaggtag

SEQ ID NO: 355940 - DNA, 639 bp, Pseudomonas aeruginosa
gtgtcgagggcatcgcccgcgacgagcacttcttcgaactcggcggtcactccctcagcgccacccgggtggtctcgcgcctgcgccaggatctggagctggacgtacccttgcgcatcctgttcgagcggccggtcctggcagacttcgccgcttccctggagtcccaggcggcgagcgttgcccctgtgctgcaagtattgccgcgagtcgccgagctgcctttgtcgcatgctcagcaacgcatgtggttcctctggaaactggagcctgaaagcgcggcctatcatctccccagcgtactgcacgtgcgtggcgtcctggaccaggcggcgttgcagcaggccttcgattggctggtgctgcgccacgagaccttgcgcacccgcttcgaggaggtcgacggtcaggcgcgccagacgatcctggcgaacatgccgttgcgcattgtcctggaggattgcgccggggcgagcgaagcaacgttgcgccagcgggtggccgaggaaatccgccagccattcgacctggctcgtgggccgctgctgcgcgtgcgtctgctggcgctggctgggcaggagcatgtgttggtcatcacccagcaccatatcgtgtccgacggttggtcgatgcaggtga

SEQ ID NO: 355941 - DNA, 384 bp, Pseudomonas aeruginosa; identical to SEQ ID NO: 325975

SEQ ID NO: 355942 - DNA, 690 bp, Pseudomonas aeruginosa
  misc_feature (489)..(498): n is a, c, g, or t
atgacaggactgcggctgagcgatcttcttgaacccgtcatgcagcttgcttacgaagcaggcctacttattgagtcagagcttaatagaccagacggcccaaggggcagtggctttaaggcagacgtcgatgttgaaatcgaggtacttctgcgacagcgactgaagcacatccttaattgcgattttgtcggagaagaaacgggctgcgagctatcaggccacccatttagttgggttgttgaccccaatgatggaacaggcgacttcctcaatcgtcggccgggctctgccatttctatcggattgctgcataacgcaacgccagtgctgggcgtggtttacgcccccgtcacgcctagtggtcctgactgcatagcatgggctgagggtgcaccggctttactgcgtaatggtcgtcccgtgaataatgacctgcaatctgcgatcttgggtaagcgtccagccaagtcaccttccgaactccannnnnnnnnnggtccaggtcgttcaggaatgcctacaaccgggtgcgaccgtctccagcgttgccatccgccatggcatcaacgccaacgtcattcgaaaatggctaccgctttaccgagatcagctacccgcggcgttgccggcgttcgttccattgagggctacgcccaaacggccgactgcagcatcggtgattattga

SEQ ID NO: 355943 - DNA, 483 bp, Pseudomonas aeruginosa
atgcaggggcagaccggcatcgcgaagaaggtctacgagtgcgtaccgatctctgagccctggcgttcgttccaggtgctcaccgcacttcgcaacatgaccggaagcacgccggacgttcggattgtccagggctgcctgcgcgatctagtcgattccggactgatccgccgcactggtactgaccactaccaacgaatccaagtcgagaaaaagaccaagcatcaggagccgaagatggcggagcccgcgaagaagatcgaaacccagtccgagccgaagcgctccgcctccccgctggagatgctaggcgaactggcaaacgagctcgccggcatggccgagcacatgaagcgcctgtctgatcgcatcgaggacgtcgcgctggcagtcgagcaggagcgcgaatcgagcgccaagtcgatggaaagctatcgccaactcaaggcactgctgaagagcctgcaaggggagggcgagtga

SEQ ID NO: 355944 - DNA, 636 bp, Pseudomonas aeruginosa
atggctgagcgcagtgctcaaggcaaggcgttgaagcagacctgggtgggcaatgccccgacctgtgaactgcagttggccaccgaaaccaccaacgtgaccgaaagcttcagcggtaatcgcctgcagtacggccagctcgaccgcggaaagaccgcgacgattaacctgacgctcgacgaatggctactgcccaacctgatcttggggctgtacgcgcagcaggtcgccattcccggcgtgacggatctggtgctcacccagtcgagcactccgctcgtcgcaggaaccgactacaagatcgaatctgccacggccggtctgatcgagttcctgactgcccaagcatctgcggtaagcgccgcctatgagtccgaggaagctgtggcgctgacgatgttcacccaacggcctccggagcgctggctattcctggacggcatcgacaccgaaaccggcaagccggtcttggtcgacttgttccgctgcaagttcaacccggtcggaactctggcaatgatccatgaggaatacggcaatctgccgttgaccggcagtgtcctgtatgacccgctgaatgccggtgatccgatgctcggtggatatggccgatacatcgagaagaaggcggcctga

SEQ ID NO: 355945 - DNA, 318 bp, Pseudomonas aeruginosa
atgcaaaccgccatctcgatcattatcagcatgacgctgagcctttccctgctgtccggcgtagcgcagctgtcacaattcgccttctacgtctgcgtcatcatgaacgtgctggcctggataggcgtgctctgcggcatggtcaaggacgaaatcagccagcgaatccgccggaccttctggattcaactccttccctcaattttttacgtttacgcgctgatcttcagtgggcatcccatgctcggcgcatctgccttcatggtgcaattcctgatcgtcgccaccgccttccgaaaggaggcgaaacctgcatga

SEQ ID NO: 355946 - DNA, 693 bp, Pseudomonas aeruginosa
atgtcgggtctgatccaactggttggcatagttgtcgacgagccttttggcagcgctatgcgtttccgcaactggagcgccagaaacgcgccggtactcatcagggatgtcacgataagaaatgtgaacttcggcgtggccacgggaaacataaatcgatgcggagtctggcaggactcttctgactccatggaagtgattgaaccaaagggcaatttcgaagtggatgggctgaccgtcttcgacgataaccaacagctcattcgacccgtgtggaccatgggaatagcggcggctcctacaatcgccaaggtgaggaatgtctacgtcaaccgacatggctatcctgctgttttgccgttacgtacgaaagtacaaggaggcgtagggtggagcgagctgccgatggtgtccttgtcctcgtcctcagcaatcgcaggaacggattatgtcggacaaatggtcgagttgacggggagcggaggattcgtactgccggaggccgctcttgcctcgggctgtgtcttcaggatcaggaatggttcgagcggcagcatcaacgtcacggcactggctggaggaatcacgggcagtacctacggtagctacaccaacacaggaagcagcctgaccttgatcaatgggcagtatgccgagctatggagcaatggaagcacctgggtcctgaaatga

SEQ ID NO: 355947 - DNA, 468 bp, Pseudomonas aeruginosa; identical to SEQ ID NO: 325053

SEQ ID NO: 355948 - DNA, 243 bp, Pseudomonas aeruginosa
atgggtggcggacaacgcgaagtcgaagccgtcaccaggtcgttcctgttgttgtccggtggccgctgtgtcgatcagaactgccagggtttcaggttcttcggcgcgctgtatggcgagcacgtcggcgagttggggaggaacccaatcgccgaggactgccaggcggatttcagtggagacgtcgatcgatctcacgtgcaacttccgaaggcgctaaagcatggaaacttaatcgaatga

SEQ ID NO: 355949 - DNA, 603 bp, Pseudomonas aeruginosa
atggcggcgcggcatcaggatttgcgattccgtgatgggcgcgggcttgtcctcgtcgtacttcaacgccagcgcagcacgggcgaacacttccgattccccggcgtccagcgtgatggcgcgcatggcatcgcgcgattcctgcgcccggtcgaaaccgtgcaggacttcgtaagcgccttcgatgacgtgcccggctacgtcgcccttgtggggcacgcgcacgtccgccacggtgtcgccgcagacaaggccattgctgcagacgaaacgaaacattccggccagcatctgatagctgctggtgccgtcatgggagttcagcaggatgatttcgttggcctcgcggccgttgatctggctggcgtggcgcagccggatcatgtgcttggtgtagtcgcgacggtcgtcgtggcgcacgcgggtttgcgtcaccatgaaaggctcgaagccttccccgcgcagttcttgcagtacggtcgcggtggggatgtagctgtaccgctcggagcggctttcgtgcggtgcctccgcaaagatggacggggccacggcccggatttggtcgtcggacaagggacgttccgaacgcagcaccggtga

SEQ ID NO: 355950 - DNA, 624 bp, Pseudomonas aeruginosa
atgggcatccttagtctcctgcgctccaactggttctggaccgcgctgattgcggtgctgtacagcgtagctgtagtgatccacggctccgcaagctacgaccgtgggtacgccaccgctcgtgctgaaggtgacgcagcgctgctcaacctgcaactgcagcattccaacgagctggccaagatcgctgaggacaacctcctgcagttccaacagcaggtcactcgcgcgaatcaggcggaagcgcgattcctgtcagcccaggatcagttcactgccctccagcaacagctatcggagcgtatcgcccatgtctcgacccaatatcggccggcaccaggtgcttcccctgtgcctgctcctcgcttcgttgtcacttgcggctggctgcgggactacaaccacgccctcggcgccgacctgccctccccagcagcctgcagaactgccgccagccctcaagaaacggcctggcccgcctccggcgctgacgccgaactactggaaagcggtgtcagcgcggctgacatcctggcccatgcccgcgattacgggaaatggtctctcaccaacctggcgcaactgaatgcgctgctcgatgtaaacgacaaggaaactcactga

SEQ ID NO: 355951 - DNA, 255 bp, Pseudomonas aeruginosa
atgtgcgggattggcggaagaaccattgcggaagcaaagtcccgcctcagctaccgggagttccttagctggtgcaagttccgggacaagcgggggagcctccatgtcggcatgagggtagagcgcggctcggcattgctcgctgcgctctacgccaactcgcatagcaaggagacgtacaagctgtacgacttcatgccgcatgaagaagagcccgtcatcagtctagatcaggcccttgagacctgggcctag

SEQ ID NO: 355952 - DNA, 285 bp, Pseudomonas aeruginosa
atgcaaagtccgcacgacatcgtcggtcttctcgttgatgtgatcggccacgtaggctgtgaagccatcaatatcggcgtagaggctcaccatctcctgtcgcttcgagttggccggagtcagcgagtaaatgtccatatcacgcaggggtggggtttggcgggaaaactggtaaccgccaatggggttctttttcagatcctcacgccactcctcgacgatctcgtcggacgtgacatccagcttggccgcatcctgacatgccttgatctctatcgcggttag

SEQ ID NO: 355953 - DNA, 252 bp, Pseudomonas aeruginosa
atgccgaactatcgcaagccggacatgtactcggacgccgattgggaaatggttcagggctacatggccggcaaggacggcctgcgcgcccagcgctcgaatgccgcctacatgcatggctatcgcaacggggtttctgatcggaccggagtcccgcatgagcgggcagaagttcttcgccgtcgcgcagagatgatccctggcatcacgcccgataaagtttggttccaggggagggtaggccgtggctga

SEQ ID NO: 355954 - DNA, 219 bp, Pseudomonas aeruginosa; identical to SEQ ID NO: 328510

SEQ ID NO: 355955 - DNA, 576 bp, Pseudomonas aeruginosa
  misc_feature (387)..(396): n is a, c, g, or t
atggatcactacgagcgcaaaaccagcgtctattacggcatcctcgagttcgatctgaatcccgacaccatgcttaccgtcggcgccgactatcaggacaacgatcccaagggatcgggctggtcgggcagcttcccgctcttcgacagccagggcaaccgcaacgacgtctcccgctccttcaacaacggagccaagtggagcagttgggagcagtacacccgcaccgtcttcgccaacctcgagcacaatttcgccaacggctgggtcggcaaggtgcaactcgatcacaagatcaacggctaccacgcgcccctcggcgcgatcatgggcgactggccggcaccggacaacagcgccaagatcgttgcgcagaagtacaccggnnnnnnnnnnaaaccaagagcaactcgctggatatctatctcaccggccccttccagttcctcggtcgcgagcacgagctggtggtcggcacctcggcttccttctcccactgggagggcaagagctactggaacctgcgcaactacgacaacaccaccgacgacttcatcaactgggacggcgatatag

SEQ ID NO: 355956 - DNA, 330 bp, Pseudomonas aeruginosa
atgcagcccctccgtgctgtcctgttctgcattgccggccaggatgccctgcaggctggcttccgaatcgatgaggaactggccggaggtaacgaccgcctgaccttcctcgagaccggacaacacctccagacgcccatcggcctcgcggcccaaggtgatttcctgggggcggtagcgtccgtcgccttcggccagcatcaccaatgcacgcttgccggtgcgaatcacggcttcactcggcacaagaagcgtggattgttcgacggcactgttcaggcgtacggcggcgaacatgccggggcgcaacttaccggcagggttgggtag

SEQ ID NO: 355957 - DNA, 540 bp, Pseudomonas aeruginosa; identical to SEQ ID NO: 355930
  misc_feature (316)..(325): n is a, c, g, or t

SEQ ID NO: 355958 - DNA, 129 bp, Pseudomonas aeruginosa
atgaccatttgggtgaaggccggcagttcggcgccgaagccctcgaacaccgactggaactgcggcaccaccttgatcagtaggatcgccgaaacgatgatggcgacgacgatcaccgcgatcgggtag

SEQ ID NO: 355959 - DNA, 273 bp, Pseudomonas aeruginosa
atggacatcgccctgttcacccgccagatgtccaccatgatggccgccggcgtgccgctgctgcagtcgttcgacatcatcagcgaaggcttcgacaatccgaacatgcgcaagctggtggaggagatcaagcaggaagtcgccggcggcaacagcctggccaactcgctgcgcaagaagccgcagtacttcgactcgctctactgcaacctggtggacgccggcgaacaatccggcgccctggaaaccctgctcgaccgggtcgccacctag

SEQ ID NO: 355960 - DNA, 258 bp, Pseudomonas aeruginosa
atgaactatttcagatataaacaatttaacaaggatgttatcactgtagccgttggctactatctaagatatgcattgagttatcgtgatatatctgaaatattaagggaacgtggtgtaaacgttcatcattcaacggtctaccgttgggttcaagaatatgccccaattttgtatcaaatttggaagaaaaagcataaaaaagcttattacaaatggcgtattgatgagacgtacagcaaaataaaaggaaaatag

SEQ ID NO: 355961 - DNA, 348 bp, Pseudomonas aeruginosa; identical to SEQ ID NO: 325042

SEQ ID NO: 355962 - DNA, 324 bp, Pseudomonas aeruginosa
gtggccgatgccgtccagcgcatcgagcagcaagtcctccagcccttccaggtcgagcaacagctcgtgcagatagtcggcatcagctttctcggccgccgaggcgttacgcggaggctcgaccgcccagtccaggccaaggattgcgcgctttcgcttgctcatttcggcgaacaggtgggcgtcgcgttcctccatgtccatgaacagttcggcctgggcctggagattgccctgttcggcctcgaccaggatgcgagccagcttggccggtgtcagccccttggccgggtgctgggcgaactccttcgccaggccggctag

SEQ ID NO: 355963 - DNA, 351 bp, Pseudomonas aeruginosa
gtgaaacgagcagcactggcgagagccttggcgcttgatgcgaacatcctgtttcttgacgaacccaccgcaggactggatccaatcggggctgcatctttcgaccaattgattctgaccctgcgcaatgcactgggcctcacggtgtttctggtaacccacgacctcgatacgctgtacaccatatgcgaccgtgtcgcggtcctggcgaaccagaaggtactcatcaacgacggcatcgaggcagtcgagcgcttcaagcacccgtggatacaggaatactttcacggcccccgtggccgtgcggccgcacaggccactggtgcttccagccaagagacgcagccatga

SEQ ID NO: 355964 - DNA, 561 bp, Pseudomonas aeruginosa; identical to SEQ ID NO: 340171

SEQ ID NO: 355965 - DNA, 603 bp, Pseudomonas aeruginosa
ttgcagcaggcacgcgagcaacggcaacaggccgagatcgagaacgcccgcctacagcaggctaatcgtgacctcgaggagcggcacaaggatcgcgacgcacagatccactcgctggaggaaaaacaccgacatgcgcgcgacaccctggagcactaccgacaggccagcaaggaacagcgtgagcaggaacaacgccgacacgagtcgcaggtacaacaactgcaactagaactgcggcaactgcagcagaccttgataatcaagcaggacgagctgacgcaactgaaccgcgacaatgcacgcttgctcaccgaggcgcggcagttgcaaaaagagcgacatgcacagcaacagctagtggcgcagaaaactcaggccctggaggctctgcagagcacgctggccggctccgaacgcacgaatgaagcccttgatcagcgttgtcgcacattgcaggaggaggtgtcccggctgagcgaagcctccgcgcttcaggcgcagcagacgcagggcctgcagaagcgcttggtcgaagccactacacagctgaagctactcggggcaccgcttgcgaacagcgatggcgcatgtagcacatga

SEQ ID NO: 355966 - DNA, 510 bp, Pseudomonas aeruginosa
gtgcaaaagggcgaaatctttggcctgctcggccccaacggtgccggcaagtccaccaccttcaagatgctgtgcggcctgttgaaacccactgctggcgaagcgcatgtggtgggccatgatctgcgccgcgccaccggcgcagccaagagtcggctcggctacatggcgcagaagttttcgctctacggcctgctctcggtgcagcagaacctggaattctcggaacccacttcgggcgtggacccgatcacccggcgcgaattctggacccacatcaacggactggcccgcaagggcgtgaccatcatggtcaccacccacttcatggacgaggccgaatactgcgaccgcgtggccatgctctcgcgtgcgcaactgattgcgctggatacgcccgacgcgctcaaacgttcggcggtcagccccgaacgacccgacccgacgatggaggacgccttcattcacctggtggagtcggcggaccgcgagctggaggccgccacatga

SEQ ID NO: 355967 - DNA, 465 bp, Pseudomonas aeruginosa
  misc_feature (331)..(340): n is a, c, g, or t
atgcgcgcgatgaacatcgagcttcagaacgtctcgatgggcgccatcatcattgcgctcggcttgttggtggacaacggcattgtgattgccgaagacatcgaacgccgcctagccggtggcgaagatcgtaagcatgcctgcctcgaggcgggccgcacgctcgccattccgctgctcacgtcctcgctcgtgatcgtgatcgtgttctcgccgttcttttttggccagaacgccacgagcgagtatctgcacaatctcgtggtcgtgctggcactgacgttgttcgcttcgtggctgctgtgcctgactgtcacgcccctattgtgcnnnnnnnnnnattgtgctaccacttcgccaaaccccatcacaagcaggagcagggcgacgcctatgacacccgcttctaccgtggctaccggcgcgtactggagtgggtgctccaccataaggcggtctatgtag

SEQ ID NO: 355968 - DNA, 282 bp, Pseudomonas aeruginosa
atggctgccggagtgcccgaaccagacacggcggtacgcgacgtggaggctttgccggccaatacggatttgcagttggaggcgctccacaaggaaatccgcttggactttctcacttcaatgggcgaggcagagcgattcaagctgcttctggacgagatgccgcatttgcgcgacaaggttgaaggcgattacctggaggccagggatcgcagttctcgccttctgggccatttacgcgccatagaaaagaccctcaaaacgctcgcagcgccacgatga

SEQ ID NO: 355969 - DNA, 507 bp, Pseudomonas aeruginosa
atgttcgtcgctggtgggttgtcagcgctcgcggtacgctcgacgcacctgcagcgattcgccgcgagtatccccggcaatctcctatgcctggcgctcctgctcctacccggagtgctctttcccagcgcctatcaggaaacggcgatcctcattctcggcctggctttcctgctgattgcggcgggttcgagcctattcggcctgctgactcaagcactgtcccgcttcctcggcgaaatgacctacagcatgtatctgctgcacgggtgcatcctattcatcagcttcgaactgctgatcggcagggacaacgccaaggcgttttccgctctggaacactggctggtcataggtgcgatcactcccctggtagtgctcgcgtcgtatctatccttccgtttcatagaaagtccggccatgcaacgctccagacaactcagcgctctgctgggcaaaccgatgctggcgctcaagcgcctgggccgtcacccgactgctggctaa

SEQ ID NO: 355970 - DNA, 399 bp, Pseudomonas aeruginosa; identical to SEQ ID NO: 324118

SEQ ID NO: 355971 - DNA, 555 bp, Pseudomonas aeruginosa
gtgattggcctgctgcaggcaaccgaggcggtgaaggccctcgtcggcctgggcaagtccctatcaggcagacttcttcgattcgacgcgctgctcatgcacttcaatgaagtgaagttcaatcggcgcgacgattgtccggcctgcggcaaaaccgctgcagagaatccccgccactggagggagggattgctctgccaggcaagcgcggcaccgtcgcaacgactcgacgacgatcgctatatcgatcccagctgcctgttgcagttgatgaaatccaacagcgaaaactatgcccttctggatgtacgcgacgcgggcgagctcgaagtgtgccagttgccggggatcgtccacgttcccttgaacgaactcgccagccatttcgccaatctcgacttcagtaagcgctacatcctcgtgtgctacgccggcactcgtgccgaacgcgcggccatacagctcatgggggcagggttctccaacgtccaagtgctcgatggcggcatgaagcgatgggcgaaagagatagagcagcacatgccgatgtactga

SEQ ID NO: 355972 - DNA, 303 bp, Pseudomonas aeruginosa
atgagtgaattcgatgatcccgcgctggtcgggctcgggctggcactcgcttcgggacttctgatcggcctggaacggggatggcagcaacgcgagcggcccgagggacatcgcgtcgcgggcgttcgcacctttgcgctgatcggcctgctcggcggccttggcgggctgctggcccagcgctggggagccggcatgctcatcgcgctgctcgtactcgtcggggtgtatctggtggtgggctacctggtgacggcgcatatgcatgccgtgatgggactgaccacgtccgtcgccaggtag

SEQ ID NO: 355973 - DNA, 375 bp, Pseudomonas aeruginosa
atgagcctacgcgccgtcaacctcgcaaaaatccacatcgccaaggcccagctaggcatggacgatgacacctatcgcgcattgctggctcgcgtcgcgggcgtgcgctcggccaaggacttagggccgcgccagatcgaccacgtacttgtcgaactccagcgcctgggctggaaaccgaagagcaaacggcaaggccgggcgacgccaaaagtgccgcaaaaccggcaaaccgtgctgcgcaaaatcaccgcgctcctggccagcgcccatcgcccctggagctacgccgaccacatggcccggcgcatgttccaggtcgagcgggtcgagtggctggacgacagccagctcctgtctcttatacacatctga

SEQ ID NO: 355974 - DNA, 258 bp, Pseudomonas aeruginosa
atggaaccaagatcggcagtgctccgcgacgatgagctctttggcttgagcatcttcctccatgtcagcatggaagaagtggatcatcttgttgcggtgattggccagtgctcgaaagctagtgaaagcttcgctaccgatgtcttcgcccgcgacatcacgaatccgtgcgcgcgcctcatccatcgtgaccgatgcaaaatctccagccatgaatttagcgagattggcttgctctggtttggcaacaatcagtga

SEQ ID NO: 355975 - DNA, 435 bp, Pseudomonas aeruginosa
gtgccggatgaactggacgctcaatgccggaaccatggcatcgcgcgcacggtgatctatgccgtcatggcggacgacttcggaacgccggtgcatgtcggcgatacctattccgaggaagccgcccgcgacgtggtgcgccgtctgaccttcgacactggccactacagccggtgctgggagatcagttccgggcaccttcccgaggaaacgatgcagtacctcgaagacctcgcggatgcgccctggaccgacgccaatctcgaaatcgtcgatggccgcaatacccaggcgctgcacaacgatcagacggatgcgtgcgtccccacgccgctgctgaacgtgatgcacttggccgccatggcggacgtgcgcatactggtcttcgatccgaacgccgcgatactggacggcctgcctgtctacgaagactga

SEQ ID NO: 355976 - DNA, 426 bp, Pseudomonas aeruginosa
atgaccacggtggtcggcctgccgctgcgctcgccgaagcatgccaagccgctgatcgccgccctgatcctcggagccgacggcagcctcggcgtctatgccaagcagcacctgcacgcgggcgaggaacgccacttctcagccggcgacggcggccccctgctggagatcgacggcctgccgatggcgttggcggtctgcgccgacttcagccaacccagccacccggcccacgccgcccgtgccggcgctcgcccccgcgagcacggaatgggcgtgctgctggccaaccatggcgggccgacgggtggctggaaggcggcgggcaggagtgcgttttggaatgagcggggagcgctggtcagggagacgacggggacgggtgagacgctgcttctgctggaacggaccgagatagacgcttga

SEQ ID NO: 355977 - DNA, 231 bp, Pseudomonas aeruginosa
atgccgaacaggaacacgccggcgctgatcatgaacaggcccaagagcgtgccgatcgccagcgcaggcagcgacttggaaacaatgatctccggcgtcgaggtgggcgataccagcaactggtcgaaggtgcccagctcgcgctcgcgcgcgatcgacaacgaggtgatcaagagcgagctgaacagcgccaggatgcccgtgaggccgggcacgatgaaccagcggtag

SEQ ID NO: 355978 - DNA, 408 bp, Pseudomonas aeruginosa
gtgatcaccgatagcgcgggtacgcccgtcacgctgaccgaggatcactatttgctggagcccgcgtttggggcgctggaaatcctcagtctgccgacgtcgccggctccgacccagccgttcattgccgcctatgagtacatggccagtaagcaggttacgttgctgtcggcggctaagcgctccaatgtggccctgcgttacgaaggcatcaacctggctgaggacggcgcgccgatcatcgtggagatttacaaactctccccagggctgctccaggaactgtcgctgatcaccgacggcaacgacgtggcgggtatgcctgtgagcttttccgcgctcctggatacctccaagccggccaatggtccgttggggcagttcggccgcattatccaggtgggctaa

SEQ ID NO: 355979 - DNA, 276 bp, Pseudomonas aeruginosa
  misc_feature (212)..(212): n is a, c, g, or t
ttgctgacgctgagtcgcttgcgcttactgacgctgagtcacttgcacttgctgacgctgagtcgcttgcgcttactgacgctgagtcacttgcacttgctgatgctgagtcagacgcgcttgctgatgctgagtcagacgcgcttgctgatgctgagtcagatgcacttgctgatgctgagtcagatgcacttgctgatgctgagtcagangcgcttactgatgctgagtcagacgcgcttactgatgttgaatcagacgcacttactgatgtag

SEQ ID NO: 355980 - DNA, 201 bp, Pseudomonas aeruginosa; identical to SEQ ID NO: 355867

SEQ ID NO: 355981 - DNA, 303 bp, Pseudomonas aeruginosa
atgcaggtgtcgggcggctcgcagtccttcaacgcggtcaaccagatgcgcgtgctcggccgctggatgcggatgctgaccatcccgaaccagtcctcggtcgccaaggcataccaggagttcgacgaggtcgggcgcatgaagccctcggcctattacgaccgcatcgtggacgtgatggaagaactgatgaagttcacgctgctcacgcgcgacgcggtcccgtatctggtggatcggtacagcgagcgcaaagagggcgctgaatcactgtccaagcgtgtacggcaaggtgcaatttga

SEQ ID NO: 355982 - DNA, 267 bp, Pseudomonas aeruginosa
ttggggcgcatcgcgcccggtactgtggtgcgcgtcaaaagcgattcatcagagaaggtctatcgcggccagatcggcttcatctcgccgcgcgccgagttcacccccaagacggtggagacgacggatttgcgcacggatctggtctaccgcctgcgcatcgtcatcgacgaagccgacagcgacagtgccttgcgccagggcatgccggtgacgatcgaggtcgatgcgaaagccggcacccgtatcccggcgggggagcgttga

SEQ ID NO: 355983 - DNA, 177 bp, Pseudomonas aeruginosa
atgcgggggcacgaccggatccaggcccagatccagcgcgagctgccgggtttcattgccctcgtaggcgcgatccatgaccagatggcagcgcgcgggcaggggtggcagggcatgcagcagggcgcgaccggctggggcatcgcccgcctggcccggcgaaagcgagaaggctaa

SEQ ID NO: 355984 - DNA, 141 bp, Pseudomonas aeruginosa
gtgcgcatcctcacgcaggaaactcagaagggcaaaccggccgaggagctgcacaacgccaaacccaacccgatgatcaacggccatcaggactggctcgacagcttggtcgaggcagcgcgcaaagccaagcaggcgtag

SEQ ID NO: 355985 - DNA, 183 bp, Pseudomonas aeruginosa
gtgcggctcgcctgccgggatatcttccgttcgagcaagctgctgacccgcatcattcccaccatcgaagaggtactggccgccggcggcgtcgaacctcccagcgcaccgcccgagtcggtgccgccagccattcccaacccggagggaatcggcgacctcgggcacaggacgcaagggtga

SEQ ID NO: 355986 - DNA, 189 bp, Pseudomonas aeruginosa
atggtcggcagccgccaggacgatgcgcgcatccggcaatgggcgacgaaggcaggtatcgagccggccaaggtgcgcgcacggaccatcaccctgaatcacgacgccggccgttggctgtcgatcggtgtgccgggcgagctgccggccgtcgtgcgcgaggtcaacgggcaatggctgcgtcagtga

SEQ ID NO: 355987 - DNA, 207 bp, Pseudomonas aeruginosa
atgtacgcgcaatgcacaaacgcgctctgcggcgccaccttcaccggctccctgagctgggactaccagctcagcccctcgggcctcgagcggccactgctggtactccccatggcgccttcgaaaacccgtcaactggcacgccgcgacctcgcggccgcaaccaaccaactggacctgctggatcatgtggagtgcatgcaatga

SEQ ID NO: 355988 - DNA, 138 bp, Pseudomonas aeruginosa
atggtgggctgggtacccagtttgcccttggccaggggaacccagttcgttaccggcaaggtgctggactctgacgacaccacgctcctctggggcgagatctattccactcaacacgccatcgggagagacccatga

SEQ ID NO: 355989 - DNA, 153 bp, Pseudomonas aeruginosa
gtgattggcggtggcccgcgctttcgcaagttcggccgccgtgtcatgtacgccgtggccgacctcgatgcctgggctgccgaccgcagcttcgagacgacctccgatcccgaatacgccgagcaccacttggccgacagccgtgcgcgctga

SEQ ID NO: 355990 - DNA, 156 bp, Pseudomonas aeruginosa
atgctccacctgccggacagccagcagctgtcggagctggccggcgacatgaaagccatgcgcgccgagctgtcggggttggccaaagcgctggaccctttgactcgctcggttgatcgcatcaatgactacctgctcagcgagagacgcccatga

SEQ ID NO: 355991 - DNA, 213 bp, Pseudomonas aeruginosa
ttggataacaacaacaagtccgtgggaatccgacttctcaagcaggaagaccgcagcatcatcgatatcggcaaggagttcgtactggtgcccaatagccagaaccaattggtggtcataagaaacttcctcgcccaggtgaggtggatgacgggcactccaacgccaggccccttcaacgccaccgccatgatagaggtctactacaagtga

SEQ ID NO: 355992 - DNA, 816 bp, Pseudomonas aeruginosa
atgcatgttcaccttcatgaacagcgcccgcatcggcaccgccatccagggcgtggccaccgccgagctggcctaccagggagccctcgcctacgcccgcgaacgccgctccatgcgcgcgctctccgggaccaaggaacccgaccaggtcgccgacagcctgatgcaccacggcgacgtgcggcgcatgctgctgacccagaaggccatcgccgaaggcggccgggcgctggtctacctggccacccagtacgccgaccggatgatccagggcatcctcagcaacgacgacgccgaatacgaacgctgggacgacaagctcggcttcctcacgccgatcctcaagggctgcctgaccgaactcggcctggaaagcgccaacctcggcatgcaggtgttcggcggccacggctatatccgcgaacacggcatggagcagatcgtccgcgacgcgcggatcgccaccctctacgaaggcaccaccggcatccaggccctcgacctgctcggccgcaaggtcctgctgatgacccagggcaaggccgtgcgcgacttcaccaggggtgtggcccggttcgccgtcgacctgctgaagaacgagccgcgcatgcgcggccgcgccctggtgctgctcaagctctgcgcccaatggaacctgctgaccctgcgcattgccctcagcgcgcgcaagcaacgcgatctggtgagcaccgccagccacgactacctgatgttctccggctacgccacgctggcctattcctgggccctccaggaagccgctgcgcgccggcgactgcgccagggcggcagtga

SEQ ID NO: 355993 - DNA, 1725 bp, Pseudomonas aeruginosa
atggcggccttcaccaccgcccgcgccgaggaccccggcgagcaggcgctcggtgtgcgcgatccactcgttgttggcggtctggttcggggtgaagcccttgccctggcggtaggcgaagcggatgaagctttgccgcgcgcgttcctcgccgacgaaacgcgcggcgagcatcagcaggtcttccacctgcaccgcgagcatgaagcgcgagttctgccgctgggagatctcctggccgatgaagcggctggcctgccagtgctcggacacgcgggtgcgcgagagcaccgagaccaggccgaacagggcgaagttgccgaccagcgagatcagcacgccctgggtcagcggctcgatcggcaggccgaagggattgcttgccagccaggtcaggccggggatgcgctccagcggccagccaaggcccttggccaccaccggcaggaccagcgtataggcccacagcagcgagccggcggcgaggccggcgaagaccccgcggcggttggcctgtttccagtacagcgcgccgatcatcgccgggccgagctgggcgatggcggcgaaggcgatctggccgatggtcgccaggctggcgctggagccgagcaggcggtaggccacgtaggcgagcagcaggatcaccgcgatgctcacccggcgcacggtcagcagccagtgacggaaggcctcgaagggccgttcggtgtccttttcccggcgtcgcagcagccacggcaggagcatgtcgttggagaccatggtcgacagcgcgacgctggcgacgatgaccattccggtggcggccgaggcgccgccgatgaatgccagcagggccagcgccgggtgtgcctcggccagcggcaggctgatgacgaaggagtccggcattaccccggcgggcaggtgcaactggccggcgagggcgatcggcaccacgaacaacgcggccagcaccaggtagatggggaacacccagcgcgccaggttgaggtcgcgcggctcgatgttctccaccacggtgacgtggaattgccgcggcaggcacatgatcgcggtcatcgccacgccggtctgcagcagcatcgccggccagtgcacggtctcttcccagtagtcggccaactgcggcgcggcgcgggcctgggagaagagatcggcgaagccgtcgtagaggccgaaggtgacgaagatgcccacggcgaggaaggcggtgagcttgaccagcgactcgaaggcgatggccaggaccatgccgcggtggtgttcggtgacatccaggctgcgggtaccgaagacgatggtgaacagcgccagcaccagcgacacgatcagcgccgtgtcctgggcgcgggtaccggtggagtcggcgccggagccgatcagcagattcaccccgaggacgatgcctttcagttgcagggcgatgtagggcagcacgccgaccatgcagatcagcgccaccaccaccgccagcgcctgcgacttgccgtagcgggcggcgatgaagtcggcgatggaggtgatgttctcctgcttgctgatcatgatcatcttctgcagcacccagggcgcgaacagcatcagcagcaccggtccgaggtagatcggcaggaacgaccagagctggtcggtggcctggccgaccgcgccgaagaaggtccagctggtgcagtacactgccagggagaggctgtagacccaggcgcgcaggcggggtga

SEQ ID NO: 355994 - DNA, 330 bp, Pseudomonas aeruginosa
gtgatcaactacctctggttcgtcctcgcggcattctgcgagatcgccggctgctacgctttctatctctggctgcggctgggcaagagcgccctgtgggtgctgcccggcctgctcagcctgaccctgttcgccttgctgctgacccgcgtggaggccagctacgccggccgcgcctatgccgcctatggcggcatctacgtcgccgcgtcgctgttctggctggctttcgtcgagcgctcgcggccgctatggagcgactggctgggcgtggccttgtgcgtggtcggtgccagcgtcgtgctgttcggcccgcgcctgtctcagtga

SEQ ID NO: 355995 - DNA, 168 bp, Pseudomonas aeruginosa
atgatgaaagagcaacctaccctcgcgaaaaatgaaacagacctgatcatcaagaatacataccgaaccctgatgacacgcgggatgaagggttgctacctgtactgcaccgacaaagagactgctcaatacttcgagagccggcttagccaacacagcaatcattga

SEQ ID NO: 355996 - DNA, 810 bp, Pseudomonas aeruginosa
atgacgcgtgacgtgacggttgaactcaaggcgttgcgtctgcatggcatggccggcgcctgggccgacctggtggagcaaggaacgaacgcaggggtggactcctcgcgctggttgatcgagcacttgctgcaggccgagggcacggatcgcgccatgcgctcggtcagccaccagatgcacgccgcgaagttcccggtgcatcgcgacatcgccggcttcgacttcgaggtctcgccggtagatcgcaagcttgtgagcacactggccgcaaccaacttcacagacgacgcacacaacgtcgtgttggtgggtgggccgggcacgggcaagacgcatctggccacggccatcggcgtatcgggcatcacccggcatggcaagcgcgtgcggttcttctcgacggtcgacctggtcaatgcactggagcaggagaaggcgcaaggcaaggccgggcgcattgcattgagcttgctgcgcatggacctcgtcatcctggacgagttgggctacctgccgttcagccaggccggcggggcgttgctgttccacctgctcagtcgcctgtatgaacacaccagcgtgatgatcacgaccaacctggacttcgcggagtggtccagcgtgttcggcgacgcgaagatgaccaccgcgttgctggaccggctcacgcaccactgccacatcgtggagacgggcaacgagtcgatccgcttcagccgcagtacggcagaggccaagaagcgcatcaaggcgcgcgagcaggcccgcaagggcagcaagtccgagctgccgcaggacgacttctga

SEQ ID NO: 355997 - DNA, 1524 bp, Pseudomonas aeruginosa
atggacatgattggcaggatccggcgtttgcatgcccggaagaacaaatcggagcgcgagatctcgcgcatgacggggctgtcgcgcaacacggttgcgaagtggctgcacggcgaggtggatggcccgccgaagtaccggcgcggggagcagccgaacaagctcactgcgttccacgaggcgctcaggcaggcgttgaaggccgacgcccggcggcccaagcgcgagcgtcgcacggccaaggcgctgtacgccgagatcaggggcgctggctacgacggtggctacacgcgggtgaccgacttcatccgggcgtggcgccagggcgaaggtcaatctgcgagcgccaacgccttcgtgccgctggccttcgagctcggcgaagccttccagttcgactggagcgaggaagggctggtggtgggcgggatctactaccgcatgcaggtctcgcacatgaagctatgcgcttcgcgggccttctggctggtggcctatccgagccaaggccatgagatgttgttcgatgcccatacccgcagctttgcagccctgggcggcgtggcccggcgcggcatctacgacaacatgaagaccgcggtggacaaggtcaagaagggtaagggccggatcgtcaatgagcgcttcgcgaccatgtgtgcgcactacctgtacgacccggacttctgcaacgtcgccagcggctgggagaagggcgtcgtcgagaagaacgtgcaggacagccgccggcgcatctggatcgacgcggccaagcagcgcttcggcagcttcagcgaactcaacgcctggctgggccagcggtgccgggcgttgtgggacgaggtgcgccaccccgagcacgagcagttcagcgtggccgagatgctcgaacacgagcgggcgcatctgatgcccatgccggcgccgttcgatggctacgtcgagaagcccgcgcgcgtgtccagcacctgcctggtatcggtggcgcgcaaccgctactcggtgccgtgcgagctgttcgggcaaatggtcagcaccaggctgtacccgggcagcgtcgtcgtggtggccaacgaccacatcgtcgcgcgccacgaccgcctgagcaacgccggcgagacgcggtatgactggcagcactacatcccgctgctgcagaggaagcccggcgcgctgaggaatggcgcgccgttcgccgacatgcccgagccgctgcagaggctgcgccgtgggctgctgcgcaacccgggcggcgaccgcgtgatggcgcaggtgctggccatcgtgctgagcgccgggctggacgcggtgctggtggcggtggaactggcgctggagaccgggccgcccggcaaggtgagcgtggagcacgtggtcaacgtgctggggcgcctgaatgcggtgccgatgccgcagacggctgcgacgcagctgaaggtgagcacaccgccgctggccaacacggcgcgctacgacagcctgcgtgccgacaacgccaccgaggaggccggccatgacgcgtga

SEQ ID NO: 355998 - DNA, 1131 bp, Pseudomonas aeruginosa
atgctgccggcaacgccagcgaacatgcggccagcgtgcggcacatggcggcggccgtccgttgggaatcggcaatgcgccggcatcgcgttccgcgaaaaagaagagccccgacgtgggggctcgaatgggttgcgggttactcgtctcgtagagcgtcagtccgtccagcacgggcgcgtcggcatcgaacaccaacatgcgaacgtcggcgagcgcagccaggtgcaacacttccacgagggactccggcacgcccttggcccggtgctcctgccgcagctcttcggcggtgatgccctcgacatgctgcaggttcgcatccgtccagggcgtggcgatcagcttcacgccgaccgccgggctgtagggaatgcggaaggccacgaacaaaaaaccgctcggcgtggcgatgtccgccagttcggcgaggaagcggccggcctcctcggtgatgtgcgccgagttgatttcccaagcacggctgtagaacccggtctcgaagcgcaggcggcgtaccacctcgcgcgcggcttcctcggagtaggtatcgccgacgtgcagcggctggccggcttcttcggccatgacggcgtagacgaggtttcgggcgatgccgtggctggggcactgcgcgtccagctcgggcggcacgttctggccttcggtgatcagcgcgaagtcgtcgcagaagacgcaggcatggcgctcgacctggctgtccggcaggtgcgactgcgagacgtgcagcggcagatagctcagcgggcagtcgtcgtcgtaggaaatcgccagcagccgctgcacggacaggccatcgtagccgcggacgaaggggtttttggaatgagacatgggattcctccagcagaggatggccgaggcaatcccctgccggggattgaaccccagcgagtggatgaagtggcaaccggtcagccggccgcggcgtcgggccgccttggtggcgggcggtgcaggtcagtggaagatggtgactcgggacatggccgctcctgcgaaaagaaggagggacatggccccgaacggggacgcatgtccctcgtggggtggggtgaaaggacggtgggttgccaggcgcggctcaccagccgttgtagtgcagcgtga

SEQ ID NO: 355999 - DNA, 789 bp, Pseudomonas aeruginosa
atgactcccacgggttcacaggggatctcgcaatgcaggaagatggtcgctcgaagcctgacgaatgcgagccaccgcctcgctagaaaagcgagaaaggccccgccccttctcagcctccgaggaatcgaaactcggatcacgcaaaaggcggtcgaccagcatcctcaactcagtggtgacgaagcgaagttcaatccaaccaatagatgcttcggactccggtatcaggtgaaacggcaattcaatcagaagagcctctgcgcgcctcaagccaagcaatgccaactcgatatcttcgtgcgcagaattgctttccaagagtacttctatagcgacctggttgacgttgtttgcgtatctcgcgatcgccaccactttcttaagtgcctctgcctcctgcttcttgagcagttcaatttgatgccggctttgagccgatacaacccagatcgccgcaacaatggctccaatggacccaattgcctgcacccaagccggcatttcattcactcgccctaccgaagcaaggatgacatgcaagctccaccccaagaagctaagagaaagaaaaatccatacaacccaaatacttgccaacttcacactttccggaactctgacgctccccatcgcctgcatcccttaataatccaaactcacgaaagcatgagggtagcttggccgaatgattggagggaaactctcatgaacgagtccccccgaacgcatcactcttacccagtctcgcaacaacaagacagaggggacccatcatgcgtagcgtag

SEQ ID NO: 356000 - DNA, 594 bp, Pseudomonas aeruginosa
atggacaggctggccatggccaagcgtttcgccctggcactgctcgtcggcggtgtcgcggcagttgtgctgatggcgttgtatttcggggtgcggccagacctggccgaagtggcgcgcacaccggtgttctgggccaagctcgccttgcccgggagtctcgccctgggctcgttgtggctttccacgcgcctggctcggccgggtgtcgaaggcggtgcggcctgggcgtcgctgtgtctgcccatcatcgttgtgtggctggccgcgatagcggccctgtggcaagcaccgaccgaggcacgcatgcccatgctgctgggcataagctggaaagaatgcccattcaacatcgcgatgctttccgtgccgggttttatctcggtgttctgggccttgcgtggcctggccccgacccgtctgcgcctggcaggcgcaggcggcggcctgcttgccggctccaccgcaaccctggcctactgcctgcactgcccggaaatggaggtaccgttctggggcgtctggtacctgtccggcatgctgctgcccgccctgttcggcgctatcgtcggcccctacctgctgcgctggtaa

SEQ ID NO: 356001 - DNA, 582 bp, Pseudomonas aeruginosa
atggagcgaactacaagctatgaggtcatggccacgcgcgaagagcgcctgcagtcattgcttctgggtgggttggctggcgacgaggccgcataccgcgaattcctcaccgcgctcagttcgcacctgcgcggtttccttcgccgacgcctggcgcagcgcccgggagaggtcgaggacctgttgcaagaggtactgctggccgtgcacaacgcaaggcacacctatcgcgccgaacagccgctgaccgtgtgggtgcaggcgatcgcccgctacaagctggccgatcacttccgtgcgttcgcccgccgcgatgcgctgtccgattcgctggacgaagacatgttcgaggtggaggatagccgcccggcggaggcccggcgtgatctgggcaagctgttacagcacctgcccgagcgtcagcgtctgcccatcattcatgtgaaactggaaggccgttcggtagaggaaacggctcaactgaccggtctttccagttctgcggtcaaggtaggtatccatcgcggcctgaaagcgctggcgatggtgatcagaggtaaacagagccatgaaaacggatga

SEQ ID NO: 356002 - DNA, 273 bp, Pseudomonas aeruginosa
atgaaaagcatcgccctcgctaccgccgcactcgccctcgcctccattgcatccaccgccatggccgacaaccaggccacgccaagcgtggaaaaatgctacggcgtgtccctggccggcaagaacgactgcgccgccggtgccggcaccagttgcgccggcacctccaaggtcgactaccagggcaatgcctggaagaacgtcccggcaggcacctgcacctcgatcaagacccccaagggcatgggttcgctcacgccgatcaagtcctga

SEQ ID NO: 356003 - DNA, 1932 bp, Pseudomonas aeruginosa
atgttcgccgtagtgggtcggttcttcggtaagtcagtccatggcaaattgaccctgggctttggcgcggtgctactgctatcgatcacgctgtccgggatcgccctgcgcagcatcaatcaattgaccgaccgcagcgaagcgctggtcgagagtgcctctctcgccaccctgatcgcggcggttcgcctcaaggaaaacgaattcgaccgcaatggccagagcagtgctgcccaggcctacacccgcgaggtcgagaagctgggtgcgcgggtgaatgaaatccgcgccagcctgggccccgaggccagcgaaaccctggatcacatcagcgccgtggcgggagactacgaacaagcattcgacaagctggtaacggcacgccaccaggcgacaagcgcagaaaaggccatgctccccgccatcgaggccatcgagcagcacttcggcaatgtccgccaggcactgtttgacctgctgccgggcggcgacccgcagagcatcgagcgggcgcgcatgatcgttgagctcgaaaccatcatttcccggctgcgcgagcaggtccagagctacatcgcccgccccacagccgaaggcgaacagcgggtggcccagaccgccgacagcatacgcaatcgcggcaatgaactgtgggagcggctacccaacgacaccctgcaggcgcaactggtggaagggttgcgggccgtgctggcctaccaggaccgggtaaaggagttgcaaagcagcgtgagccagagcgaatcggtgaagcagaccctgctcgcacactccgaggagctgcaacgactcgccacgatcgcctaccagcaacaggtgcaggggcgcgataccgatgtgcgctccgcccatggcgaactgctggtggcccaggcactggcattgctgctgggcctcggcgccgcctggctgatcacccggcagatcgtgccgcaactgcatcgggccctggccctggcacggcacatcgccgccggggacctcaccggcaacctggaccatcgcctgcacgatgaactgggtcagttgatggatgccatgcgggaaatggcgcgtcatctcaggcagatcataggccatatcggtgcgagcaccgaacgcctgacggtatcggcgaccgacctgtcgggcgtggcgacccgcagcagtgccgggctcagcgaccagcgccaccagaccgaacaggtggcgacggccatgggcgaaatggtcgccagcgcccggcatgtggccgaggacgcgcgccaggcctcacagttggcgatcaccaccgaagcccgcagcgtcgagggcgaccgggtcatcagagaagcggtcgagcaattcgaagccctggccagcaatgtgcaggtgtgcaaccaggccatggcccgcctgcgccatgatggcgagcgcatcagtggtgtactcaacgtgattcgtgacgtcgccgacaagaccaacctgctggcgctcaatgccgcaatcgaagccgcccgcgccggtgaatcggggcgcgggttcgccgtggtcgccgatgaagtgcgggcgctggcgcagcgcacccagagttccacgcgggaaatcgaagcgctggtccatgccctgcacaccggcacccaggaagccaccacgctgatggagcgcagcgaaagcatgagccacaccagcgtgcagcttgcgcacagcgccgggcatgtactcgaggaaatccgtgagtcggtggcgtcgatccaggcggccaaccaacagatcgtcgtcgccgcagaccggcagacacagctttccgagcatatcaacgaaaacatcaccaccgtgcgcagcatcaccgaaaactcgaccaaggcgggtgctcgcatcgcctcggccagccaggagctctccagcctgggcgcagaactgaacgagctgatacggcacttcacgttctag

SEQ ID NO: 356004 - DNA, 891 bp, Pseudomonas aeruginosa
atgaacattctccacttgctgggcaagcgccccgcgcgccctgtcatcgacgaagccttgctgtccagcctgctgacgctggcctgggtcgtggaagcccgcgatccctacaccggcggccatctctggcgcgttgcccaatactgtgcgctgctggccgaaaaaagcggcttcgcaccagcggaggtggcgcgccttgccctgggtggtttcgttcacgacctgggcaaggtcggcatcccggatgccatattgagaaagcccggcccgctgaacgatgacgaatacgcggtgatccgcacgcacccggaaatcggccggcgcatgctcgaaacccatccgatagccgcgctggtgatggatgccgtggcctcgcaccacgaaaccccagacggcagcggttatccccacgggctcggcgcagcggatatttccacgatggccgccattaccggtatctgtgacgccttcgacgccatgaccagctcccgcgcctaccgcccgggcatgccgctggacagggcgctgggcatcatcggtcagaacctcggcacgcagttcaatacgcactatggccgcctgttcatcgaactggggcacgagggcctgctcgacgccgtaatggggcataccgacgcgggcattcccctgcgtcgctgcgcgatgtgcggccctaccgtggtcctacagcaggctcacgtcgagggcgatcatgtcttctgcccttcgtgcgccagcggctacgagttggttcgccccaccccggacgctgccctggcactgcgtgcaaccgggcaaaccggcagcgcggacgaccttgcgccccaacccgataccgacctgctcgcccgcctggcccggcaattcagcccggcccgtggcccggcctga

SEQ ID NO: 356005 - DNA, 642 bp, Pseudomonas aeruginosa
atgaggactgacgagctgattaccctgctggcgaccggtgtgccggcggtcgacaagcacctgttcggcaagcgctttgccctggcgctggtggtcagtgtcctgggggccgcgttgctgatgaccctgctgttcggggtacgtcccgatctggcgcaggtggctcgcttgccgcttttctacgccaagctggcgttgccggtcgcgttgctgccgggggcgctgtacctgacgcggcgcaccgcgtgtccgggcgggcgggtcggcggcgcctgggtcatgctgtgcataccgttgctggtgctgtggttggccagtgcctataccctgctggaggcaccgctggccgcccgcttgccattgaccctgggtagaacctggaagggttgcccgttcaagatcctgctgctctcgctccccggtatcgttgccttttcctgggcgctgcgcggcctggcgcccacccggctgcccctggccggggcgggtgccggtgcattggccggtacgctggccaccctggtctattgcctgcactgcccggaaatgaccgtgccgttctggggcgtctggtatgtgctgggcatggccctgcccaccgcattgggggcgttgctggggcgttgtgtgttgcgctggtag

SEQ ID NO: 356006 - DNA, 273 bp, Pseudomonas aeruginosa
atgaaaagcttcgccctcgctaccgccgcactcgccctcgcctccattgcatccaccgccatggccgacaaccaggccacgccaagcgtggaaaaatgctacggcgtctccctggccggcaagaacgactgcgccgccggtgccggcaccagctgcgccggcacctccaaggtcgactaccagggcaatgcctggaagaacgtcccggcaggcacctgcacctcgatcaagacccccaagggcatgggctcgctcacgccgatcaagtcctga

SEQ ID NO: 356007 - DNA, 360 bp, Pseudomonas aeruginosa
  misc_feature (316)..(316): n is a, c, g, or t
atgatgcgccccgacgctaaagttgaaaaagtctacctctaccccaagccggtggatttccgcaaatccattgacggcctggccgctctggtcgagctggatatcaaggtggcggtcttcgaccccgtgctgttcgtcttcctcaatcgcgcgcgcaatcgcgtgaagattttgtattgggagcgcaacggcttctgcctgtggctcaagcgcttggaggctgagcgcttcaagtcgcatccgcagcctggcgacgatgcgatcgtgctgacggcccaggagctgaactggttgctggacggtatcgacctgtggngcaaccggccgcatcaggtgttgaccccgcgattcgtggcctaa

SEQ ID NO: 356008 - DNA, 1536 bp, Pseudomonas aeruginosa
atgcccgaaacccttcctgacgacccgattttgctcaagcagttgctgctgtcggcgagcgtgcagatgtcagaaaaggacggtcagatcgagcggttgcgtgaacaaaatgcgctgctgatccagcgcctatttggccgtaaatccgagcagagcagcgacccggactcaccgcagttggagatcttcaacgaagcggaaagcctggccgaagcgacgcctgaagcaccggtcgatgcggtcgaggaagacgccggcgcaccgaccaagcgccggggcaagcgcacgccgctgccggccgagttgccgcggttggtggtcacccatgagctgccagagcatgaactgacctgcgcctgcggttgccgcaagcaggtcattggcgaggaaaccagcgagcaactggacatcatcccgatgcaaatccgggtgatccggcacgttcgcaagacctacgcctgccagggctgcgaaaccgccccggtgaccgccgacaagccggcccaactgctcgagaaaagcctggccagccccagcgtgctggccatgctgctgaccagcaaatatgccgatggcctgccgctgtatcgcttcgagaaagtgctcagccgtcacggtatcgacatcccccggcagaccctggcgcgttgggtgatccgctgcggcgagcagttgcagcctgtgctcaacctgatgcgcgacacgctgctggacagccccgtgatccactgcgacgaaacccgcgtgcaggtgctcaaagagccggagcgcgacccgagcagccaatcctggatgtgggtgcagaccggcggcccaccagacaagccggtgatcctcttcgactacacaaccagccgtgcgcaggaggtgccactgcgcctgctcgatggttatcgtggctacctgatgaccgatgattacgccggctacaacgccgtggccgcacaggacggtatcgaacgtctggcctgctgggcgcatgcgcgccgtaaatttatcgaggcgcaaaaggtgcaacccaagggtaaaaccgggcgtgccgacatcgcactggggctgatcaacaagctctacggcatcgagcgcgaactcaaggatgccagcgatgagcagcgtcaccggggccgccaacagcacagccagccactccttgagcagctcaagacctggctggagaaaacccagccccaggttacggcgcagaatgccttgggcaaggcactgagctacctggcccgcaactggagccgactcgaacgctacatcgaggctggccacctgccgatcgacaacaacgccgccgagcgcgcgatccggcccttcgtcatcggccgcaagaactggctgttcagcgacacgcccaagggcgcgaccgccagcgcccaactctatagcctggtggaaaccgccaaggccaacggccaggaaccctacgcctggctgcgctatgtcctcgaacgcctgccgcaggccaatagcgtcgaggattacaacgcgctgttgccatggaactgcccgcccgcgatgccattgtag

SEQ ID NO: 356009 - DNA, 468 bp, Pseudomonas aeruginosa
atgagtccgcttcataaaatgcggttacttttcctccttggcatgcttgccgggattggcacggcttccacgttagtactgagcgccttacaggaaaacatcaacctcttttacacaccaacgcagatcgccagcggcgaggctccccttaatacgcggcttcgtgccggcggaatggtcgaggcggggtctctgcatcgctcggccgacacgctcgacgtgtcgttcgtggtcactgatttcaaaaaatcggtaaccatcacctatcgcggcatccttccagatctattccgcgaaggtcagggcatcgttgctctgggcaaactcaacgccgacggtgtggttgtagccgatgaagtactggccaagcacgacgagaggtacatgccacctgaagtctccaaagccttaaaagacagcggccagtccgtccagagtacctctggaattccagcgaaaaaagggtaa

SEQ ID NO: 356010 - DNA, 306 bp, Pseudomonas aeruginosa
atggctaccaatggtatgcgccccatccatcctggggaaatattgcgcgatgagtttctgatggagttggatatctctccagctgctctagcacgcgctttgaaagtctccgctccgacagtgaacgatatcgttcgtgagcagcgtggtatctccgcagatatggcgattcgtctcgggcgttactttgatacgtccgctcagttctggatgaatctccagagtgagtactcgttagcaactgcttatgcggcgaatggcgagcagatcgaacatgagattgagccgctgcttgctcacggatag

SEQ ID NO: 356011 - DNA, 675 bp, Pseudomonas aeruginosa
atggcaaaaattgccacggagatcgcatatggatactcactacttcaagatgcattaattgaaaaaggcctagtaatagacgcaaacaatcttgtaagaacggagacaagagacagcatcagtctttgctgggccacagccccaaacctttcatacctatttggcggccacacaaccattgagcactacattgaaatactaggaagacgcgactttaactttgcctttatagatggcggaatcatgcaaatttcctataaaatagaaaacaatgaaataacaaagcacagactatgctacgtaccctgcccgataagttacaaaaaggaagagtgggaaggatatactattgacgaagttctctccctgcaagacagccagtctctcagagaaagtataaaaatggcttctcccgtaagattcgactttgatttaaacttcagagatgaaaaacatgagcactctcatgttacaataaacaaagactcatgcagagtccctgcctatggcgctattagcctagggcatttcgcaagatttattcttcgatatttctatgaaacagagatatctatagaaactgacctcaacgaggttcgaccgactctttatcgaagaacactcccctccgaaacaagccatgaaattcatttcgacacatcgacacgttactaa

SEQ ID NO: 356012 - DNA, 2118 bp, Pseudomonas aeruginosa
atgaaacagccagtaattggaaccaaaattaacaacgaggcaatagactcactcatcgacgccctagaagcagttgcagatgaggaagcagctttctatgtaggctaccctgttgccgcaaccatagacgcctcagttaaaattccggctctactaatatccccccaatatggactcatttgcttcgatgtcaggccaacagctaaaacaaatgaactgccagagcttaagaatagccaacgagggatagtcctcccccttaaatcgaaacttctgcagcatacagaattagccggagacgatgaccttgcattcaaggtcaacgcaattacattctctaacaacgcggatgatgataaaacactaatcgaaaacaagatcgtcggccccaaatacttggagagcgcccttcaaagctgcagccctttccctccccaattactcaaacaaataaacgcagcaatagaacgagtagcaaatattcgcccaaaggctaagagagctattgcggtcaccccaaaaagcaaaggctctatcctcaaaataattgagaacgagattgcaaaccttgactcttggcaaaaggctgcggcaatcgaaacacctgacggtccacagcgcataagaggacttgcgggttctggcaaaaccatcgtattggcactgaaggccgcctacctacatggcgaacacccagaatggaaaatctgtgtcacgtaccatactcggtcgctaacacagcaatttagctcgctaatcaagcgtttttacttcgatgactatcgcgacgagcctaacgactccaacctgaaaattatgcactcctttggttcaatgggccaaagaggtgtatatgcagaaatatgcctcgcctacggaatcccgcctaaagacttcggatatgccaaacgaacctatggcttcaataacgcatttcgtgggatttgtacggaactgctaaccgtagtagaacaggcccccaaaccgctcttcgacgcaattctgattgatgaagcgcaagatcttccaaaagaattcctacgcctcgcatatctatgcacaagaaagcatcgcgtagtgtgggcatatgacgacctccagaatcttggggactatcaaatgctttctctaaaggagacttttggaacaaatgagtatggagatgcccttgtgaggctggagaacgaatccaaaaagcctcgacaagacattatacttcccaagtgctatagaaacaccccttggactctggtcactgctcacgcgctggggtcaggaacctatcgcgatcccagtatggtacaacaccctgacgacccacaactttggtcagatattggatatagcgtccaaggtggcgaactggagcttgggaaacccgtagtattgcaaaggagctcagatgcctctccagacttcttttatgagctcatggacgccgaagactgtgtacagttccatcgttttagctcagatagagatcaattcctagctgtagcacaaatgattaaggaagacgtcacagccggtgagctttatgcacatgacattgtcgttgtattccctaacgctattgatgctgaaaaaagagcaatgtatctgcgccaatttcttgccgatcaaggaattgactcacatatagttggagtaaccagcagcaaagactctttccatgcggaaggaaaagttgctctaacgggaccatatcgagcaaaaggaaacgaagcacccatggtgtacttagttgacgctgactggtgtgcatctggctttgaacttattaagaaaagaaatatactcttcacagcgattactcgctctagaggctgggtaagagtattaggactcaaccagggaatggacttactgatgcaagaattccaaactctgaagcaaaaaaactacaagttagactttaaaatcccaactcttgaagagctacgacaaatgcgtactctttaccgagatcttactagcgatgacagaaaaaaagcagatgacttcaagaaagcattcgaaaagctaaatgctagcgggttagaaatgcaagcaattctgcaaacccttccgaaagatactatcgagcagatgctcagagcacttaaagaagcggagtaa

SEQ ID NO: 356013 - DNA, 627 bp, Pseudomonas aeruginosa
atgtgcttgtacgagctccagcagcgggtgtcggagtctgtgcagccagatgcgggcatgaccatttcctactcggggcagttcgagttcctgcaacgcgccaatgcgcgcctgacttgggtggttccggcgacactgctgattatcttcgtgctgctctatctgaccttcaatcgtttggccgaggccttgctgatcatggctaccttaccgttcgccctgactggcggtgtctggctgctctactggctgggcttcaacctttcggtggccactggcgtcggctttattgcgttggccggggtgtcggcggagttcggggtgatcatgctgatctacctgcagaacgcctggcattcccgagttgaagcgggtcgcacaaacaaccctgctttgcttgagtcaattcgagagggggcggtgctgcgcgtgcggccgaaggtgatgacggtcgcggtgatcattgccggtctattgccgatcctctggggcgagggagcgggatccgaagtcatgaagcgcatcgccgcaccgatggtaggcgggatgattaccgcaccgttgttgtcgatgctggtgttgccggcagcctattggttgatccggcgcagaggacaggctaaatga

SEQ ID NO: 356014 - DNA, 789 bp, Pseudomonas aeruginosa
atgcgcctgaatgactggcagcgcgaagtgcaggcctatctgctgagccctgatgcgcagcccaacccggtgctgcaggcgagccttctgggcagcgcggccctgagtgccgagcagggcttggcgatctaccacaacgcctaccgcgcgcggctactggaggctttgcgcggtgattacccagctgtgcatggctggctcggtgatgaggaattcgacgccctggcgctggcctatctgcgcgttcatccctcgcagcacttcagcctgcgctggcttggtgcgcagctcgccgactttatcgagggttatctagtacccgcgcaggccgcgccgctgagtgagctggcgcgcttggagtgggcgtttaccctagccttcgatgcgcccgaagggcagcccatgagcctgacgcagatggccgagatgcctgtcgaggattggccaactctgcaactgcgtctgctgcccagcgtgcagtggcaggtgtgcgggcataacagcctggcaatctggagagcatgcaaggagcaaggcgagtttcccggtagcctggtattggccgaagccgaggtttgcctgatctggcgtgagcagttgatcacccgtttccgcagcttggcggcagctgaagccgctgcattgcagggcatgaacgagcagggatggacctttgccgaactctgcgcgcagctcagtgatctgggtgaaaaagcaccgctgcaagctgtaacctggctacgccagtggctgagtgacgggctgctgcaacggcactcgatggactga

SEQ ID NO: 356015 - DNA, 846 bp, Pseudomonas aeruginosa
atgaatgctcaacgcggcagtctgggctttggcctgggtctacgcagtacctactaccaagccattctcgagcaacggccggccatcgactggttcgagatcgtctcggaaaattacctggtggcgggcggtaaggccctctactttcttgatgccatcggcgagcactacccgctggtgatgcatggcgtgtcgctgtcgattggcggcccgcatgagctggaccgcgactacctgcgccagctcaaacacctcgccgagcgggtgcagccggcgtggatctccgatcacctgtgctggagccggggcaatgcccaccagctgcatgacctgctgccgctgccctacaccgaagagagcctgcagcatgtggccgcgcgggtgcgccaggtgcaggatgtaatcgaacggccgctggtgctggaaaacgtctccagttacttgcgttgcgccgatgatcaattcagcgaatggcagtttctcgccgcgctcagcgagctcagtggctgcgagctgctgctggacgttaacaacgtctatgtcagtgcgcgcaatcatggttttgatgcgtgggagttcatcagcagcctgcccaagcagcgtgtgcgtcagttgcacctggccggccacagtgactacggcagctacctgattgacacccatgatcagccggtcagcgacccggtctggcagctctaccaacgcacgctgcagcacctcgggccggtttccaccttgctcgagcgagatgatcatttccccgttctggatgaactgctcggcgagcttgacaaggcccgccgtgtggccgccgacgcgcttcaggggtctgcccgatgcgcctga

SEQ ID NO: 356016 - DNA, 1383 bp, Pseudomonas aeruginosa
atgaacatcatcgctacctgcagccgtcagccctggaacaaaggaaaactggtcgggcagaaaaccccgctccgactgagagatatctgggccatccgagtaaggcttcaaattgcagaaagaagccgggacttggccctcttcgatctggccatcgacagcaagcttcgagcctgcgacttaaccaagctccgtgtacgcgacgttgcccatggtgagcacgtgtcagcacgagccatggtaatgcagcagaaaacgcagcgaccagtgcaattcgagatcactgagcaaacacgatctgctctcgcggcttggatcaatcaggcccagctacgcagcgaggactgccttttcccgagccggttgcatacctcagagcatctatctactcgacaatacgctcgaatcgtcaaaggctgggtgaaagccattggtcttgatccagccatagatgtcgggctgaacggcgttgtgacacttatttcgggtgatgcgcgaatactggtgcgtcgaccttttcatgaaggagacatcggcaaggatctctccaagggtcccttgttcactgagcttttgcccaagagaccctacgggacggccaccgcccgatctgctgtcgatggtgttgatcgtatcgttggtttccgacgagtcgaggattacccgctgatcacattcgttgccttggatcgctacgaaaatctggcagcttggcgaaaggagaccctcttaagtcttggcttgatgttcttgctcctctcgattctcggcacccttagctatcgattaattcgtctgatgcagcagcaaaatcatgtgcagcgggcgcttttcctggcgcaggagcagttgctggaaaacgcgacgaagcttcaagcacaagctctggaggatggcctgaccgggctggcgaatcggcgcttcttcgaccagtacctaactgacgaaatggggcgggccaggagagagcgtcagaaactggccttgttgatgctcgatgttgaccatttcaagcgctttaacgatgagcatggtcaccttgccggtgacgaatgcttacgggctgtagctgagaagatccgtcaaaccatcaagcgccctggtgatatggcttttcgatacggcggagaggagtttgcagtagttcttcctggggcggactcccaaggcgccatggttgtggcagaaaccattcgcaaggcaatagaaacggcagagtttgtcggtacgcagggcacagcgttgagggtgacggtcagtatcggtttagtctccatacagccgacacctgaagatactccagacctcatcctgtcagccgcagacaaggccctttacagcgccaagacatctggtcggaatagaacagtcgatgcgctctag

SEQ ID NO: 356017 - DNA, 2994 bp, Pseudomonas aeruginosa; identical to SEQ ID NO: 332282

SEQ ID NO: 356018 - DNA, 297 bp, Pseudomonas aeruginosa
atgaaatcacttttgagccaaacagcagccctgatgctggtgctcgccagtagcgtagtcacggtccatgcggaggacggtagcgagcgtctcgcgaatttcagactgcaaaatgacgcgatgattgccgagcgctccgcggtatcaatagaggagcgtgtggcgcagattatggaaacgcagccaaccgcctctggtccgcaggacaacctgcaatggtccgagggccagggggctacgaatcaaaatcgcgcctcccaactgaaaattcgcgacgttcaccgcagccagaaataa

SEQ ID NO: 356019 - DNA, 276 bp, Pseudomonas aeruginosa
atgcgcaaactgctgatcgccgcgcttttcgccttgcccctcgtggcgctggcggctcccccgaaaaccgtcacgctcgacgtgcagaacatgacgtgcggactctgtccgatcacggtcaagaagtcgctggagaaggtgtccggtgtgagtgacgtccaggtcaatttcgaccagaagacggcgaccgtcacctacgatcccgataaggcccagcccgaggcactgactgaggcgaccgcgaacgcgggttatccctcaagcgtgcagaagtga

SEQ ID NO: 356020 - DNA, 477 bp, Pseudomonas aeruginosa
atggcagcgccagccgtagctgcccccgtatcgcagttcttgcgcgcactggtgctctctgcaggcgtgtatgccagcaccccccatgcccaggaggtgccgccaccggcctaccagcttgccgcccagcgcgcgggcatcccttcgacggtgctctacgccgtggccttgcaggagagcggcatccggcgcaacgggcgcatcgtcccatggccgtggtccctcaacgtcgccggccaatcgcgccgcttcgccacgcgcgccgacgcctgcgctggcctgcagcaggcgatgcgcgccacgccgcacacgcgcatcgacgcgggcctgggccagatcaaccttggctaccaccgccccgctggcggcgagcccgccgtccgctatcggcgcagcgtgtcccgccaccttgcccgcgtgcagggcacgcgcccaaccgccgcggtcttcgccgcgcgccaggagacctccccatga

SEQ ID NO: 356021 - DNA, 291 bp, Pseudomonas aeruginosa; identical to SEQ ID NO: 328687

SEQ ID NO: 356022 - DNA, 321 bp, Pseudomonas aeruginosa
atgccggtttcgttacccttcgagcaagtcgatgtcttctccgaacagcccttcaaaggcaacgccgttgccgtggtgattggcgccgaccgcctgagcagccggcagatgctggagttcgccgcctggacccagttgagcgagacgaccttcctgttgcggccgaccactgccgaagcagactaccgcgtaagaatcttcaccccgttgcgggagttgccctttgccgggcatccgacgctggggagctgccaggtctggctgaaccaggggggggcaatgctgctgacgagatcgtccaggaatgtctggcgggcctga

SEQ ID NO: 356023 - DNA, 936 bp, Pseudomonas aeruginosa
gtggccggacggcacgataatcctgccttcacgcactcggttacgaagtcatgtctctgttttccctgtgccctggagatcggcctgatcttcagcctcgtggcactcggcgtgttcatctccttccgcctgctgcgcttccccgacctcacggtggacggcagcttcccgctcggcggcgcggtctgcgcgaccctcatcgcccttggctgggacccgtacagcgcgaccctggcggccaccgccgccggtgcactggccgggctggccaccggcctgctcaacgtcaagctgaagatcatggacctgctcgccagcatcctgatgatgatcgcgctctactcgatcaacctgcgcatcatgggcaagcccaacgtaccgctgatcgccgagccgacattgttcaccctgctgcagccggaatggctcagcgactacgtgttccggccgctgctgctggtgttcatcgtgatcgccgcgaagctgctgctggactggttcttcaccacccagaaaggcctggcgatccgcgccaccggctccaacccgcggatggcccgtgcccagggggtcaacaccggcggcatgatcctgctcggcatggccatctccaacgcgctggtggcgttggccggcgcgctgttcgcgcagacccagggcggcgccgatatctccatgggtatcggcaccatcgtcatcggcctggcggcggtgatcgtcggcgagagcatcctgccctcgcgccggctgatcctggcgaccctcgcggtgatcctcggtgccatcgtctaccgcttcttcatcgccctggcgctgaacagcgatttcatcggcttgcaggcccaggacctgaacctggtcaccgcggtgctggtcaccgtcgccctggtgattccgatgatgaagaaacgcctgctcggcaagaagggagcctga

SEQ ID NO: 356024 - DNA, 330 bp, Pseudomonas aeruginosa
atgacaggcgcaacccgcaaacccggtttcaccgtcgccgtgctggcgaccctgctggccgccgtggtggtcctgctcggcgcctatacccggctgacccacgccggcctcggctgtccggactggccaggctgctacggcttcgtccacgtgccgctgagcgaggcgcaactggcccacgccgaactgcacttccccgacgccccggtggaggcacagaagggctggaacgagatgatccaccgctatttcgccggcgccctcggcctgctcaccttggcctggcgttgcatgcgctggtccgccgcgggcgcgacggccaaccgctga

SEQ ID NO: 356025 - DNA, 1911 bp, Pseudomonas aeruginosa
atgacgtcccccaaaaataactcgaccttgtttataaggcgttttttgatcataaaaggcagtcacgctgtttacgatcagacatttcacttaggtatcaatattattcgtggcgtcaatagtgttggtaaatccacccttatggatttaatgttctatggcctaggtggtgacctgaaagaggatcgatggacgattgaggctgcaacttgtactcgcgttctgcttgagctttttattaacggtcgacccattactatttgccgccatatagagccaggcagtcgcccaccaatcatgatgttttctggcgattatgattcgtctcagaaaagctctgaatggagtcaatacggctctgtacgcacagagaacaaacatagcttttctcagcaatttttcgagctacttggatggcccgctcacaaggctgaagaaggcgacgcactcacaatccatcaggttcttaggcttatatatgtagatcaaggaaccgccgtcaataaaattctacgatctgagcctgcctttgacaaagcaagcatgcgtcaagctatcggggagttcttgcttggcgttgaccaacttgactcttatgagcttagacaaaagctttcccgcgcagaggcagaattcaataagatatatggccagttagactctgtttacaaattcatatccccaaccgaaggtgttttacgcacagaacatcttgagaatgagcttaaagaagctggcgagaagctttcatcgttaatgcgcgagagagagcaggtaatgctactacctgacgtccagcgagatggtgaggcacagaaaaaagctgagcaacttgctgcagaaatatcatcattagctcaggatataggcattcgaactcaacgaagggctgagctccacgatgaagtcgttgaatctgagctatttattcagtcaatagatcaacgtattaaatctttgcaagagtccagagctgcatcgaaattttttggtggggttcaattcaaatactgtccttcatgtctttcacctttaagtgagtctccttccgatagctgccacctatgtaaaggctcagtcgacgaagagagcaagcaaagcggttatctcgctgctcttaacgagctgaactttcaaaaaagagaaagcactaaggttcttgaagagtacaggctccgtctcagggaatatgacagtttcatcgcaattgagctcagcaagcttgcaacaatcaaaggcattcataggaatgcgcttatagtaacaaacgaacaaacactaaagctaaatcagctatcaatggaaatcggcgcaactgaagagagaataaataatttaaaatctaaggcaaaattaatctctacagttgaaagcctcgcagaaaagaaagataagctcaacactgaaattagcgcaataaagagcacgcttcttgaacaggcagccatgaatgaaggcagaaaagaagaagtggcatcaagcctctctcaattaactgtaaatcttttggagcaggacggcggctatgagccttcttttgtcgaacccgacaagtttgaattcgattttggtcgcgaccttatgcttgtcgacggcagatcgaagttttcttccagctcagagactgtagtgaaaaatagtttccatctagccattcttcaacaatcgttaaaagactctctctttagataccctaggctcctcctgatggataatattgaagacaaaggaatggcgcctgagagaagtcaaaacttccagcgagtgatagttgagtctatgcaggagtatcatgaccaggagtttcagatcatctttactacatcgatgattgatcccgatctgaatggatcggaaatgtgtgtagggccattctacgctaaaggaatgcatacccttaattttggctag

SEQ ID NO: 356026 - DNA, 621 bp, Pseudomonas aeruginosa
atgatcggcgcccagggagaagttgtcgttgaccttgaacgacagggagccggtcaggccgatcgtctcgatcttggtgtccaccgcgaaatcgcggcctttccagttcgggtcccaggtgctgcgcattcccatcggaacgacctggctcagaccgaaggcgaagcggtcgttgatcggtacgaccaggaagccggtcggcagccacgcgccgaatccggcctggccgccatcgttggtacccagctcgggggtgcccggcccgtcctggtagccgccggtcatgggattgccctggtagtcgtaggcatcgccgttgtacttgatgtcgatatcggcgtagttgatcgtcaactgggcgatccgcttgtcgatgaaagccatggccgccgggttgttgaacgcggcgctcggatcgttgggaaacagcgagccgcctgccatcgcacggccccagcccgccgtgttggtggtcggtaccatgaagccgccggcttgtgcctgggacgtgccgaacagtccgccgacgatcagggcgcagagcaatggcaatggttttctggcaaacaggcaggaaatatcgtttttgttgttcaaggtttcacccctggtggctgctag

SEQ ID NO: 356027 - DNA, 504 bp, Pseudomonas aeruginosa
gtgaccgacgtcgccggaatggcgctgcccgtcatcggtcatcgctggatcggcatgggccgagccgagcggtcggcgttccgcagcctggtctatgcgctgcgaggccagcagaagccgctatgggtgccgacccacgccgacgacctgaccctagtcgccaccgtctcgcagctgtccactgcgctggacgtgcgcaatatcggctatgcccgtttcgccaatgggcgaccgggtcgtcgcgatatccgcatcgagctgtacgacggcaccgtctatcaccgccgcattctcaccagcaccgagctggacgccgacaccgagcgcttggccatcgacgccgccctgggccgcctggtcgagccgaccgatgtagcgcgcatctgtttcatggcgctctgtagcgccgccagcgacgtggtcgagattgagcacgtcaccgatagcgagggcgtcgcaaccgccgcgctgacattcaaaggggttcgtgacgatgagttttaa

SEQ ID NO: 356028 - DNA, 1206 bp, Pseudomonas aeruginosa
atgaacttcccctggcgcgacggcaaccgcgtagaactgctgatcaacggcgaagagtactttccgcgcctgttccagtgcatcgccgaggcgcgccgggagatcctcctggaaaccttcatcatcttcgaggacgaggtcggccggcagttgcaggaagccctcagcgccgccgccgagcgcggtgtcgaggtgcaggtcacggtggacggctacggcaccgcctcgctcagcccggactacctggccaggctgaccgcctccggggttcgcgtgcacctgttcgacccgcgcccgcgcctgctcggcatgcgcaccaacctgtttcgccggttgcaccgcaagctggtggtgatcgatcgccggcaggccttcgtcggcggcatcaattacggcgaggaccacctggtacgtcgcggcaacatggccaagcaggactacgcggtgcgcgtcgagggcccggtggtgcgcgatatccgccaggcctgcctggcgctgctcgaaccggacgccgactacccgccgttgcggccgtcgggcgccgggcagccggcgcgggtgcgcctggtgatccgcgacaacgaccagtccagcgacgacatcgagcgcgagtacctgcaggcgatccgccaggcgcggcgacgcctgctgatcgccaacgcctatttcttccccggctaccgcctgcttcgcgagctgcgcgatgcggcgcgccgcggcgtgcgcgtcgacctggtactacagggcatgccggacatgccgctggtgcgcctgtgcagccggctgctctacgactacctgctgcgcgagggcgtgcgtatccacgaatactgccagcgtccgctgcacggcaaggtcgcggtgatcgacgacgactggtcgaccatcggttcgagcaatctcgatcccctcagcctgtcgctgaacctggaggccaacctggtgatccgcgacgtcgccttcaacggccagctctaccagcacctgcgcgagctggcgcgccgccactgccggcgcatcagccgccgccacgcgaggcgcggctactggtggcgagcgccgctgattttcctcggcttccacttttccaggcactttccggctatcgccggttgggtacccgcccatctgccacgcctgaaatcgctggagccgcgtccgtcgcggcgctggcaggaacgccagggccagcggggcaacccatga

SEQ ID NO: 356029 - DNA, 144 bp, Pseudomonas aeruginosa
atgaacaacctgatccgtttgcgcgatggcgtcgccgaggtctgccgcgacgatccctggcaactcctgcgcgagttgcccgacgcgctgccgccggggccgttgctgctgcctctggcggcctggctggagcgccgcggctag

SEQ ID NO: 356030 - DNA, 204 bp, Pseudomonas aeruginosa
atgccggcctacccgtggctggtggagaacaagctcgacggcaaggacatcgagaagaagctcgaagtgatgcgcaccctcggcgtgccctataccgacgaagacatcaagggcgccaaggactcgctgaaaggcaagaccgagatggacgccgtggtcgcctacctgcaggtgctcggcacctcgatcaagaacaaacggtga

SEQ ID NO: 356031 - DNA, 930 bp, Pseudomonas aeruginosa
gtgacggtccatccctcgcgggtcaccaacgtggtcaccggctacaactacagcaagaagggcagcagccgcggcggcggtttctcgccggcattcgggatcaatttcgagctggccccggataccttcgtctacgcctcctacaccgaaggcctgcgcctgccgtcgctgttcgagaccagccagggcactctccaggtcgagccgggcaaggacctcaagcctgagcgttcgcgcagctgggagatcggtgccagcgcgctgcgcgacagcctgttggccgacggcgactcggcggcgatcaagctggcctacttcaacaacaccatcaagaactacatcacccgctattacgatccgggccagatgggcctgatgaccttcagcaacaccgacagctaccgcaccagcggtctcgaactgcaatcgcactacgacgcagggcgggtgttcgccgacctgtcggcgacctactacctgaagaccgagacctgcgacgccgccttcgccgccaggctgcgcgccggcgccaaccgctaccagcgcaccgagaacacgccgaactgcacaccgggcagcttcatgggctcctataccaacacgcagaacccgccgcggctggcgaccaacctgaccgccggcctgcgcttcttcgaccaggccctgaccctgggcgggcgcatgacctatacctccggccccaccgccacggcggacaagccctggcaggtcggcgccaccacaccgcagatcgagtaccgctcggtgcagttgttcgacctgttcctcaagtacaagctgttcgagcacaccgaactgaatgcctcgctgcagaacctcaccgaccgctattacctcgacccgctggcacagagtttcatgcccgcgcccgggcgtaccctgcgggtggggatgcaggcgaagttctga

SEQ ID NO: 356032 - DNA, 657 bp, Pseudomonas aeruginosa
gtggccggcctgagcgccggcagtgcgcagccggacaaggcccatgcctacccgctggcgaccctggccacgcagactccggccgaagtcgccgagcacgacggcgaggccgctgcggagagcttccgcgccctgcgtgcgcatccgccgctggagcagcgcggtcctgggcagttgatcgactataccgccgccaccctggacaagagcttcgcggtctatcgcgaaggcgaccgcgaccaggcctacgacctgtcggtggcggcctacctggagggcttcgagctggtggaaagctcgctggacaacgtcgacgccgatttgcgccgctccaccgagaagcagctgatggcctaccgccaggcgttgcgcgatggcctcccggaaacccaggtggcgcaacagctggagctggccaagggcaagctggcagaggccgccaagcagcttggcggcgactcgctgagtttctccatcagtttcgtttccgccttgttgatcctgttgcgcgaaggggtagaggcaatcctggtgcttgccgccatcctcgccttcctgcgcaataccgggcaggaaagtgccgtgcgtggcgtgcacgtcggctggggctggccttcgtcgccggcttcgccacctgggcgttggccgcctatgtga

SEQ ID NO: 356033 - DNA, 3348 bp, Pseudomonas aeruginosa
atgagcgagctcaatgacgaacagtcaggattcgaagacaccgcgatcgccatcgtcggcatggcatgccgcttcccgggtgccaattcagtgcatcaatactggcagaatctcctgaatggcgtggagagcatcgatgtctcccaagatcaggctggcagaattcacgccaaggcgcagatcgagcacatcgagtgctttgatcacgaatttttcggcttcagcctcaaggaggcgatgttgttggatccgcaacaacgggtgttgctcgaatgtgcgtgggaagcgatggaagatgccgcgcttcatggccgaacagcagccactggggtgttctgcggtgcgggtccaagttcatatttcattaacaatgtctatggcttgcaagcacacgacagtgcatgcgccctgtatcagtcttctgaagcgctcgcccgcttcatggccactgacaaggaattccttgccagcagaattgcctacaaactcgattgccgtgggccggcggtgaatgttcaggccgcgtgcgcaacctctttgtttggcgtccaggctgccgtacaggccctactcctaggcgaatgcgagagcgcggtggtgggcgccagtgcaatctcggtacctcagacgattccttatttcttcgagcctgggatgccgttcagctcagacggccactgccgtccgttcgacgcccaggccagcggcacgatctttggttccggggcggcggtcattgtgctcaagcgactgagcgacgcgcttgcccaaggcgatgagattcatgcgctcattcgtggtattgcaaccaacaatgacggcgctcaccgggcaggcatgtcggcgccatccgtggcaggccagactcaagtggtgagtgaggcgttgagtcttgcagaaagctcgccggagcgcatccactacatcgaggcccacggcaccgccacgccaattggcgacccgattgaaatcaaagccttggccaacgtcttcgctgaacgctccaggcagtcactctgctatctgggcagcgtcaagggcaacatcggccacttgggatgggcagcaggcatggcgggactgatcaaagggatcatgatcgccaagtaccgcaagattccggcgacgctacatctacaaacttacaatccagaactgcacatcgaagacacgccatttgaagtcaaccggaacacgattgatcttgatgtcgatcgtgtccagatcggcgtcagcagcttcggcttgggtggcaacaacgcccatttgatcctggaaacggcgcctacgcacgctcatgccccagcagtgcacgcgctcccggcaggtctcgttcctctgtcagcacgctccccgcaagccctacgtgaattgatagcgcagtacagggagtttctacatacacagccggatgaggcctacgccacattcgtggccaacctgtggcaacggcgcacgcactttgaccatcgcgcttgcctggtcgctaccgaccgctcacaagccttgcagggcctgcaagacatgcaggacatgccactacccatcaggcactcgcagccggttcgagtcgctttgatgttctcgggccagggcggcgaacatcgaggcatggctcgcgcgctgtatgagcgagagcccgttttccgccaggcagtggatgagttcgacgcgatctgcagcacgacgttcgcggcacgggcatcgcaattactgttcgatgaccacttcagtggcgcgctcgaaacggatatctctcgctctcagcctttgatcttcatcgtgcaagtggcgatggcacgcttgctcctgagcaaccttcatacacctgccgcgttactggggcacagcctgggagaatatgctgcggcctgcgtcgcaggcgtcttcacccctgagcaaggcttcatgatcgtcaccgagcgcagccgtctactgcattcgatcggcgagcagggcgccatgctgatgatcgcaacggaccaggaacaggtcttcgggctgatgcaagcgtgtggcgtcaacgcatccatcgcggcaaccaatacgcagaccaacaccgtagtatcgggaagcgttgccgacatcgagaccctgatgcgacacgctgatgcctgcgcagtcacccaccagcgcctaaacatcagcagaccgggacattcggcgctcctggaccccttgctggaacagttcgaggcgttcgtctcgcagttcgaactggcctccccgtccatgccgctgatctcgggcctgaccggaacaatggcagacagcactgtggcacatgccgcttactggcgtcgccaactgcgcgagaccgttaactggcagagcgcttacgcctgcgccgtggagcgagggtgttcccatttcgtcgaggtgggcgtgtccagtgccttgtctgcgatggcggtcgggcaatccccttcagaggtcatcgttcttccaatgactcgcaagggacgcgctagcgatcagcagtacctggcggtgctcgcacggctctacagcgatggcgcccaactcagcagttcgctggcaacgtcgccccacttgctcgaaggattgccaagttatccatttcaacgggtgcgctgctggatcgaaagcaacgtccctgaggcgagcacaccaagcctctacaaaaccacttggcatccactttcctgcgaaaacgctcaatcgatcagcacgcccccaacgaacgtgttgttgctcaccccagattcgcattccagatactgctcagcactgcaacgggctttcggccaagtctgggctgtggactcggacccctggatgagggctgcccaaggacccgatcactgcgtgcctgccgcaatcgacacgctttggcgagagtacccggaaggattcgactgcgtttacgcagacctgactcatctgccgacagacgagccagacgcggcagtgatggtgtgtgcctatcttctgagcatcgtgcgtagtctgacgcgaacgtacgcacaactgcctcggctttgtgcgatctgtgcaagtccgggcgcaatggcccatcccgatcatccttcagcactcgctactagcgtggccgccttgttccgcacggtcatgatcgagtgtccacaactgcgggcgtgcgtggtgcatttcgtccagcattcgcctgcgcagctggatgatgaaaacgagtcgagggtgttacggcaggtgctgcacagcgatgaggcgctggtgcactgtagcgacggcactgctcaggtcccgcgcctggaggcagcgaacctcgagcagacaccaatgaagttcgacaacggcataacgtatctactgctgggggcggcggagggattggcaggcatttga

SEQ ID NO: 356034 - DNA, 1809 bp, Pseudomonas aeruginosa
atgcggccgacagatgaactgcaggcaatcatgcgtagccatcctcaggtccactaccactgtatggataccagcagtgaacaagggcgagaagaatgtcgtgcttgggccagcagcgctcgcctgggcaagctgtgcctgttcaatctggcggtggatctgcaagacaagttgtacgaagacgtcagcatcgaggatctgcgacgggcgttcgcagccaaatgcacagccatcctcacgctttgcactgtgcttgccgaacaaggcttgcagatccagtgggtgatcaacttctcatccgctactgcgttgctgggcaatggaggacaagcggcctacggggctgccagcgccttccttgacgcattgccaacccagcgctttgccgccgcagccaaagtctccaccatcaactggggcgtttggctcgacgccggtgctctacgcgatcagcctcaacgtcaacacatcttgcaagccggcggactgctggggcactcgagcgcccaaggcatcgattacttgagtcaactgatggcccaaccgccgggcaacaacgcattcatgaagttggacgtcgagcagctcgctgcccgctcgcccgcatgcgccaggttgcttgagcagttgaccccgtcaacccaggcaagtgcgatctcgaccccggattctctcaccctggctgagaggctcagtacctgtcacgacgagcgagccaggcgcttggagctcgagccgtggctgatgaagaccgtggacaacctggtagggctgaacgcctcgacacaacgcagcttccaggacatcagccaggcgacgctggccgagttgggtttcgactcactggcaaaggtgcaattgcgcaatgcactcaccacgcagttgggcattgattacagcattaagcaactgcagcagatcgccaatatggacgcgctcgcgcaggtggtcgcaaccttgaccgggaccgaacaatggcgagcgcctggcgctcgaccgcagtcacaggatggcgtggaaacaggggagtccctcgtgtcgatccagcaggctcgctggctttcgctgatcgccaaagggtacggcctgcgggtcattccctatcgaattcatgcgccgcttcagcgggagcattgctatgcggccttgtctcaagtgctggacgaagaaccgctgctgcgcacctttttcccgcaaggtagaccgcagatccgctcgacccacgaagtactggacagcttcgacgcgcttttcgtggatctgcgagatgtggccgatccagcccagcagattggcgagcaggtgcgcgcaatggctcgcacgctaccccagccgcaggtgaacgtgacctgggcactgcgtttcattgacgtgggagcaccttttttcatcgcgctgctaggtgtgcagcacctggagttcgatggcaaatcgctgacgctgatgctcgaacgattcgcccattgcctgcacgcctttacgcgaaatcaaacgccacgcacacgtgcagagggcctgcgctacgccgactacgccagaaggcaggcccagtaccatagcacttgggcagaagatgctgccttcttccgggggctattcaacgccttcgagggtcccacagcgctgcctgaccacccagggttcaccttgacgacggtggcgccttcaagccgatacagtattgagttgccatcggccaatcggcgcctgtcggccttgggggcgaatacggtttcagcgtattcaatgcggtcttgtatgcctacgcctccaccatggcgcacgttttgcggtgcgacaagctcatga

SEQ ID NO: 356035 - DNA, 1344 bp, Pseudomonas aeruginosa
atgtctgcaatcacgcgttatctcgccatgcttcgcctgttcggcatgctgctctgcgccgccgcgattccctccgttgccaccgcgacggtggcggtcaccgtcgcggtggcagcgtccgatgtcgaggaggaggccgtggaggcatcggcggtcggcgccgaggccgaggcagcgcgcgatgcgggctacgagtccgcggaggttccggcgctggcgcggcgggtgaccgaccttaccgcgaccctcgacgccgccgagcgtgcccgcctggaagcttcgctggccgcgctggaggcccggaagggtgcccaggtagcgatcctgatggtgcccagcacctatccggacagcatcgaggcctatgcgacgcgggtcttcgaggcgtggaagctggggcgcaaggggatcgatgacggcgtcctggtgctggtggcgaaggacgaccggcgcatgcgcattgaagtcggctatggcctggaaggaacgatcaccgacatcgatgccgggcggatcatccgcgaatacatgacccctgcgttccgtcagcaagactacgccggcggcctggaagcggcggcgcagcgcctggtacgactgatcgacggcgaggcgttgccgccgccgccgcgcgacccgctggagcccggcgcggtacggcagaccctggctatcgcattcctgctcggcgctctcggcggggtggcgctgctggtacgtccgcgcgcctggtactggaccctgggggcggtagtggtgctcgctgcggcgttggcactggggcggcactggccggcaggggcgatggtggcgctggcggagatggtggcggtcctgggcgtcggcttcggcgcgttgctcaagtattcgcgcggtgcccgctggttcttcgccattcttgtgctctatgcgctggggctgttctgggcctacggccgttatggcctgccggtgctccattacggattggccgtgccgctttcgctgggactgaccctgctgatgctggccggtgcctggcaggggctgcgcagaggacggcgctgggcctacctgccgggcctgctcggcctgctgctgaccctggccctggagtgcctgctgttgctggtggacgacccgctgaacagcatcgaggcgctgatcatcctgcccgccgcttgcctgccgctgctcatcggttgcaatttcagcgccggcggctcggggggagggcgtcgacgcggcggcgattacgctagctcatcgggttcctcgtcgtccagttcgtccagttcgtcttcggactcgttctccggcggcggaggctcgagtggcggcggtggcgcctccggtagttggtga

SEQ ID NO: 356036 - DNA, 642 bp, Pseudomonas aeruginosa
gtggtcgccactcacctgaaccaggtgctgcacaagcacgcccacgagctgctgggccatgaagaagtgcaacagctcctgcaattgctcgcgcgcagctcgccgaagctggcggaagagctggtgccggggctgatttccctgtccaccctgctcaaggtcctgcaggcgctgctccaggagcaggtgccggtgcgcgacatccgtaccatcgccgaggccatcgccaacgtcgctccacggagtcaagatcccggcgcgatggtcgccgcggttcgcgtcgcgttgtcccgcgcaatcgtgcaaagcattgtcgggcttgagccggagctgcctgtgatcacgctcgagccgaggttggaacagattttgctgaacagcatgcagaaggccggacaaggctccgaggacggcatgttgctggagccggggatggccgagaagctgcaacgctcgctgatcgagagcgcgcaacgccaggagatgctcggtaagccggcgatcctgctggttgccggaccgatccgctcgatgatgtcgcgcttcgcgcggatggcggtgcccagcatgcatgtgctggcctaccaggaaatcccggacaacaagcaagtcaccatcgtcgcgacggtgggacagaactga

SEQ ID NO: 356037 - DNA, 231 bp, Pseudomonas aeruginosa
atgagtccgacgctttcccttcacctgatggtgcgcaacctgccgcctgggcagcggcggccgaagatcgcccaggccatcggcgaggagagcgcgggacgcttgcagcgggtattgctggaacgcgccctgcgcctgcccgatcgcggtttcagtgcccgcatcctctggttcgacgacgatctggacagcgatctgcaggcgctggcgtggcgttgggctggagcctga

SEQ ID NO: 356038 - DNA, 1323 bp, Pseudomonas aeruginosa
atgaatgcccccacctccctgctgcaccccctgaaggctcaggtcatgagctttcaggaggaggaacacgactaccacttccaggtggagtatcccgacccgcccgcctgccatacctgcggcaccgtcggccagctcgtccgcttcggcaagaagcaggtgaagtaccgagacgtgcctatgcatggcaagcgcgtctcgttgtgggccgtgcagcgccgcttccagtgcaagagctgcgaatcgacgttcacgccgaagtttcacgagatgtccgaagaccaccgcatgacgaagcgctgctacgactacatcgtcaagcgctcgctgagcagcaccaatgccggggttgcccaggatgtcggcgtggatgagtccgtggtgcgcgccgtcatcaaggcgtactgcgacatcaaggcctacagctacaggccgacgctgccacgcatcctcggtatcgacgagctgtacctgaaccggcagttccgctgcgtcctgaccgacatcgagcgcggcaccatcatcgacatcctggagtcccgccagttcgacgtgctgtacaactacctggccaacatgcggggtcgggacaacgtgcagatcatctgccaggacatgtggaagccgcaccgcgatgtggcctccaagctgttccccagagctgccgtggtggtggatcggttccacatccagcgcatggccaacgaagccatggagacgctgcgcaagggcctcaagaaggagctgacccagcatcagcggcggcagctcaagggcgaccgcaagatgatgctgatgcggcgccgcgacctgaaccccatgcaggagctggtcatccatacctggttggatcagttccccgagctgggcacggcctacaaactcaaggagtcgttcttcgacatctgggagtccagcactgaggccgaggcccggtcgcgctaccagcagtggctgagcatgattcccgaggggcacaagtcccactggaagccgctgatcgcctcgatgacgaactgggagaaggagatcttcgcctacttcggcccggcccagcgcaacaccaacgccttcaccgagtcgatcaaccggcagatgcgcgacctgaaccgtgatgccaggggcatgtccttcgagatgttccgggccaagacgctgttcagcctggaacacaaggtgacgaagcccaagccgaagcgggaatcgcccttcgctggctacacggtgatgaaggacatcttccgcctggacgagtccgagttacccatcgatcacggcgtgcccatcgaggccattctcaaggccatccagggcgcccaatag

SEQ ID NO: 356039 - DNA, 939 bp, Pseudomonas aeruginosa
atgaaagccatcgcacccgccgcccctgttgcacctgtcgccgttgaactgatcgacggtcaaccgaccaccaccagcctcgatgtagctgcccacttcggcaagcttcacaaggacgtcctgcgcgctgtccgcagcctggaatgctcgcccgagttccatgagcgcaattttgcgcccatacaaatcgacgtcgatctgggcatgggccggagccggaaagaccaggctttccgcatgacccgcgatggcttcaccttcctgtgcatgggcttcaccggcaaggaagcggccaagtggaaggaggcgtacatcaacgccttcaaccagctggagcaagcagtccatcagcccctggccatcgcgcaggatgtgaaggtcgaacagcgggcgctccgtggccggcacgtcctgatcgctcacttcgacggtcagccatggttcgctgccggcaacctgtgctcggccctcgacctgggcagttccgaccgcatcattcgcagcctgccggatcaccacaagcgcaagctgcaacgtggcacccgcgagctgtggatggtcgatgccgacggcgcccagcgtgctgccgactactgcaaaccggaaacggctgccgagtaccggcagtggctccagcgcctgctggccgagttctcgggcggcaccgagcggcatctggcctgggccggcgagagcgaagtgctgagcaacgtcccggtggagatcgagcagatgctcggccagaagctgcgcgacatgcgcttcatggtgtacttcgagttcaacggcgagatgcgtatcaaggccatcgatcccggcaccacgctgctgcgtcgtgatcgcttggccacctacattggcgatccggagggcgcgccgcgtagcacgctgccggacatcctggaggcagtcagccgccgtatgaagtcgccgcactaa

SEQ ID NO: 356040 - DNA, 1170 bp, Pseudomonas aeruginosa
atgagtaattggcagcctatgaccatcggccaatttttatcgttgcagcgggggtatgatctaacaggagatgagcgagaagttggcaatatccccgtagtgggtgcagctggccagaatggttttcacaataaagcgcttgcttcagcaccaggcgtcgttgtgggtcgatgcggtgggtcatttggtcaggtgtacttttcaaaggaagatttctggcctcacaacactgcaatgttcgttacggacttcaagggtaatgatccgtattttgcgtattacctcctgaaaagcatcgacttcagcaagctgaactcaggaagtgcgcagccttccttgaatcgcaattatgtctacccaacaaaaattatcgtccccaagccaccggaacaaagaaaaatcgccgcagtcctggctgccctcgacgccaaaattgactgtaacaaacgtatcaacgccgagttggaagcgatggccaagtcactgtacgattactggtttgttcagttcgacttcccttgcgccaatggtgacccctacaaatcttccggcggtaagatggtctataatgcctctctgaaacgggagatcccagaggggtgggctgcagcgcctttgtcatctattacgcctgttagcaatgaaacgcttaatccggcagtttttcccgaaaaatcattcaagcattttagtatccccgtttttgatgttaccaagacctacggcgtagagctcggccggtcaataggaagcagcaaattcactgtgcttggcgttgacctattggtttcaaaacttaacccatggagcaatcgagtcgtttacgcaatggatgaagcagatcaggtctgctcaaccgagttcgttgtatggcgaagccctagcgagaacttaaagaacttcctttactttattgcaacttctcagcagtttatctcgcattgcgtacagtcggcctcggggacgtcaagcagtcataaacgtgtcaatccgtctgtgatgatgcgatttgaattgccctatgaagaaagggttgctgcagagtttgggaagatgatcgatccgatcctaaaaaaattaatcgtcaatcagcgtgaaaatcagtacctcgcccagctccgcgactggttgctgcccatgctgatgaacggccaagtcattgtggcgtaa

SEQ ID NO: 356041 - DNA, 1926 bp, Pseudomonas aeruginosa
atgaagctgcagacgctgcgcctatcgaattttcagtcttacggtcctgggcctactgacgttgacctagtagccatcacctacttgatcggccccaatggttccggcaagaccgctgcgctccaagcactgtgccgcttgtttgcatttgacccggcccagcgccgtattcagcgctctgacttccatgtcccgttcgctgaaaaggagattccggcagagcgccagctttggatcgaagcagattttcttttcccagaactggcggaagacgaagacaacagcacggttgctcctcattttggacacatgcgcttagatgagccggacggcattccacgagtgcgtttccgtctgagcgccgccatggggcccgatggcgacatcgaagaaacctttgtttatgtactggacgtcaatccagatggttcgccccttaccacggcgcaggtgccgcgagccgagcgcaaccatattcatgttcactacctgcccgcgcgacgtgatcccgctgaccacattgcttacggggccaacgctttgcttgggcggatactccgagctgtgcagtgggataaagagcgcgacgttattagggggcttacagacggcataagcgatagcctggcagccaacccatcagtcaatgcgttcagtgtgcatttgcaaaaagcatggacttcgctgcacaaaggcaatttctttgctgatcccaagattacttttgttgcctctgagattgaggcgctgcttcggcacatgtccgtttcgttcacaccagggcatgatgaaaatttggtcgatttttctcggctgagtgatggccagaagtcgatgctctatctgtctctcgtgctgtcgtcgcaggccataggtcgcgccgttttagctgagcaagataagtccttcgaccccgacaaactgcgacccccggtttttacactggttgccgttgaggagcctgagaacagtctttccccgcactatttggggcggattgtcagtactttgaatgccatgacaagccaaggcgatgcacaagcccttattgctacgcatgcgccctccatgctccgacgagttgagcctgaacacattcgctacttgcgtctgactgaggcacgacaatcgcgcgtaacctgcattcaattgcctgaaaaagcggatgacgcgcacaagttcgtgcgcgaggcagtacaggcatttcccgaagtttatttctctcgattggttgtccttggcgaaggggacagtgaagagattgtgctgcctcgcttgctccgggccaaaggtgctccagttgacgagtctgctgtgataatcgcgcctttgggcggtcggcacgtcaaccacttctggcggttactctcggcattgcagataccttacttgaccctgcttgacctggatgtagctcgccatcaagcaggctgggggcgagtcaaaaatgtgaacgatcagctcgcgaagtttgagcctactaaaacgctccctgctgattgggatctgccgaaatggaatgtgactgagacaccgatccgtacacatcactgttttggcgatgaaaagcggagcgtcttcgctgagctagagcagcgaggggtatttttttctgctccgttggatctagattttgcgatgcttctcgcttatccagacgcatatagcgttgaagtggaagtaccaggcgatgatgtgatcaaggccgttctggggaaaagccatcataatccatcccagtacagcgaagaagaactcaagctgtttggtacttatcaacaacgctttaagcttggcagcaagcccgccgcgcatatcagtgcacttgctcaactgagcgatcaagagttgcttaaggatatgccggcatccttggggcgtctggcagacgcggtcatcgccaaactcgcggagttgctggagtga

SEQ ID NO: 356042 - DNA, 1617 bp, Pseudomonas aeruginosa
gtgacagaggaggaaagccaacctcgaaagatccactggagtgtccctcatgtccccgtcacgcgccctgtcgccgctcagccgcgccctgctcctcgcctgcctcggcggtcccgtcctggtttccgccggcagcgcctgcgccgccgagatccgcaccgatgcccgccagtactaccgcctgcctgccgagccgctggagcaggcgttgaaccacctaggccgccaggccggcgtgctgatcgccttcagcccggaacagaccgccgcgcgacgcagccaggcgctggacggcgagtacaccctggaggaagccctggccgccctgctcgccggctccggcctggaggcgcacgcccgcggcgacggcgcctacaccctggaagcgctgccggtggaagacccggccaacctgcaggcgctcaccgtggtcggcgactggctggccgacgccagcgccgccgacgtcttcgagcatcccggtgcgcgcgacgtggtccgccgcgagcagttccaggcccaaggcgcggccagcacccgcgaagtgctggagcgcattcccggggtcagcgcgccgctcaacaacggcaccggcagccacgacctggcattgaacttcggcattcgcggcctcaacccgcgcctggcgtcgcgctcgacggtgctgatggacggcatcccggtgcccttcgccccctacggccagccacagttgtcgctggcgccggtgtccatcggcaacatggacgcggtggacgtggtccgcggcggcggcgcggtgcgctacgggccgcagaacgtcggcggcatcgtcaacttcgtgacccgggcgatccccgaggacttcgccaccaagctcgacgtgcacagcgaactcagccccagctccagccaggacggcctgaagaccacccacaacgtgctgatcggcggcaccggcgccaacggcctcggcggcgccctgctctactccggcacccgcggcggcgattggcgcgagcacagcgatacgcggatcgacgacctgatcctcaagggccgcttccagcccagcgacgaacacacgttttcggcgatgacccagtactacgacggcgaggccgacatgcccggcggcctcggcaccgcggcctaccgcgacgacccgtaccagtcgacccgtccctacgacaagttctggggccgccgtaccctggccagcgccagctacgaatacacccccaacgccagccagaagctcaacgtcaccggcttcttcaccaagaccctgcgcagcggctacctcgaccagggccgcaacctcaccctgtcgccgcgcgagtactgggtacgcggcctggaaacccgtttcagccagggcttcgagctgggcgaaagtcgccacgaagtgggcatcggccaccgctacgtcaacgaagccagccacgagctgcgctactggacccgcgccgacagcggccagctacccagcaccggcagccgcaacgaccgcgacacccgcggcagcaccgaagccaacgcgttctacatcgacgatcgcatcgacatcggcaattggaccatcaccccccggcatccgctacgagaagatcgattccgaacagaagaacctgctga

SEQ ID NO: 356043 - DNA, 390 bp, Pseudomonas aeruginosa
atgaaaaagctgaatacccgtcgcgtcgacctgggcatgatcaaccccgaggaactgcctgatggcgttacgtacctcggctatctcaacgatccggggttggatctctacggctacgatgagtggttcgtgcccgacgatggcgacgaggaggagcagccgatgatctcggcgggtggcatcatcctgggctcgaccaacacccgtaacgcgatgttgtacggggcgattcaggatctcgacgccatcgagagtggcctggtcgaggcgtcgcgcttcccgaagagctggacgaccaaggagccgagcgtgcgctgggtgaagctccaggctgctgcgctgtccggcctgctggagccggatgccttcctgttcgcgaaggtggtgtga

SEQ ID NO: 356044 - DNA, 234 bp, Pseudomonas aeruginosa
atgacgcgggttgtcgacggcaagatctacgcactggatcacgacggccttctacgcatcaagttcctgtaccgactccctgggggaggcatccgccttcgcagcttcaaccgagacgagtacgaagacgagtcctacactctcgacgacgtgctagagcaaaggatcgtcatcctcggtcgcgtattctggtggtcgtctcttgaccccatgggagcaccacccctcctataa

SEQ ID NO: 356045 - DNA, 3240 bp, Pseudomonas aeruginosa
atgtccggcgaaacagctacggttttggtcaacataaatctgaaggggcggcagctagacttagtgctcgggacggatcgtctaactttggtccttgaagccaaagcctgtacggtgccgctcagcgggacgacaaatggcccatggaccgcgcatccccgttcagggcgttcgagagccacgggcaatgcctacgcccaggccttgggcgaaaaaaacgctctctgcgacgctctccgagactttttaggtagtgttgaaggatatccggatgctcatgtggtgttcgtccccgagctggctgcgggctcagagttgttgtttgacttcaaggtcacctatggcgggatagacgggctcgctatacaactggccaagcgcaccgagctccgctgcactaccgatcaatggcgcgcgtttgcaatccagcatagccttgagcaggtgttcgatctttccagcgctctggaccctcgctcgctcgaagcgcagcgaacacttgcaacgtatatcgccgctttcaccgctacgtatgcttcggcagcagctgagtacaagacggacctctacgacgtcgacggggagctcgtagatttgccatgtctcgagcatctgttgcaggaggctcgcacggaccttctaatccaaggtccttcaggctgcggtaagtcattgctgtcggtggtgttagcaaaccggttgtgcgctaaagatgtgataccgatcatcgtggagggaaagctatttgagggacagcttggcccggcgctggatcgtgaagcagctctactggacgtactatcagccaagaagctattggctgcagttcgtacgctatcgcgaccgattgccataatcgtggatgggtataacgagtgcccttccgacttgaggtttaaattgatccgggcgctccgcgccgcttcgatcaggtatgacgcagcgattgtcgtgagttcgcaaatcgagaccgacagggcggatttgcttccgcttcggaaggtcaccgtttccgctcccagccacgacctcaaggttgagatagcgtcccttgataccgcctccacggagttgctggctcctctgctacagacaatcgctaccggtattgaggccagccttgttggtcaaatggggcgcgaagtgaacctagtttctagcagatccgcactgtttgacggctttgttcggcggcgccttggttctaatgcaagcgagggcataacgctcttatgtcacgtcgctggactgctgttcgagcgcatgactttcagcttatccatacgcgagcttgaccgcatcctagttagagaacggcttggggctgaggtgctccaagagacacttcggatgcggctgctgatccagcgaggagagcgcctaagtttcgtccatgaaatgtacctcaatgcctttgcggccgaggctatcctgcggcagtttggttccgacttcgacgctatgactcgggcgttggcgctaccccgattccatgaactgcggacatttgtggttggcgctatcgaggatatggagttgctcgctcgcttgctcagctcgaccacagatgcgcagttgctgaaggccatcataaaaggagaatgtggcagcgccgctaagaggttcgtggcccatgacttgaatgccgtaatgggccgattacgggttgaagttgaaacagtccgtttcttcatcgctcctgaccagcactggcatattggcgttgagcccgctagtcgcatgctctggacagagcatgaaagagcaatgctgtctgcattgcctgctgcattggcgctcggtcaatactcactggagttgctcgatgttttccgactgctcgataagcggctaatcgaggagcgagcacggcttcaaagtgaggcggttgagcagggcttcaagctgctgaggaccagcttatttgcagctgcctacgtattcggtcagcacgaccttggagtttcacttgtcatatcggctctccacggcgggggtttagagcgcttagccctacattctgagcggcaagcgcccctgagagacgtatggctcaatgtagctacgccaggacagttctactttgcgctggcgttgtcgcgtgatacctacaggctggagcgaagcattcttaacctggcgatcgaccaaacgctgccgctgttcgaaattgagcgctggaagtatctgccttatcacgttcaattagatctcatgcatttcgtgcactttcttccacgggatgacttgacccagcaagaaaagctgtcgaaggcactcgaaagcctgctccccgtgctaaatccgattctgcaaaccactgccctcgaagccctcagcagtttgggagcgctggatgacgaggttaaggggcacgagacacagattcgactacaagttgccgaggtcctcgttgaccctggtgcggagggtgcggcggaaatcgcctgggagatctatagcgggcaattcgatcaccccttcgacatggcctacatcaacgttgtcgacaacctttcaaacgagcagcaactgacactgatgcgattggcctgcatgggagcgtccgagtacagtttctttgtggggtcgctaatggacaagcttgctggtgaaggtgatgccctcgcggttccggcgatctcgcgctgggcacgcttgccagatccgaccagtccagtacgtcagaacgcagttgaaatctatatttccgcgctgatggccttggggaaacttcaatcagatctaccggtggagtcgtgcccaatggggctcggcccccgtgaagatgcgatgtccgcatgcgggatgatctactactggctgcagcggcgtacctttgaagcagcagaggcggaaccgccagttatggctgctctggaggctctttctgccgatccatcgcgcgcgattggtgtgctatgcgagatctcccagtcgatcattggccatgacccgcgcggcacgttgttggttacagcctttcccgcccgtatggtcatgcttgctcgcgtagccctccagcaaggaggccctatggaaggatacttttccggcccgcacttcttcgagcgcagagatgccgagcgatttgcgatctccatgattggttcttacggggggggggcagacgacttgccgctgcttcgtacttttgtagatcaagtggaactctcatggaatgctcgcaacgcccttgcggcgatcgaagcaagagcttcaaccgttgcacagcggtag

SEQ ID NO: 356046 - DNA, 321 bp, Pseudomonas aeruginosa
gtgacggggctggcgtggttcctcgcgggactcggggtctatgttcgcgacatagggcagttcgtccagtttctcctggtgcttctgctattcatcagcccggtgttctatccgctgtcttccttgccaccggtaatgcagccctacctgtacctcaatccgctgacgatcccggtggaaatggtcagggcgatccttttcgatgctccctatccgacccttggggtcttcagcgtttattgcgttgcgtctctgctggtctgttcatcgggcttcctctggttccgtcgggttcaggaaggttttgcagatgtcctctga

SEQ ID NO: 356047 - DNA, 705 bp, Pseudomonas aeruginosa
atgccctgctttcttccttcatccgcaggagatgcacatgaacgctcagacccaaccggccgccctggccgccttccccctgaacatcaacctgaccgacttcatcgacgagttcggcgacgagctcctggagtcgctcaatcgctccaaccccccggtctataccggctccgacaacattcaccgccagttggtgatggaccgactcaagcgcaagcccttcgcggcccaggccgaggtcgtccaggccatcaccgccctgctgctggaccgtcacgagcaggccgggatcatcaacgccgagatgggcaccgggaaaaccatgatggccatcgctgtcgcagcggtcatgcacgcggccggctatcgccggaccctggttgtctctccgccgcacctggtctacaagtggcgccgcgagattctggagaccatcccagccgcccgcgtctgggtactcaatggcccagatactctgctcaagctgctcaagctacgagatcagatgggcgacgcctacgacggacgccaggagttcttcatcctcggccgcgtgcggatgcggatgggtttccattggcggctcgcctgctggaagaagcgcgccgccggcggccaactgctcgctgcgtgcccggattgcggccaggtcctcgaggacctggaaggcaacctggtcacggtggaggagttcgagcgtggtga

SEQ ID NO: 356048 - DNA, 219 bp, Pseudomonas aeruginosa
atgctgccgtcggtggaaaccacaccgaccaccatgaggaagttcttcaccgccttggtcacccggatcccctggcgctgcacttcctgcggcagtagcggggtggccagttgcagcttgttctgcacctggacccgggcgatgtcggggtcggtgccctgttcgaaggtcacggtgatggtcatgctgccgtcggagttactctccgaggagatgtag

SEQ ID NO: 356049 - DNA, 378 bp, Pseudomonas aeruginosa
gtgcgcaaggtgaaggccggcgccagcagcgccatcacccagtacttcttcaacgccgatgcctatttctacttcgtcgagcgggtcgccaagctcggcgtggacatcccggtggtccccggcatcatgccgatcaccaactactccaagctggcgcgcttctccgacgcctgcggcgccgaactgccgcgctggatccgcaagcaactggaagcctacggcgacgacagccgcagcatccaggccttcggcgagcaggtcatcagcgagatgtgcgaacgcctgctggagggcggcgcaccgggactgcatttctatactttgaaccaggccgatccgagcctggcgatctggaagaatctccagctgccacactga

SEQ ID NO: 356050 - DNA, 822 bp, Pseudomonas aeruginosa
atgccttcgacggcggcgtcgatgtcggcatcgtcgaagatcagtacaggagccttgcccccccaactccatgtgcatgcgtttcacgctctcggccgtaccttcgatgatccggctgccggtgcgcacggagccggtcagcgacaccatgcgcacctgggcatggctggtcagcggctcacccaccgaggcacctcgaccgtggacgatgttgaccacgccggcggggaagatctcggcaagcagctcgcccagtttcaaggtactcagcggcgtgtgctccgacggtttcagcaccacggtgttgccgccggccaatgccgggccgagtttccacgctgccatcaacaacggatagttccacggcgcgatggaggcgaccacgcccaccgcgtcgcggcggatcatcgaggtatgccccgcgacgtactctcccgccgccgagccctgcaggcagcgcacggcgccggcgaagaaacggaacacgtccgatacggcgggcagttcgtccagcagcacggcgttgaaaggcttgccgcagttgtccgcctccaggcgagcgaacacgtgcgcctgggcatcgatgcgctcggcaagcttgagcagcagggccgcgcgatccttgggcggcgtttgcgaccaggcgtcgaaggccgcatccgcgctctgcaccgcggcatggacctgggcgccgctggcctcggtaattcgcaccaggacgttgccctgggacgggttgtacaccgcgtggctctcgccttcgccggccaccagggcaccattgatcagaagtttggtttgcatatcgattctcgccattga

SEQ ID NO: 356051 - DNA, 1299 bp, Pseudomonas aeruginosa
atgccgaaggaggtgtggaatgacgccgcaccagctcaccgaggagtacatcttcgcgcacgatctccgagaagccagcgcgaagatctaccgcgccgcgaccaaggcgctgctcaagcacttcggccctacggcaaccgtacaggaggtggaccacaggtctgtgctgggatggcggcgcaaggtcctggaacaaggcctgtcgaagcggagctggaacacgtattcgaatcatctgcgaacgatctgggggtatgccatcgagcacgaactggtgacgcactcccaagtcaacccgttcagaaagaccaccgtcatccccccaggcgagcaagcaaaaccgtcgcagccgaagccatcctgcgcgcccgcaattggctcaacatgcaggtcggcgccgagcgctgcaccggcgatcgcgcacgcatcactcccgcctggttctggctttgcacgtttgaggtcttctactacaccggcatccggttgaacgcgctgctgtgcatccgcaagcgcgacatcgactgggataatcaactgatcctcatccgcggcgagacagagaaaactcataaagagttcgtagtgccaataacggaggggcttgtgcctcacctatcgcggctcctgcaggaggccgatagagccggattcgccgatgacgaccagttgttcaacatcaaccggttctcaccgcactacaagagcaaggtgatgaactccgaccaggtcgaagccatgtaccggaagttgaccgagaaggttggggtgcgaatgaccccgcaccgtttccggcacaccctggccaccgacttgatgaaggcacccgagcggaacatccacctcacgaagtgcctgctcaaccactcgaatatccagaccaccatgagctacatcgaggccgactacgaccacatgcgtgccgtgctgcatgccagaagcctggcccaaggagcgctggagaacgtcaggaaggtggattacagcggctccccgcaggcctctgccaaaccgaagccatgcgggcaacctctcgctcgaatgggtgaagtaccgccgccggaggccaggacagaacctgcagaaccaagggagcacacaccagggacaggcattcagggaggtccaaccgtgcgggaagaagcgctaccacagccacctgacaccttcgatcaaagcgtgctgttcactctgatggctcaacacttatcgaaccgtgccgcctcggcatccgcagctcccgctgcaacaagcggatctggtggatggggatctaccgcccgaagcagtctcgcctag

SEQ ID NO: 356052 - DNA, 1593 bp, Pseudomonas aeruginosa
atggctgatgcagcagtagtacagcttcccgcgcagggaaagcagggagaagagccggatggtgccgcagacaaacgcggcgacctgatgcagagaattcgctccaggcaatccaaagagctagttattggtctggccggcgcagtgggttgtaatcttaaagatgtatattcccaacttcgacgtcagttcgagaatttcggctatgatgttcgcctggtaaaaattagcgacatcatcaaagattattacaaaactcatcctattccccctcagctctcgcatattaaggctgaaagccttgattcgctcacgtcctctgcccgttacaaggctctgcaagatctcggaaacgatattcgatctaccattgcaccttatgcattggctactcaggctattcgcacgatttcgcttgagcgcgaaagtcaattggtagctaacggacaagatgagcctccgcgcactgtctatatcgttgatcaactgaagcatcctgccgaagttgctctgtttaagaacgtttatcggaatgtcttttatcttattggcgttttaagccctgaagaagcccgcattagtcagctgaagcaagaagatatggatgctgtggctgctcaggaactggtcgagcgtgacaggaatgagaatgatgattgcgggcagaagcttgaaaaaacaatccagcacgcggacttttttattcgtcatgcattgggtggaatacagtcgctaaccgcgccctgcgagcgattcgtcggtttggtgcatggtaaaaatggtctaacacccaccgtcgatgaggccggtatgtatgctgcctattccgcctcgctaaaatccgcctgcttgagccgtcaagttggggcatctattgctgattcgaaggggaatattgtttctcttggctggaatgatgtgcctaaggctggtgggggattatatggggccgatgatggtgaaggcgatcagcgctgcgtgcataaaggtgggaaatgccagaacgaccaccacaagaatcgattggttgaaaaggtcgtaagtcttattcagaaggagttaaagatcgatgcagagaccgcgcgcggactctctggcaagattatgcagcatactccggtgggatcgctgattgaatattctcgagcagttcatgcggagatggaagcgattctgaatctcgcgagaaagaaaagcgggactaccagcggagctacactgtattcaactacatacccatgccataactgtgcaagacatattatcgcagccggaataatgcgtgtggtttatattgaaccatatgagaaatccttggcaactacccttcactctgatgcggtttctaagaataaatcagacgaccatatggttgtctttgaaaattttgaaggtgtttcgcctaagcgctatgccgctttctttggcggtggctctgatagaaaagatccacatggaacagcccttcacattgtatctcgtgaggctaatttgatctctaccgaactcttggactcgtatatcgatgtagagagcaaggtcgttcaactagctgtggatgagttcgggcatccatacggcggtcaagcctga

SEQ ID NO: 356053 - DNA, 426 bp, Pseudomonas aeruginosa
gtgctgaccgaactgggtatcggcgaggcgttggtcggcaccctggaggaaaagggcacgccggccatggtccagcgcgtcgcggtggcgccgccctattcgcggatcggcccgctgagcgacagcgagcgcgctgaactggtccagcggtcgccgttgaagggtcgctacgaccagccgatcgatcgcgagtcggcctacgaggtgctggcgaacaaggcgggcgccaagcccgaggtccagggccaggcgactgctcagcaggaaagctcgtccggcgtcggcggcatggccgggcagattctcggcagcctgctgtccaattcgacggtgaagagcgccatgcgccaggcggccaaccagttgagccgggagctggtgcgtggcctgctcggctcgttgatgggcgggaagaagcggcgctga

SEQ ID NO: 356054 - DNA, 1071 bp, Pseudomonas aeruginosa
atgtcgcaagcgaatgagttgttgatcggcgctggccccgatggccagccggtaggacaggcctggcgcctggccaaccgtcatggattgatcgccggcgccaccggtaccggcaagacggtgaccttgcagcacctcgccgaatccttcagcgatgccggtgtcgcggtgttcgccgccgacatcaagggcgacctgtgcggcatcgccgcgccgggcaacccgcagggcaaggtcgccgaacgtatcgccagcatgccgtggctgaactaccagccgaaggcctacccgaccacgctctgggacatcgccgggaagaccggccacccgttgcgcaccaccatcagcgagatgggcccgctgctgctggccaacctcctggagttgaccgatagccagcaggccgcgctgttcgccgccttccaggtggccgaccgggaaggcctgctgctgctcgacctgaaggacctgaaggcgctgctcaaccatctgaaggacaatccggaaatccttggcgaggaccgggcgctgttcactggcgcttccgggcaggcgctgctgcgccgcctggccactctggagcagcagggcgccgaggccttcttcggcgagcctgccctgcaactggaagacatcctccgccccgagccggacgggcgcgggcgcatccacctgctcgacgccagccgcctggtgcacgaggcgccgaaggtctacgcgactttcctgctctggctgttggccgagctgttcgagcaactgccggagcgcggcgatgccgacaagccggtgctggcactgttcttcgacgaggcccacctgctgttcaacggcacgccgaaagccttgcgcgaccgcctggaacaggtggtccggctgatccgctcgaaaggcgtcggggtgtacttcgtcacccagtcgccgggcgacctgccggacgatgtcctggcccagctcggcctgcgtatccagcatggcctgcgcgccttcaccgccaaggagcagaaatcgctgcgcgcggtggccgacggtttccgcccgaacccggcgttcgacaccctggggtgctga

SEQ ID NO: 356055 - DNA, 1062 bp, Pseudomonas aeruginosa
atgccccgcctttccgccctgctgttcctcgccctcgcaccctggctggcccaggccgaggagaccctgcgcgtctacaactggaacgactacatcgacccacaggtgctcgagtccttccagaaggacaccggcatccgcgtcgagtaccacaccttcgccaccgccgaggaactggacaaggcgctgcgcagtggcgaggcgatcgacgtcgccgtcccctcccacgacaccctgccggccctgctgaaggacaacctgctgcggccgctggacttcacccagctgcccaaccgcagccatctcgaccgtcaattactgagcaaactggccgcggtcgatcctgacaatcgccacgccgtcccctatctatggggtgccgtaggcctggccatcaataccccgcaggccgaagccgcctatggcgggccgctgcccaacagctggagcctgctgttcgacgccagccagagccagcgcctgaaaagctgcggcatcagcctgctggacgcgccggacgaaaccctggcgatcctcctcaactaccagggccgcaacctcggtcgtactgcgccgagccaggtacgccgcgccgccgaggcgctgcacggactgcgaccgaacctgcgctacgtcgacagcgagcgctacatcgccgacctcgaaggcggtcgcctctgcctggccatggcctgggtcggcgacgccctgcgcgcggccaaggcgggccagccggtaagtttcgaggtaccgcaggaaggctcggtgctgttcatcgacaacctggtgatcccggccggcgcccagcatccacgcgaggcgcaccgtttcatcgactacctgatgcaaccgaagatcgccgcacagatcaccgccgccaccctctaccccagcggcaacgccgacgccgccggcttcctcgatcccgccctgcgccagcaacccggcctgtatccggaccgcgacaccagccgccgcctgttcgccctggaaacgccgccggaaaaactccggccggtggtcgacgagatctggaaggccttccgcggcgccagccactga

SEQ ID NO: 356056 - DNA, 228 bp, Pseudomonas aeruginosa
atggcttgtgccgaagatatgggagactattatcgcgtaccgccggatttgcgcgatctgaattatagtaagtttgtagagcaaggtgaggaaaggatttcccataccgaagactataattcacacaatacagatcgtctggatgtcaagggtatgcaggaattgctgctgaagcttgatttcatacgtgctattcagcgtggcgaacaggcaaaccccgaggaatag

SEQ ID NO: 356057 - DNA, 207 bp, Pseudomonas aeruginosa
atgacccgcttcatgatgactctctccgatgcggtggatctggtgctttacgcgtttgagcatggtaacaatggtgacctcttcgtgcagaaggctccagccgcaacgattgaggtgctggccacggcattgacggggctgcttggtaaagaaggctatccggtcaatgtacgcggcatggcgagaaactctatgaagcgctcttga

SEQ ID NO: 356058 - DNA, 1512 bp, Pseudomonas aeruginosa
ttgcggcgcctcggagccaccactaacctgcattcacccttcttcgagtctcttctcgaccatgcctgccctccgctccctgatcgctattcttttcctcggcctctgccttgccagtccgccgctcctcgcccagtccgagccgccctcagccgaggccgtccagcaaagcctcgacaagctggccgagcgcaagctcgccgaagccgaccagaaggtcgccaaggccagcctcgaacagaccctcaagttcctcgccgcgcgcgacgaagcgctgcagagcctggaggacctgaaaaagcgcctgagcgacgcgccccggcagatcgaggaaaaccagcgcgaactggagcgcctgaagaagaccaaagaacgtccggtcagcgaacgctacagcggcgagagcgcggcccgcctggaaatgctgctcaacgaccgcaccacccagcaggccgagtggcagaaagccctgggcgaggccaacagcctgtcgatcaccgccgagacccgtccggaacgagcccaggccggcatcagcagcatgcaggcacggatcctggaaatcggctcgctgctcaaggccggcaaggaaagcggcaagacgatcaacgccgaccgtcgcggcgagctgctcgccgagcaggccgcattgaccgtgcagagccagctgttgcgccaggagctggccggcaacaacctgctgcaggacctcggcaagagccagcacgatctgctcaccgagaagatctcgcgcctggaaaaggaaaccctcgacctgcaggcgctgatcagcgagaagcgccgcgagcagtcggaaaagaccgtcgccgagctgtccaaggaaggcgcccagggagccggcaccgacagcctgctgagccaggagaacgccaagaacctgcgtctctccgactacctcctgcgtgccaccgaccgcctcaacgtgctcacccggcgcaacctcgagaccaagcagcaactggacaacctgacccagtccaaccaggccctcgaggaacagatcaacgtcctgcgcggcagcctgctgctgtcgcgcatcctctacaagcagaaacaggcgctgcccaagatcaaggccgaccagagcctggccgacgagatcgccgacctgcgcctcggccagttcgaactgaaccaggaacgcgacaagctggcgaccccgcagcaatacctggacgacctgctcgcccagcagcccagcgagcaggtcacgccggaactgcgcaaggatctcgacaccctgttggcaacccgttccgagttgctcgaacggctcaaccacgaactcaacgcgctgctcaacgaagcgatcaccttgcagttgaaccagaaacagttgctttccaccagcgagagcctgcgcaccaccctcgacgagcagatgttctggattcccagcaaccagccgctcgacctgtcctggttcaagatgaccccgaccctgctgaagaaccagctcaccgagatcccctggggctccggggtgcgtga

SEQ ID NO: 356059 - DNA, 273 bp, Pseudomonas aeruginosa; identical to SEQ ID NO: 343966

SEQ ID NO: 356060 - DNA, 1830 bp, Pseudomonas aeruginosa
atgccagggactgcactgttcgaaaagccacgctggttgcgcgacctcctgcgcttcctgcccctcaagagtcaattcgtcctctccgggaacatccgcgacctgcaagcctgcgaagtggtgccgggtacggtcaccgcgcagagcttcaaccagaccctctgcgacgccctgctggacgccggctacacccaggtgctggcctgggatccgctggccgggttccgcgtgctcggccggccgggcagcgaggcgggggccactccgcaggtgcttctcgacctcggcctgaccccggtggacggcgccgcgccggccggcatcgacctgctcggcgcgaccctgcaacgcctggtcaaccgtagcggcgagccgatcgccctgatcgtcgacttcgcctcgcgcctggcggtgcgcaacgacgccctgagcgccgccgagcatcagttgttcacccaggccctggtgctctcccaccaggcccgcagccgtcccgccggggaacagcgcaaaccgttcttcaacagcgtgctgtgggtggtggaaaaggaaggcgacctgcccgactggctgctggtggacaacccgcgcctgcgccatatcccggtgtcgaagcccgaccagccggcgcgccgggccctggccccggcgctgctccgcgggctaggcggcgcgggcgtcgccgaggaggccctgcaacaggccgccgcgaccttcgtcgagaacaccgaaggcctgctgctcctcgatctcaacgccatcgtccagctggcgcgcgtggaaggcctggccatggaacgcatcgccgacgccgtgcgccgctacaaggtcggcgtcaccgaagacccctggctgaagatcgaccgccagcgcatccgccaggccgacgagatcgtccgccgccgggtcaagggccagcagcacgcggtgacccacatgctggacatcgtcaagcgcgcgatgaccggggtcggcgccagccgcaagggcaaccgcccgcgcggcgtggccttcctcgccgggcccaccggggtcggcaagaccgagctggcgaagaccgtcaccagcctgctgttcggcgacgagagcgcctacatccgcttcgacatgtccgagttcagcgccgagcatgccgaccagcgcctgatcggcgcgccgcccggctacgtcggctacgacgtcggcggcgaactgaccaacgcgatccgcgaaaaacccttcagcgtggtgctcttcgacgagatcgagaaagcccacccccggatcctcgacaagttcctgcagatcctcgacgacggcgtgctcacctccgggcgcggcgatcgcgtgtacttctccgaggcgctgatcgtgttcacctcgaacctgggcatctaccgccagggggaaaacggcgaacgggtcgccaacgtgctccccggcgagcccttcgaggcggtgcagggcaaggtccacggcgagatcgagcgctacttcaagctggttctcaaccgcccggaaatcctcaaccggatcggcgagaacatcatcgtcttcgacttcatccgcgccgacgtcgccgagcagatcttcacccagatggtcgacggcaccttcgccgacctccgcgagcagcgcctcgtcatcgaactggccgaggcgccgcgccaggcgctgcacgacctctgcctgggcgacctgtccaacggcggccgcggcatccgcaaccagctcgaagcgcgcctgctcaacccgttgtcgcgggcactgttcgaccaggacgcgcagccgggcgagcgcttcctgatcagcgccctggacgccgacggcctgaccctggaacgccgctga

SEQ ID NO: 356061 - DNA, 600 bp, Pseudomonas aeruginosa
  misc_feature (549)..(558): n is a, c, g, or t
atgacttctgttaagcttgtcaattcctctgttgacggaaacgtagtcggcggaaacaactatgagattacaatacacccttcagcacctaatcccgaactcctgaagggggcaataaagcaactagaaactttttgcgaacaagatgaagagttcgttgattttctagaaaggtttgatcattacaccagtgatcgctcaggaagacccgtgataggtcttgaagcaaagctgagaaatggtaatcgcgaagacctcatcgagtcagcgattgaacaaaaagacagattcgtcaagaaaatttctcgcggtcaattagccagtagacggcagtacgtatactattacatactgcaaaagctggacacacaatttcacgttcaaatagttccgctcttaaaagtaggagctccgcctcacgccatagacgcagccatatacaatgaaattgtttcctctgtatattcagaagccttacaagttgatccctcaatagatatgcagctaatttatggcatgctctatttcctgacgggaaagtgccacttnnnnnnnnnnggtctgggagagttaagtgttaatttaccacccggcttttga

SEQ ID NO: 356062 - DNA, 786 bp, Pseudomonas aeruginosa
atgccgcgtcgcttgatcctctcggccacggagcgggacaccctgcttgcgttgccagaaagccaggatgacatgatccgctactacaccttcaacgactccgacctgtcgctgatccgccagcggcgcggcgacgccaaccgcctaggcttcgcggtgcagctcagcctgctgcgctaccccggctatgcgttgggcaccgacagcgagccgcccgagccggtcatcctgtgggtggccaagcaggttcaggccgacccggcgagttgggcgaagtacggcgaacgcgacgtgacccgccgcgagcacgcccatgaactgcgcacctacctgcaactggccccgtttggcctgtccgacttccgcaacctcgtgcgcgagctgaccgagttggcccagcagaccgacaagggcttgctgctggccagccaggctctggagagcctgcggcagaagcggcgcatcctgccggcgctgagcgtaattgatcgggcctgctcggaggccattgcgcgggctaatcggcgggtctaccgcgccctggtcgaaccactcacggactcgcaccgtgccaagctggacgaactgctgaagctcaaggccggcagcagcatcacctggttgacctggctgcgccaggcaccgctgaaacccaactctcggcacatgcttaagcacatcgagcggctgaagacatttcagctggtggacttgcccgaagggctgggccggcacatccaccagaaccgcctgctcaagctggcccgcgaaggggggggcagatga

SEQ ID NO: 356063 - DNA, 606 bp, Pseudomonas aeruginosa
gtgagctgggtgattcggcccgaatcactctgccaaggatcgacctcgtcgccgacggcgaacggggtgttgcggcccgcatcacttcgccaggtcctggcctcggcgccgccagcaagctgggtgattcggcccgaatcactctgccaagaatcgacctcggcgccgacggtgagctgggtgattcggcccgaatcactctgccaagaatcgacctcggcgccgacggtgagctgggtgattcggcccgaatcactctgccaagaatcgacctcggcgccgacggtgagctgggtgattcggcccgaatcactctgccaagaatcgacctcggcgccgacggtgagctgggtgattcggcccgaatcactctgccaagaatcgacctcggcgccgacggtgagctgggtgattcggcccgaatcactctgccaaggatcgacctcgtcgccgacggcgaacggggtgttgcggcccgcatcacttcgccaggtcctggcctcggcgccgagggctatcaacttctcccactcaagaggaaccgaaagatgtgtgactcgatcttgtatgcccccatggacgagctcgaattcgagcggctgctag

SEQ ID NO: 356064 - DNA, 684 bp, Pseudomonas aeruginosa
atgatagttaaacctttgctcgcacgtcttcaccttgaaggcagaggcaaagacttggaaacttgggggcgtatttcggctttgtgcagcttgacacagcacatcgatttctccgaatttatagagaacttgaacgctctcgataatacggaagcttggctgggggcagcaactgtctggacaaacattgaaaatattaaacagcatcgagaagaatgctttgcgggcctgagtgctggattgagtgcgggcggcacacatgcattgattattgctcgaaaaattgagcgtattttcggagatcagacacctccggtttctgtgccaatagagcttattcaaagctgtttttatatattcgaaaacgatagcgataatgaaagcaagcaccatcgacttttcggctttcatgaatggctaaatgcaattgctcacagtaatccagagcaagcactggccgtagctaagatctatctgacttacgtcaaaagctgtaaaccatatctttatgaccacaaaaacagcctcacccaattgatgactcgactctttgctgaagcagaagaacgagaagagtccgacggaggcatgatgttaagaagtgtagtggatatacaagacacgctactttcgctgggggtcaatggtgtaatagattggctgaaatctgccgaacgcccctga

SEQ ID NO: 356065 - DNA, 153 bp, Pseudomonas aeruginosa
atgcagtcgaagcgggtcatggcgaccatctcgatgatggtcggcacgccacggccctcctcgccgaccatccaggccagggcgccgcgatactcgatttcgctggaagcgttcgaccagttgcccagcttgtccttcaggcgctggatgtag

SEQ ID NO: 356066 - DNA, 192 bp, Pseudomonas aeruginosa
atgcctgtggagtgcgagcggctgcaaggcatgcccgacgactacacgctggtgccgtaccgcggcaagcccgccgccgacgcgccccgctacaaggcgatcggcaactccatggccgtgccgtgtgtcgcgtggctgggccagcggctgttgcagtgcccgcacaagacgggatcgagcgcttcggattga

SEQ ID NO: 356067 - DNA, 906 bp, Pseudomonas aeruginosa; identical to SEQ ID NO: 339158

SEQ ID NO: 356068 - DNA, 606 bp, Pseudomonas aeruginosa
  misc_feature (367)..(371): n is a, c, g, or t
atgagaaagtctcggtcgggcgtcgtgttttttggtgatgcggcccgcatcactctgccaggtcctgacctcggcaccggtggcgaactgggtgtttccagtggaaacactctgccaaggatcgacctcggcgccgccggcgaattgggtggctccactggaaccacttcactaggaaccaacctcggcgccggcggcgagctgggtgttgccactggcaacactccgccaggaccaggcctcggcgccgtcgacgagctgggtggtgccactggcaccacttcaccaggatccggcctcggcgccgtcgacgagctgggtggtgccactggcaccacttcaccaggatccggcctcggcgccggcnnnnntgggtggtgccactggcaccacttcaccaggatccggcctcggcgccggcggcgagttgggtggtgccactggcaccacttcaccaggatccagcctcggcgccgtcgacgagctgggtggtgccactggcaccacttcaccaggatccggcctcggcgccggcggcgagttgggtggtgccactggcaccacttcaccaggatccggcctcggcgccgccgacaagctgggtga

SEQ ID NO: 356069 - DNA, 705 bp, Pseudomonas aeruginosa
atgttgcgtcgttgctgtctgctcttctgctgtctgctgttgagcctgcccgtgcgagcggaggagtcggtcgccttgccgctgacggcggagctacggacctggctggcggagcatcgggaattgcgcgtcggggtggtcaccgaagcgccctatgcccagtacgaccgccgcctgcaacagtattccggggccaacgtggagctgatgggctggctggccacggcaatgcaggtgaccttgcggtggcagggctatcccgaccaggcggcgctcgacgatgccctgcgcgctgggcgcgtggatatcgctcccggcctcagccagaccccagccgggctgcgcttgtggctgttctccgatccctacctgcgggtttcccggctggtggtggggaagcgcgatggcagcggcagcgtcgaattggagcaactggagcgcgatacccgggttgccgtgcgggccggcagttcggtagccgactacctcagcagcacctatagcggcctgcaatgggtgtcggccgattccgaacgcgaggtgctgcgcgccgtgctcgccggacaggcacgctacgcggtgatcgacgaagcgcaactcagccgcctgacccgcgaaccggagttcgccgagctagcggtggttggcgatatcggctacccgcatgtagcgcggcgcgaaatttggcgcggatttgcgcaataa

SEQ ID NO: 356070 - DNA, 2649 bp, Pseudomonas aeruginosa
atggctatattgcaagagatattggtttggacccagggaattcccgcgtggcagagcgatgcaatttctcgcttgctggcgaaacaaacactgacaccgcaggactacgaggatttgtatgccttgctcaagctggcacacggaatccctgacccaaagaatcgtcaacctcagccactaaccgccgaccagatcccagcgaaggttaaggcgaccacgcacatcgagctgcgggccatcaagaatctgcttaacgtcaacgcaattgccgagaatcagcagttggcggtgggttcggcgggcatgactgtcatttatggcgacaacggatccggcaagtcaggatattcgcgcgttcttaagcgtgcctgccgcgctcgcgatcagtccgagcccattcatcccaatgccaatctgcccggggccaaggcaggtaatgctcaagcatccttcgatatcacgattgacggtgccgtcaaggaagtgacttggcaccaagggaaagaggctccaccagagctttcttcattcgctatcttcgacgcgcattgcgcccgggcatatttggatagtgaggatgacttctcctacgtgccgtatggtcttgaagtattcgagacgctcgccaaggtctgtcaacagcttaaaaactccgttgagcaggaacacaagcagtcggctgtagacctcgccgtattcgccccgctgcacggcgaaacagccgtcggcaagctgatcacggggctctccgcgaaaacgaccacggctcagattgaggcacttgccactttgaagcaggaagagcttgagcagcgggaaacgctggagaaaagcctcaaagagaacaacccgaaggagaaagccggtctcttgcgtttgcgcgcacgccgcattgcggcgatcgccaagaatgcagccgataaaggacttgtcgtcggccccgaagccatcgccaagttgaaggcgctggctgatagcttccgtacagcacaggtcgccgccgcccttgcagcgaagaatttcaaggagggcgaaaatctgctgccggggactggcggagaggcgtggcgggaattgtttgatgccgcccggaagttcgcgcttgaagctcatccagataaacagttccctgacttggggacggatgccgcatgcccgttgtgtcagcagcctctggctgcgggcgcagaacggttgctgcgattcgaggcgttcatacaagcggaagcggaaaagacggcgcaagcgcggcgccaagcgcttgccgccgactaccgcccatttgcggcctccgtcatggtgttgaactttgatgaggcgacgcaggcggaagtagcggaaatcgactcaccgctagtggccgacaccaagactttcgaggccgcactgtcggcgcggcacgaagcaatcaaggcagcggtcgtctcgcatgactggacgggactggatcaggccctggtcagcccagcggatcgactacaggtgctcgctgacaaattgaatgcggaggcggaggccctggatagagcctcgaatgaagaagctcgcgctgtgttgcagaagcaactaggcgagttggatgcgcgcgtaaaactcagtcaagttaaggaggccgtggctacggcagtgacgaagttggtgcaccaagggaaactgaagaactgcctgactgcggtcaggacaaacgctatatccctcaaagcatcggaactcgcggaaaaggtggtctccaaggaactggccgatgcgttgaactgggaattcaaagcactgggcgtagggagcttgagagtttcgctgcaaagccgtgccgaccgagggaaggcgctgcacaagctgaaactgcaactgccgcaggttcgtagtccgggtgagattctgagcgaaggcgagcagcgtgccattgcgatcggctcgttcctcgccgaggtgggattgagcggtgggaaaggcggaatcgtcttcgacgatccagtctcgtccctagatcatcgtcggcgcgagcgcgtggccaagcgcctggccgctgaagcggtgcagcggcaggtcatcatcttcacgcacgacatctatttcctctgtctgctagccgaagaagcaaagcaagtgggtgcggcagtggtcacgcagagcctgacgcggcgtgctgaaggcttcggcatagccgacccggaattgccgttcgaaggaaagaacgcgagcaagcgcatcggggtgctgaaagcacagcagcaagcaatcgccaaactgcacaaggaaggcaacgagcaagaacatcaaaggcagacggttgatgcgtacttccgcctgcgcatggcatgggaacgcgcggtggaagaagtcctcctgcgagaagtcattctccgcttccgaaaaggtgtggagacacaacggctcgtcggcgtgagtgtgggcgacgatgactacgcgcaggtcaacgcgggaatgagcaagtgctccaactatgcccatgacaaagcgatgatgggcggtgttgctattcctgatccagacgaactgctcacagacatcctcgcgctggagagctggcgtgcacaggttcacaagcgttcggaagaaaccgccaagaagcgcaaagcagggccgccgattcccgcaggagctggcgtgcaggtcgctccagcctga

SEQ ID NO: 356071 - DNA, 819 bp, Pseudomonas aeruginosa
gtggcggtagtcaatcccagacaggcgcgagatttcgcgaaggcgatgggcaggctggcaaagacggatcgcgtcgacgtgctgatgctggcagagctggccgaagtgatcgacaaacgcccagaccgggatcgcctcaccaggccgatggcagatgagacgcagcagcgcctgcatgcgttggtgacccgtcggaggcagcttgtccgcttgcaagtcagtgaacgtcagcgcaagtacgcctctcactcggatgtgcagcctgggatcatcgaactgatgaacatcctgaagcgccaggttcaggacatcgacgcgagcatcgcagcgcatctcgccaaatatcaagtcagtctgacgaagctctttcagagcgtcaaaggcgttgggccggcgactacggctgcgctgatctccgagcttccagaattggggcagctcaaggccaagcagatctcctcactggtcggcgtcgcgccaatgaatcgggactcgggccagtcacgcggcaagcgaatgatctgcggtggtcgggcaacggtgcgcagcgccctctacatggcggcaatcgtagccatgcggcacaaccctctgatccgagcctgctatgagcggctggtggcggcaggcaagcccaaagaggtcgccatcgtggcttgcatgcgcaagctgctgatcattctgaatgccatggtgagaaccggcaggccttggaaagaaacggcggcaactgcccaggacgatgcggaggctcacatcgtgccacaacgcggccggggggctcagtcgttcatcgcctgtacgcgacccagcccttga

SEQ ID NO: 356072 - DNA, 678 bp, Pseudomonas aeruginosa
atgaccccgttcacgttttccggcacgaccatcgtttccagctatgccgagaacgccacgcgaatggtgcccggcctgcgcgacttgccgaagatggccggcgcgctgctggccgagcgtgtgccgaccgatgcgcgcatcctggtgctgggtgccggcggtgggcttgagttgaagggcttcgccgagatgcaaccgggttggcgcttcgatggcgtggatccgtcggccgaaatgctccagttggcccacacgaccctgggacctctcgcatcccgtgcgcgcttgcacgaaggctatatcgacacggctcccatgggaccgttcgacggcgcgacctgccttctgacgctgcactttcttccgcgggccaaacgcctggagaccttgaagcagatgcacgtgcgactcagggccggcgctcctctggtcgtcatccatcacagcttccccaacgaaggtccggaccaggacaagtggctccagcgcaacgctgctttcgcggtcgcctccggaatgccttcggcacaggccgagaacattcgggcgctcaaggagcgattgcccgtactctcgccggagcaagatactgatctgctcagcgaggccggattcacgcacatcgagttgttttattgcgcattcactttcaagggctgggtcgcgtacaggcgatga

SEQ ID NO: 356073 - DNA, 444 bp, Pseudomonas aeruginosa
atgaaacgcgacagccgcctgtcttccgtcctgcatgcactgctgcacatggctgagcaggatggccccgtcacttctgaaaccctggctcaatgcttgggtaccaaccccgttgtcgtccggcgcaccatggggtatttgcgagaagcgggcatcgtcacttcagatcgaggccacgcgggtggatggcgcatccatgccgaccttggcgccgtcaccctgctccagttgcacgaggcgctgggcgagccggccatgtttgccataggcaatcgcaacgaaacaccggagtgcctggtcgagcaatcggtgaatgccgcgctcgaaggcgcctttgccgaggccgaggcgctgctgctgaaacggttctcggaaatcactctggccgatctggccgccgacttcgcgcgccggcatgcggcagcacgacgcaagaggagttga

SEQ ID NO: 356074 - DNA, 315 bp, Pseudomonas aeruginosa
atgcgatgcgctttcttgctgctgcccgtgctgctggtcgcttgcggccagcagccgaccgaagacctagccgctgccctggccgccgatcctgtgcggttcaaggcattgcatgcgcagtgtgccgccgacaggacggccgcagacgaggacgcctgcctggccgcggccgatgctttccggctgcgcttcttcgccggtgaaaccgggcctgacgagttccgcacgctggccgatctgccgccgatccagccgagcttcgacacgccctccagtaaccaggacgccatgcccttcgagggggacgtgccatga

SEQ ID NO: 356075 - DNA, 276 bp, Pseudomonas aeruginosa
gtggctgagttcattgatcgcctcaactctccgacaacgcaggtttctgaagggtcgctcactagcaagaaaggctggggcaaggcgccgttcagcgggaacaaggctcaccacttcgagcttatctatgccgacgccatcggcccgcagggtcgcgagaagtattgggtggctctctgtggtgcggatgcggtcactaccgacaaagcgccgatgttctcggctggcagctggcagcggtgcaagaactgtgagcggagggcgcgcaatggctaa

SEQ ID NO: 356076 - DNA, 498 bp, Pseudomonas aeruginosa
atgagcaataccatccccgattcgattcactggattgaccttcccgaaatcggccagaccctcgctgatggaatcttctttgcccgccactggctcaatggcaaggaatacacctacgtcgatctcggcaaatgcgccgagttcactggagaatggggcgagtatggccagagcgtggatggcgccatcagctaccgagacggagcttcgaacacgatcgccatggcagaagctggcagcccgattgccaagcaagctctggagatcggagaaggcgtattcattccatctgttctggaactggctcttctgttctctgccaagcaagcaggcgagctgtctggtttcgcagatcgctggtattggtcgagttcgcagtactccgcctactacgccttcctcacgggcttctacgacggctcacggacgccactgcaagagctacgacttccgtgtccgccccgtccgcaagattctcattcttcagtaattctctaa

SEQ ID NO: 356077 - DNA, 303 bp, Pseudomonas aeruginosa
atgaaccaagctctcgaacgtgaaaagcccgttccaatcaacatgcgggtcgacacgaaaaaacgcagcctaatcgatgcagcagtggagttactgggaattgaccgaaccagctttatccttgacgccgcttgtaaacgggccgaggacgtcattctggaacggcagttgtttgtactcagtcacgacgcatttgaccaattcgagaaggcattggatgccaacccgataaggagtaacaagtgcttacagaaactgatggcgcgccccagccgatggagctcagcccccccgaaaagctga

SEQ ID NO: 356078 - DNA, 1503 bp, Pseudomonas aeruginosa
gtggccatttatcaaattctaacgagagacggagttgtagatccgggtcaagaagaattgctagctcaactagcaagtgatctaaaaaagccaaatgcgaagctgctactgcatcttcatggggggctgaacgacgaagcttcggcgaaggtgactgccacaagactttccggtagcggacccaatagttgggggttagatagtgaatggacgcaggtctatgttatttggcgaactggggtgctagaaacactccaaaccaattggcttgagcttgtaaataaggaccagttttatcagacagtaatgcggaagttgatcgcatttttggcgagaaagcttggtgggtctgtagctgtggggcgagggggggcagcggttgccatttccgaggctgagatccagcgtcgtctgctgggccaggcgggggcttggccttttgatgatttagattccatattgccttctaacgatcaagctggtgcgcgctcggtgacccttggcgcgcaaaccgacagctcacttgctgccgagtttaagagcgagcttgcagccgataattctttcaaaaatattgccgctgatattgatgaggcggtcaatgtgccaagtggtgcccgggctgcttcggcaggtgcgaacggagaggcaggtagagaaatattgaatcggttcgacgaagctattcagcttgaactggctcccccgccagttataccaggtcagcagcgcggtcttgtttcagttgcagcattcttgttgaagcatgccgcaaaagttgcacttagatgttttaaaagatttgagagcggccgagaccatggcttccatgcaacggttgttgaggaggtttgtcgtgaattctatggtgatttaattggggccgggatttgggggttaatggttcaagataccgcggatcatttcggggaggggaagtttgggagtctgctaatagattgtctggctgagcgtggggttagcaggtttgcaataactgcacatagtgcgggttccatatgggcgtcgcacttacttataaatatgaaggcaaaagaaataaatgggaaggttggcttgttcttgctggcgcctgcagtacgtagggatttcttctctactatgcttaataatgccggtgatttaatttcccactgccgcatgattactatgacagatgcatttgagcggaaggatccggtgcttgggagtaatatgagttatatctacccgagctcacttctttacttggtttctggcttgtttgaaaaagtatcaggagcggcttatgttgatgctcctctgttgggtatgcagcggtttgtggggctggaaggtttaacgaaagatgagaaagcaatagaaagtcaaattgcagaattttttcagaaacctgattgccgcattcttacttcacctacagaaggagtttcgatggcgaatagccatgggggctttgacgatgaggcctatacgctagcgacagctagagctttgttctga

SEQ ID NO: 356079 - DNA, 1140 bp, Pseudomonas aeruginosa
atgaagagctgggcaattgttgtaggcatcaacatctacccatcgcgttctgggcagcggccgctgcagggagcggttgcggatgcatgcgattttgccgattgggtccttgatcctcaggggggggcagtgcctcctgagcgccttttcttctggacctacccctggccagctgcattaccgccaggtttactgtcgaactatctcagtggtaaccctccagaatggtttagtcatgactctggctggcaacttcctgagcagatacgcccaccaaaagcaatggaaatcacaaccacgatcgagcaagtggggcgcacagcctatgaagaagccttcgtggaaaatgacgaagaccctcggcgtatctatgtatttcttgcaggtcatggcattcgcgctcagacatttgatcgcaatgaagaaacctgttttctggcaggtgacttttttccaatctcttcaaacttagctgcagggctggtgccctgcgagagttttcgcaaggcattgctcaacgatcgtttcaatgaggcgatcctgttcactgattgctgccgctctgaaatcgctcgattgacgctcaaagcgcaacctgtttccgactacagcagcgatctaatatctcccgttgcaacttggggtatggcctttgctgcgcaggaaggtaagccagcctatgaaacattgacaccaccagtccgaggagcgttctcaagtgccttaatgcaggggttgagaacccatcgtccaggacttgcaggtgaattgcacgcagcacagcttcgagactttgtgactaccaatattggaaacttcaccagcagtgaccaaatacccaatctcctataccggcccgatcccgatggtcctttgattgtgcaggggcatctaggtgggggcgggggggatccgaatggccctactctcgatgtttcggcgttggacattggcacccggctaatccttaatggaggggacaataagccggttccgggtctagttccactcactgtcactgggccagaattacaactacccccccttgctccgggcctttatctgattgcgatagacgacggtagtggtcgtcacacgatgttcgtgcaacccactcgggagaacgtctgtgtctcataa

SEQ ID NO: 356080 - DNA, 1962 bp, Pseudomonas aeruginosa
gtgtctcataatttttccgcatctcagccgctctatacgctatcgctgtgcacaaggccaggcattgccatcaggctgcttaattccaatctgaaggagatcacgcggggttctggcaagctcgaaacgaagcagcccgaaggactgtatttagtgcaatggagctccggaggtttacagtcagagacaatggtgcgtctagatggtagtcaggaaataacggagttgaggttcgatcctagtgatacagccactgacacagcacctcacagtggcgatcacattgcacttgcattgatagatgcagtcagtaatgcgctggagccaataaaggggagccaagaatcaacaattgtgctgatcgtcactggtgatgctgagcctctcaacgatatatccgctcttcggttgcgcctttttgaccggaacgacgttgccatgcgaagggactctggccgttttatcaagctcgaccttggttccgacgagcgagcgtatatctatcatgttaagcccggtcggttccacattgggtttcaatcgatcctgaaggagcggcttggtcagagcgttcctgcactcgccggtcgccaaaccttgatttttctaacggctgctcgcgcgaagttaattgttcctaataatgggaagttcgttaaggaggttggtatcggtatcgatccagccaaaacggttatcgtcacagttcgtggggatgaagaaaagtaccgcgttcgtgagcgtgtccgcctggcgagcctgcttctctatgacattgccaatcagacaaactctctttcgagagatgttgtttctgtacttgatgacaatcaaaccgatccaatgctaaggctttatggtgcattggtcgcactctcgactcttaagcgagatgagaggtcgcggatatcacatgagagtaatcttgtgggggaacctgctgactcctcactgcgttggggcgctcacgttagaaattggatctcgaatccaggtcaggcaggtcttccaacggacgctattgcagcatattgggagctggcgagaacaatcccggaggcaatcggcaaaggtccgagtaaatcctttccagtgcgaatcgaaactccacctatgcttgatcgcgcatggctctgggcaatcgaggaaagtacagtccgccctgacgccattcgcggaactgctcaggtggctgcggccacccgttcatctggaggtactgctccttggttatgttggcgtctatctgctagcaccgctagaccacgtcggagttcagtgactgacgatttaacttcgcttaccgcacaagtcgtagataagttgaacacagtggcaaatccgagtatcagccgtagtgtggctagcgtattgaagattttgagcccagaggctcaggcgacagctctgagagcgctacagatcatgagctccaatgatcgactgatcaatgctagcggtattgccgacttggcggtttcactcggcctaccggcccaacagctccgtaatcggctggataaaataagcaagactctcgacaaagcagcatcaggtacggaccaagaggagctttctctctccgagaaatatgaagccccagccttgctgcgacgtgtgatagatcgagatgatctgcaaaaggggcgatttggtgggaaagccagttgtgctgagtttaaggtttctgccgagtttgatgcgggtagtgcaaagaactgggttcgtataagactttatgtcgaagggccaggtacggatggtgaaaaagttgaattccatcttcacgacagttttaagccttcagctgttatgcgtcgtttcaagaaaggtgccgcgcaacttttggtatcagcatggggcggctttacagttggtatctggattccttcacacaaggtggagttggaactgaacctagctacgctagagacggcacctcgagtcatccgtgagcgctag

SEQ ID NO: 356081 - DNA, 741 bp, Pseudomonas aeruginosa
atggccacgaagaaagagcaagctgccgataccgcctggatgaaggaggcatttgtcgatgtccaggccgaactggcattaaaaatcaagcgagccacacaatccattgagcatgctggcactaagggtgcagtttacgaagaccattggatagaggtattccgggcatatttaccagaccgctacgaagtggctacgggctttgtcatcgatagcctcggtaatcgcagcgaacagatggatgtcgtggttttcgatcggcatttcacgcccacgttgcttgaccaacagaagcaccgctacattcctgccgaagcggtctatgcagtgtttgaatccaagccccacttcgacaaaagctatcttgagtacgctggcaacaaggcggcctccgtacgcaaactacatcggacctcggtggccatagcgcacgccggcggcacctaccaacccaaggcactgttcccaattctggcggggatagttgcgcctaaatccagctgggctgacggcttgggagaatcgttccagaagcacctgcccaccagcgagctggaacggctcgactgtgggtgcgcattagacgatggtgcattcgacttattcgatggtgatttgaagaccgtgccatccgaaggcgccttgatctattttctctttcgtctgctatccaagctgcaatctctcggaacggtgccggccattgattgggccgcttatgccgccgtgataaacagatag

SEQ ID NO: 356082 - DNA, 903 bp, Pseudomonas aeruginosa
atgttgaccactgatgaagcttttcgaaaattcaaatctcgactggaactgaacgatcgcgagcaaaagaacgcctcacaacgtcagaacgaggtgcgtgactatctggaaacgaaattcggtattgcgcgcagctttctgacggggtcctacgcgcgccacacgaagactaaaccgcttaaggacattgatatcttctttgtgctgaaggagtccgaggagcattaccatggcaaggccgcatcggtagtgctggacgatttccatgctgccctcgccgagaagtatggcaaggattcggtacgcaagcaggctcgctcggtcaacgtggactttggggtagttatcgacgccgaggacaacaccgactaccgggttatcagcatcgacgccgtacctgcctttgataccggtagtgaatacgaaattcccgattccgcttctggcaagtggattaagacagaccccgaaattcatgccagtaaagccgtcgccgcacaccaagcttatggcaacgagtggaaagggttggtccggatggtcaagtactggaacaacaatcccaagcatggcagcgacaagcccgtgaaaccctcgtttctgattgaggtcatggcgctggagtgcttatacgggggatggggcggttcgtttgaccgtgagatccaggcatttttctcgacgcttgctgaccgaatccttgatacatggcctgacccggccggacttggaccggccatcagcaacgacatggatgacgcgcgcaagcggcgtgcgcaagagcttctgcgcgcagcgagcaaagaggcctccattgccatcgactatgcgcgccgcggtcgcaacggtgaggccttgcgcgcctggcgcaccctgttcggcccaaaatttccgctgtcgtaa

SEQ ID NO: 356083 - DNA, 504 bp, Pseudomonas aeruginosa
atgagtgctgttgctacctactcgtacacccattccgttacttatgtggcggacaatatcctcaagagcctgaaagacataatccggctcagcgggcttgatccgtcaaatttcgtcgagggttggtccagcaacctgctagctgtcaagacttggctggattccggagacctggagcgggttgttctcgaaatctacaacccgaccactgacacgctgattacccgttgggacatcgacgttgtctacagctggtcttcctcgggcgatggcagtttctggacagacactgagcagctgcagtacgcgatccgcaaagccggtgttatgccgtcccaagccgagtacaaactgatgctccataccaaacaggggcgtccggatgttcccggctggagcaaggggagttaccggtcaactgatggcatggtcaagcagagtctcggaacgacggtcgaacacaacggtttgggaggccaagctggctactggaggcaacgctaa

SEQ ID NO: 356084 - DNA, 474 bp, Pseudomonas aeruginosa
atgagtaccgtcgccagccgtacgtttcggagctctccacatcgcgatgctaacgccttatggagcgccatcgtagaattgctgacccagggcagggacggggaggctcgccaagagttgcgagcggtcagcgggatcgctgccagtttgataaccgaccaggcgcctcggactgtccccatcattgtgacctgcgacgggccgcgcacacgcatttactgcctttatgacgaggacgccattgatggtgacggcgcgaatgaggacaccctgggtttcgaccctctgaaaggcaactgggccatatcactcccctgccagaaggacgatttggcatgggtacaaacagcgttgaagaagcacagcagccgaatcactgcccgagatctttccctcggcatttcgactggcagcgatacggacgcccgggcggagtcgctcaccttggatgtgggggggttcctgaaatcatga

SEQ ID NO: 356085 - DNA, 915 bp, Pseudomonas aeruginosa
atgaccaagccaaacttcgagaacgaccatttacctaaaggtattcagcgaatctggagcctgcccgatgccacgctgggcgcccattgggactccatcgtgctcgacgaaacgcacaaacgccaactgttgtcccaggccgtcgtgaatttcacggtccggtccaaagtggctcgaagtgttttgcccctgcacggcgtgatcctgctagtcgggcctccgggcacaggcaagaccacgttggcgcgtagtctggctcaccgggtcgctgaatcttttaactccaacaagttccgattgctggaggtcgagccacactccctgaccagctcggctatgggcaagactcagcgtgccgtatccgacttgttcgcccaatccattgccgagtcggcggccgctggtccaaccatcatcctgctcgacgaagtcgaaaccttggcagccgaccgcgccaagctcagcttagaagcgaatccggtcgatgttcaccgtgcgaccgatgcggttctggtgcagttagacttgctggcagagcagtacccaaatctgctgttcgttgcaaccagtaactttccccaagccgtggacagcgccttcatgtccaggtgcgacctcatcatggaagttccattgcctggctccgaggcttgtcggcagattctgaaagactgcctgaacgggttggcaaagaccttccctgacgtaggcaagcttatcgagtctcccgagttcaacgcctgcgccgccgagtgcgaaggccttgacggccgcgccatccgcaaagtggtcgccaacgctctggcggcaagtcctgagatcgctatcaatccgaatgctgtgtcgattggagacctactgcaggccattaagtacgccaaggcacaccgcactcaaggagagaagcgcagatga

SEQ ID NO: 356086 - DNA, 129 bp, Pseudomonas aeruginosa
atgagcggaacccccactacaccgcccggctttaaggctttgttctgcatgtccttcaagtactggcggagcggtaaagaggtgcgtcgtaaagatggacgccccttctgtttcttcgtgaagcaatag

SEQ ID NO: 356087 - DNA, 132 bp, Pseudomonas aeruginosa
atggaagtcagctggagccatggaatacccaaggaaacgtacctcgctggcaacactcagaacgtcaacaagatatcggctaccgactcccgcgggccggtgctgacgatactgaggaggaaggcaggatga

SEQ ID NO: 356088 - DNA, 438 bp, Pseudomonas aeruginosa
atgacagacttcctctcccccgcggaacgttcggacaggatgtcacgcatcaggggcaaggacacccagccagagcttgcacttcgcaagatactccacaagctcggcctcaggtaccgattgcacggggcagcattacccggcaagccggacctagtattcccgcgctacaggaccgtggtctttgtccacgggtgtttctggcaccggcatgctggttgcaatatcgccagcacccctaaaagcaatacgccgttctggctggagaaattcgagaagaatattgcacgtgatgcacgcgtagccgcccagttggaagcggagggatggagggtacttgttgtgtgggaatgtgaactagcgtcgatggcaaagacccaggcaaccgggaagcgcctacagacattgatccgtaacggtccctgggatatgggatag

SEQ ID NO: 356089 - DNA, 5499 bp, Pseudomonas aeruginosa
atgaataaacttgcacattggctcgcgacaattgtccatgagaaggttctgggggcgacgcaagggtacggcagtaccaacctcgagtaccggctgatcttccgtggcccgcctctcgagatcctcgagctggcctacgaggaattggcacgggatggaggaatccacgttcagggcagcttggacggtagcatggcaaccctgccggtactgctccagtatccggctaaccagttgcagggacccaagccccggatcgggcagtctggcaagtgtgacaacgaccacctgctggatgtccgcaacgaccccgttaatcccagcttcgtcgccttggtcccaccagggctgcacaacaatttgtcgatcgagtccacgaccgacgagttcggactggggaccgctacgagtacgggccatgcctcctttgagcaatggtgggaggacggttttgtccagcaagccgtcaacgaggcattgcttgtagcaggtatagatccatcgcagcgggaagatgccaaggcattgatccgtgccgccgccggttcggtcgacgaggtggacccagacaaaggtggtcatcgcgccgcctggcgcttgctgtcgcgtctctattcgattgcgaacatggctcacggactttctgcaggacaagcactctccctggcatgcggccttcccccaacggaggacggcaggatctcgtcaaagacgcagacctacatactagggaggatatccgaggagctcgcagatggtttcaagactggcatcgagcgcatggcacaaagtgccccgcaagatgtaacacaggccctgcgcgacttccttgtccacctccaatcgaattgcgacatacccactgccttcgagcgcgcaaccgaggccttctacctccccggcgcggatgcagaattgactcccccaccctcctggtggacaaccctcacagccgaatgctggactgaactgcttgccgacgaagccgacgagaccgttggtgaaataactatccagtgcaccaatggcattgttcccatgggaaagggaatgcctacggtggtacgagacaaggtcgagctggctatctcgactagcgaaggctgcgaaccgcaagagtaccaattgacgggaggctcttatggcaaggcggctacgccattgctagcaaacggtagcggccccactcttcaatccgacctgtttccaccctcccacagggccccgatggcatacaaggtcatcgccgatggctgcaagccagcaagcgtccgggtgatttccctcatgaactggcggcctggaatactcattacctgccggctcgcgacgaagctttcaccgccgaagaaacctcgcaagaagtccacgaacctagactgggagactgccctgtcgctaccaggatccggtcgctatgaactgcgaatccacctgtcgcctggagcatgcattgggaaggtagaagggctaccagacgacgccaccgagctcgaggcacagagacaggagatcgaggcgaggccagttggagaagatgagtatctgctggaagtcgaagccgacggaaagtaccagctggacatcgccttcacgctcgctggcgagaaaggtgccacggcttgcagggtctacctggcttgcgaggaggcaaaggaagaaggctgccgtagcgagttcgagcggcttatcaaactaaatcgccgacatctcgagaaattcgacaccaagactgtggtccatctcgaccggaactcccgcgcatccagtttgcagtcatggatgctggaggaacaaaatgcggcgaactctttcaggccgctggtgatcgcggacgactacgcgtcccggtgggcaccacccgagtgggacgccccccacggccccatactctcgcaaggccgcttcctgcatgatccccgcccccaggccatgcgtttccatcctccaagaggctttatcgaggcacgccaggagatcgcacgctacatacggggcagtgacgaccagtcgggactcctcgaatccgcgtcgctaggcgcctggctgtcgggcgatactgggttccgctcccttgtcgaaggctatctagattcattcatggcatgggtgagtacagacccatccactgcctgttgggtggataccatcgtcgtgtgctcgctggaagctgatggccgcacgctggacaggatcccggacgccatcattctttcccccctgcatccgttgcgccttgcatggcactgccttgcccagaaagtattgcgggacgaggttgaaggtgactccgcctgtccgtgccctgcagccagtatccttgaccccgattgtgtccccgacctgcttaccatgttcctgcaagcccccgatggggaggacagcctggacttcctctcggtcgaatgcagctccgactactggtccgtgctttggaacggatcacgtctaggccagattcccgaccgtgcccgccgggcgcccttcgacagcagttttggccttacggtcggcgggatatcgagtggcttcagtccggcccaggtctcgcgcgcactcgatgacgtcacggacttgctggcggccaagtccattgtcagcctggtggtgtccagcgcgggcggaaccaccgatgcgtgcaatgagggcctagccaactggtgtacaaagcgattcggcaacggggatcaggacatccctcgacacagtgtcggcgcgaggatactagaggtgttcgataccaggcaggccggaaggcccgaccaggcgacgatcgccaacctgtccgaagacaccgataaccatgtgcgctggtacgacaagcaaccagccggggccaagcccgacctgggcatcatcgcgcagttggactcggcacaacccgagtccaaggaagttggcatgctttcgccaatgggagccggcgggttgatcaggcaccgagtcaggcgccagctccaggcttcgttcctgagcgagtccaggcaaggcctccaaatgcccccgtccggagaacgattcgccgacaaggtatccgcatgcatgctcatgctagaaaagctgagggacggcaaggtcggcttgcagttttccccgaatgtccatgcggtctccagcgtgcttgaggaaaacagcgccgggttcgttgcagtctcctcctcggcaatcgaccccgcttgcttcctgggaggctggattcatgggacctacctatgggactacgatctgccctcctactcccaccgcgcaggcgatactagtggctactacctcttgtcgcaggtcaagcaggctgatcgcgatgcgctccgacgggtcctgaagctccttccagactgtgaagatcttgacgatgctcaggtcgagcagatcctcctcgaagttgcaagaagggggatccccaccgtgcgcggcctttccggggacgacactggggccacaggcgaccttggcctgttcctcgcagtccggctcctccaagaccagttccgcttggcaggtaacctgaacagtctgctccctgtccttgccggtacgcctgatgactcaacgatagccatcatcattcccgtagaccctttccggggatacctttcggaccttgcccgctcccttggcaaggagcgcaaggaaacatccctatcgcgccccgacctacttgtcgtcggagtacgcgcatgcgacgacaaggtccacctgcaccttacccccatagaggttaagtgccggcaaggaatagtctttagtgctagcgactcagccgaggcgctctcccaggccaaggccctgtcggtactgcttcacgccatcgaggagcgtgcaggcaactccctggcatggcgacttgccttccagcacttgctactttccatgatcggctttggtctgcgtgtctacagccagcaccaagcagtagaagggcaagccgggcggtgggccagctatcacgagcgtatcgcggcagccatcctcagccccaccccatcgatcagcatcgatgcgagggggcgactgatcgtggtcgatgcatcaaccaagagcggcccgcacgaccgtgatggcgacaaatacgcagagaccatcgtcatctccagccaagatgcaggccgcatcatcgccggaaatgacgcacagtcgttctacgattccgtgcgcgcgaaggtcgacgactggggactgctgccctcccgggcagaggcagtcggcaccccactcgcacagaccgaaagccccccctcggacgacggcaaaatgggcgagccagcaatagctccggcggaggagatctccattccctccgctgaaatggtcgaggatctctcccctagtgttgaggaaccaggaccaagccctgctatttcaaccgatgagcccggcaaggggatcatcttgtccgttggcaagaccgtcgatggcttcgagccccggccactatccctgaacatatccgacactcgactcaaccagttgaacatcggagtcgttggcgacctcgggacaggcaagacccagttcctcaagtcgttgatcctgcagatctccagagctcgcgaggaaaaccgcgggatcacgcctaggttcctgatcttcgactacaagcgggactacagcagccaggactttgtcgaggccacaggggccagggtggtgaaaccctatcgcctgccactgaacctcttcgacacgacggggatgggagagtcctccgctccatggctagacaggttccggttcttcgccgatgtcctggacaaggtgtactccggcattggtcccgtgcagcgggacaagctcaagggggcagtccgcaacgcctacgagacagctggtgcgcaaggccgccaaccaacgatctacgacatccacgcagagtaccgcgagctactcgccgggaagtcagactcgccgatggccatcatcgacgacctcgttgacatggaggtcttcgcgcgcacaggggaaacgaagccattcgacgagttccttgatggcgtcgtggtgatctccctggactccatggggcaggacgatcggagcaagaacatgctcgtcgctatcatgctgaacatgttctacgagaacatgctccgcacgccgaagcgctccttcgttggtacgtccccgcagctccgggccatcgactcgtacttgttggtagacgaggcggacaacatcatgcgctatgaattcgacgtgctccgcaagttgctactgcaggggcgcgagttcggtacgggggtcatcctagcctcgcagtacctacggcacttcaaggccggggcgactgactaccgcgagccactgctgacctggttcatccacaaggtcccaaacgtaacgcccgcagagcttggggtacttggatttacgtcggacctggcagagctttcagagcgagtgaagacccttcccaaccaccattgcctctacaagtcattcgatgtggctggagaggtcatacggggactacccttcttcgaactagtcaacgaagcctga

SEQ ID NO: 356090 - DNA, 1470 bp, Pseudomonas aeruginosa
atggatacggaagctccccacgaagagcgcttttttgcaagcaaccagaatgcaccgtgccagggactctttcccctgagcacagacgaccccgggcaggagcccatgaaaaaaatcgagcatttgccacctctccccgatctctcccagccgttgtgttttgccgacctgtttgcagggtgcggtggtctttccctgggcctttcgctcgctgggcttaacggcgtattcgctgtagagcgtgaccagatggcctttaagacgttgagaacgaacctgattgatcgggaagacgtcccggtgaccccattcgcctggccctcttggctggaaaagcaagcttgggggatcgatgacattctgagcaaacacggcctcgacttggcgtccctgcgagggaaaattcaagtacttgcaggcggccctccttgccaaggattcagcttcgcagggagacgacaagaatccgaccctcgcaacaagctgttcgagaaatacgtggaaatggttagcgccatccagccagcagcgcttgttctggagaacgtaccaggaatgaaggtggcacacgccacaaaggcgtggaagcagcttcgtctaacagtcaaaccccggtcctactacgataagctggtcgaaagcctcgacaagatcggttatcaggtcttgggtaggattgaagactcttctctctatggcgttccgcaaaagcgcccacgccttatcgtgatcggtcttcgaaaggacatagcgcggcatctcgacggaggaatgggcagagcctttgaccttttggacaaagcccgcctgaagcagttgcaagacctcggcctacccaacgaaattcctgcagaggatgccatctcagacctagagataggacgtaagggcaccaagccctgccacgaccctgaatctccaaaggggtttcaggagattgactatgccggccctctcacagcattccaaagacttatgcaccaaggctgcgatggagcccctgacagcttgcgcctagccaggcacaagcctgagataaaggccaggttccagaagatcatcgaggaccccaagtgcaccaagggcgttcgtatgagtgccgacctgcgccaagcatatgggctcaagaaacatcgcatttacccgatgcaagccagtgcaccagcgcccactatcactaccctgccagatgatgtcctccactataaggaacctagaatactgaccgtccgggagtccgcgcgcctgcaatcgttccctgattggttcaggttctgcggcaagttcacgaccggaggcagtcagcgtacaaaggaatgcccacgttatacccaggttggcaatgccgtgcctcccaatcttgccagggccattggcatggcgatccaagcaatgctggaagagaccgtgccgctagcacaagcgcaggcggaattcgagcaagaagaagaaatgatagccatcgcttga

SEQ ID NO: 356091 - DNA, 1662 bp, Pseudomonas aeruginosa
atgttggtccttccaagcacgcctttgccagagtctacgggatcggagcgcaaggtcctctcattgttacgttgtgtcgaatggggtggccgttcggcaagagcattgagctcgttaaatctctcagagcatgtctaccagcgctggggcgagatcgatttcctacttgttggcaagcgtgggctaattgccatcgaggtaaagggtgggaatgtcacttgcgccagaggcaagtggaagtatgaggatcgccttggccgcgtggtgactcggggcaaatctcctctggttcaagctaaagatgcctatttctctctggtgaagaattacgtcgatcctcgtttggggagcggctttgcgcaagaggtacccgctggattctgcgtgatccttgcaggaatggcccggaaggatcttggggcgatcctagggggacctgagtttcctatgggcttgattgggacgagggatgatctcgccaatcctgcgagcttacagaggtttctcgaaggagttgcagactattggcagcttaagaacaaatctcggcgcggacttagtgcggatgaagtatcaagcctgattgggctattccggccagagttcgaactggtgcgccctttgcgtctagctcggcaggagattgaagagcaactgctttcgcttacagaggagcagtacagcttgctggatctttgggacggagctgagagagttttttgctcttcaccggctggttgtggcaagacgcttcttgcggtggaaatgttacgtcgagcagtggcggctggaaaaagctctttattactcgtaggcagccaagtgctggcttttgctttgcgttcaaagacgggtcttgattcctatatctgttctattgaagagcttgagagaaatggaacttcgatgaagcagcagatagaagtattgctgatagacgaagggcagctaatgctttcccccgaaagggttgcgctgacggacaggctggttgtcggcgggattgcacatggccagtgggcttggtttggtgatccgagcttccagcaggctactcgtggaactcagttttcttctgcacttcagcttttccaagatgcggcatccgttcgtccacggctcacgaagaactgcaggaatacaccggagataatcctggctacggaacttgcagcgggaatcccactgggtcatgcagtagtaaaaggtcgcggcctaagcccgaggatgttgggagtgtctggtcgggaggaagttatagctgctgctgcaaagcaagtgcgtacttggttggaggaagatattccacttcacagtatggttttacttgctaatgatcctaatcaaaattggttaaacaaatcgctttcgggtagtgctggtattactgcaattgagtggttgtctggcgaccatattgatggggcgctagcggtttccactatcgagtctttcagaggtctcgagtctggattcatcatcatctgtatcttcgaatcagctctaagcgacgatgagcttgatcgaatattgtacctgagtatgacaaggggaaactatggtttgtcgatcatcgccgattcgatgatcctagatagagtgcacctgcgtatggctgctaatgcaaagcggcattttaaggagacggatcatgggtattga

SEQ ID NO: 356092 - DNA, 3165 bp, Pseudomonas aeruginosa
atgggtattgagtcgataagggattcccgcgcagggtttgtcagctatatgcggtcgagacttattggtccagccgatggagactgcgaagagttcgatggctcccctctcttgagatacatgatgggaatgttgttccctcgtgagggggagttagatttggcagatgatggtactgaagatgttggtctgtctacagacgacgagtctgaccagactgttggtgcaagtcatcgtgcaatgccttcatctgttgggttgagttttctcgtcgcgaaaggtggaacccttaagtgcaatgtttccgcttctatatatgagcgactagaaaacgagcgagggtcacggtcccgaagacgtggtgaaatgaagtggcgacggattgccgttccttccgcgggtacggagaccgtggacgtcaacttggaacaaaatgtcaggccacttccggtgctgggggggcgggccgaggtgcacattaagtcgagaccttggcttgatggtgcaaatttattgactgtgacgctagtcaactcaatggaaaagggggggcaggggtttgacccagaaaaggttctcttccaggtcgccttgtccgtcgatgtggttgacggcgagttcctgccttatccgaggccacgctcagctgcggtaagtgaccaagaggaagcagaagttcgctacctctacagaaactcccctatctacgctcgtggacatggcgcttcggcaatgtgggatgcgcgatcggaagtcaaatgttcccacgtttgggtggagttcttgccaacggcggaggttcgcgcggcaacgttcgaaattggggcgagcgattcacttgatgagagattccgggacattgagttccttgcattcagcgatgatgtacgagaagtgcaacgtgtcctgaccggactcagcgaagcatttggagagtggctggagtccgaggatattctttgccggcagtttgatgaggatgccggttcacgcttggctgaaaagtgccgactctggcaaaggcgaattacggctggaatcgaatcgctatcaaatccagaaacctttgcggcatttacactggcaaatcgggcaatgtactggcagatgctgatggcggaacaggcgcgggctggtgctggtacagcaggggcgggttctgttcctcagttggagcgagggaggggctacaaatggcgcccgttccagattgcttacttcctcggagtgattccatcacttctggatggcgaacaagacgaccgtgaagttgtggacgttatctggttccctacagggggagggaaaacagaagcgtacttgcttgtggctgcctttgagcttatccgccgccgcatcgtatacaaggagtcggatacggcttcggctgtgttaagtcgctatacgctaaggatgttgactacccagcagttccagcgagccggaatgcttgtctgtgctttggaactattgcgtcgaaatatgcctgagttcctatatagtcgccccttttctgttgggctctgggttgggaaaagtctcactccaaacaaattccagaaggcaatggagctttttgatgaatggagcccagctccagaaggaatgaaaaatccatttcttctggatcgttgccctgcatgtgcaactcctattgtgaatttggccacaaaggaagttggggtggactgtgggccagcgcacttcctgttcaagtgtctgagtccgaagtgtgacttccacgaaagtattccaatgcagattgtagacgaggcattgtataaggagcctccttccattctgctaggtactctagataaattcgcggggttgagttgggatgagcggccgagagctttctttggtggtgtaaatgataatgcgcctcctccttcgcttatcattcaggatgaattgcatctgatctcaggtccgttgggttctatatgcgctccttatgagttggcaattgattcaattatacgagcgcgaggtaaaggtagaggcgcaaagattattgcatcgacagcgacaataagaagctcgcgcgagcaaatcaggggtatttatggcagaaaatccactgtattcccttctccaatcaggaattgggatgatgcgttctttttccggttagaagatccatctcaggtgccaggtcgcctctatgttggggccatggggcagggggcaactactccagtcgtctcaatggtatgggtaaccgctgcactattgcaggcgagtgcggagctccgacttccagatgcactccgcgatgcgtactggacggtgttggcatatgtcaacagtcggcgtgagctcggtaggacgatgaccgctgcttcacaggaaatacctgatcgaatgaaagccatcgctagcgtagaggaccgtgtgcgtgcggtggaaaacgtcatggaacttagctcgcaaatgtctaccgatatgggggaggcgattcgcaatctagaacgcaggggagacaagtcgaaaccagctgtggacttggttccatgcacaagcattatctcagtcggtgtcgacgtggatcgacttgggctgatgctcataaacggtcagccaaaacttaactcagagtatattcaagcttcgagtagggtcggtcgatctagatcggcgccgggagtcgtgattactctttattctcctgccaagccgcgcgaccgatcgcattacgaagactttctctcatatcatgagtctttctataggttcgtcgagccgaccagtgttacgccgtatgcacctccggcaagaaagcgaactttgcatgctgcagttattgcaatgattaggcatgcaacaagctatgctgcaaataatcaggcgggaagtgttaggtttgatgaggctgaagtaattaggcttttggagaattttcgagcgcatgtgagaatggctgaccctagtgaggcaagtagggtggatttcgaaattgatgacattattgcgaggtggacggagcaaagtgagtctggaaggtcggtatattacgcgtgtcctggcccgcagttcgtgtcaatctctgcctccctcatacgagattttggtgagccgcctgcgttcggcatgtacgaagctatgaggtccgttcgtaatgtggatccagatgttgaacttacccctgtcgggaggcagtaa

SEQ ID NO: 356093 - DNA, 1809 bp, Pseudomonas aeruginosa
atgtcaagtaggcgagttgttcgtcaggggcagcttattagcccatttggggtaggcgccattatcgacatcggttcggagtcttttgtgatggctgatatcagtcgttggtctccggatggaatgcgtcagattacggatagtaatttagaagtaaagcttaagagaccaataaaggcgcctatcgcaaaagacggtgtgaggtcggttgccattcatcggttccctcgttggtatttttgccctcgatgccggttgatgcgttttgttacgggtgccgatgatgtcagtaatgattataagacccctacctgcgcagatcgaaagtgtggtggtgagttaacgccgatggggttcgtggcagcgtgcaagcatgggcacatgtcggaagttgactggcattggtgggcccattcatctagatctgcagatgaagggaaatgcagtcgacaaggtgcaaggatgtggtttgaaacaactgggcaggccggaggagactggtctgccgtttctgttcgatgtgggtgcggggcgagaagagattttaccggtctggttcaggtggaggccccgcatggtatgcgatgcggaggggggcagccttggcaattcgatcctctgcaatgtagtcagccgttgtgggttaataggcgtgcggccagtaatcttcacttcccgcgcacaatatcagcgctggacttgctgcatgctaatagcactgaaagagatcttgggctgaaagaggtctggaggacaaacttgagctggtctgggatcaagacattgtcttcggccggggttccagtttccttgatacttcagagtgctgagtcgaccgttgcctcgattgctgataagtatggttgtgatttggcggtggttcgagaagctttggtggcggctctggcggttgatgagcttgaaacagaggtagaagatgatagtttggctgatgtacaggccgaaattcttgacgaagaatggcaaactttatcgggagtccatgatgtagagacggactccttaataattaagcgtacaaaaataccgtctgaatggcctagtgagctgttgagaacaatacggtctgtatcgttggtcaggcgtctgcgcgaagtgcgtgcgatattgggatttaggagaatatctccggacgaagaaagccctatgatccccgtagatcttggccagcgcccctccggttggtatccaggagtggaggcatggggggagggggtctttattcagttggatgcagacacggtaaagtcctgggagcaacgagtttccaagacccattcgcagcgacttaaggtgctggcagataaggccgcgggctttgggtggcaagcagcaatggctagtcctcgtttcttgctattgcattcatttgcccatgcagtattgcgaaggctttcatttgatgcaggatactctgtgtcttcgatacgagaacggatctatgcaggtcccaccggctcgacgacttgtgggattctgctgtacaccgcagatggggactctgaaggatcgctcggcggattagtccggatgggagagcctgagaggctgggagctctcctgcaggcggcgcttctggatattgcatggtgctccgctgatcctgtttgcaaagaaagcgaacaccaagggctgggagggatgagcgctgcatcttgccatgcgtgtatgcttgtttcggaaacaagttgtgcatttaataactgcttgctagacaggagaacattggtcgatctggggggcgttgaaccattctttaggctcgatgattttatggaagggacttag

SEQ ID NO: 356094 - DNA, 1200 bp, Pseudomonas aeruginosa
atgagattcccaaagttaactgatctcgataaagagcaaaaagagatctaccatggtgctccgccgacagactccatcctggttgtcggtccgcctggtactggaaagacagtaatggctttccatcgtgcggcgtttcttcaaattcttgcaaataaaaaaaatgataaaggtttagttcctcgtgtaattatgtatagcaaggttctttcaagttacacaagtgcaagggaaaatgtcgctggtggtgttgagacttctactatgcattcttgggtttacgaatggtggcgagggatttttcggcggaacccaccattcttacctcgggatcgctggaggtacgattggaccgatatgttggttcaggttgcgaaagagactagttggaagggcaagggagggcattgggggcacttgataattgacgaggggcaggattttcctaaggatatgtattcggccctcagcatgatgtcgaacttgttaaaaggagaggtttctgctgttcctcccgcgcttactgtattcgcagatgagaaccaacgtctttcggctgacaaaaattcgactattgatgatattaagaatgcattgtcacttaatgatgggtgtctatattgcttgcgtaagaactatcgtaactctaggcagatcgcagagtttgcaaggcattattttgtagggctcccatctggcattccagacctccctgaaaggattggtaggtcgaaacctcgcgttgttgttgcatctgaattggaggtcatacgtcgtaggattgctatctatgtcgcgaacaacccagggttggaagtcggggttttatgctcgggtgatgtagttaggaagcagattttcaacagcctgtcatcccggcttaacgggaaggggattgttgttcagacttattcaagcggtgataaggataggcatcctgcggagcgtttgatctttgacaagggtggatgtgttacggttctaaattttcagagcgccaaagggttggaatttgatacggttttccttgtagacccattttctgatcagggtggcgcaggcgatcagcatgcaaatatgcagctctatgtcatggcgtctcgggcaagagattacttggagttgctggttatgaatcaacctcataacttggctgaacgacttccggataaaaaactttatgagcaaatcacagaataa

SEQ ID NO: 356095 - DNA, 1692 bp, Pseudomonas aeruginosa
atgagcaaatcacagaataaaaccatcaggcggtggttcgtttcggtccaccagaaccgccttatggaagctttcgctagaggcttcttggctactgataactcccatgaagtattcgttgccgaatgtagagtcagtcgtgaagcgctgagtaatgcaagggaaggtttgagctggggagaggtggttctggttgaagttaatattcaagaccatgctcatcagggaggacgggcccatttttgccagccgatacttcttagagattgcatggcgtgttggttgcgttcacgagatgcagtcgtggagcttgaggctagacttgagacttttgatgatacggtggcaaatgctctggaattgaaggtggatcctgccctattccccgaaaatggcaacgcagaagacgctgatgcagaaaagacactttctttgttctctgagggagtgaggactgtagatgagattgttggagaggagcttgctaccagagccgaaggggaagttcggtacgtagaggcatcgactttgaataagttgtctggtgctgtctcgcttctctcttggcaaataattcgaatcggacgtccgctcgagctattgaggcaactattagatgttcctgtggggcaagaaagcggggtggtgaggtttgctagccagatttattcggtattgaggcctcaagagataaattccgaggattaccggatatttgttgctgctgcatcgatgctaggtgagctagattcgcgaaaaggatttgacgttgatcattttattagtgaagtctcaaggcgcctggtaacggaggttgatggtccgccagaaataaagatatttgctgaggctatccaaaaggtcttggataaccgtatcgagctgaccagctcgaagatagacgatagcggacggattgcacagcgggcattaatgatctttctcttggcgccagatcctgagcagatgatgcgatggattagtgcgaggcctgatgtcggagagtccgtttcgatattggcgtttatgctgtccggactttattacggcctgggggggattccttcgagcaccaaggcgataagcaggcaggcattccttggcgccacagtggtggggtggagtattgccgttggtggagttgttcctgttcacgtgcatcgtgaatgggggccgtttgcagaagagcatgagcagctagtggtctctggcttaatcctcgcggatatcgtcaaacaggcatcgcgatctctaacggaggtattaggtcggctcaaagagagaggctatgaagctgagatcaaccctagcgacggttgcatcaatgtttcttttgaggtgaagggagatgcatcgaagctaatcatccatgttgggccgtcggcatttcgagtgcctccagatgatgttgtcaggttgacgtatcgtactcggcaagcgagaaaaggagcgcttcaacgtcagttgcttgagaagattctgagtggtgtaacgtacccagttatagccagcacaggagagtctcctggcgtggttgggcttactcttgagcttggacttgaccttgatgttgacctgggacgaaaggtgttggcggacgcggctcagaagctcgagcttgtagcttttgatgaatctggagggcggaagagagctggacgggcggtaaagcgaaaggcaaattccccatga

SEQ ID NO: 356096 - DNA, 1470 bp, Pseudomonas aeruginosa
atgatcgcccgcgggaaaaacgagatggatccagtcaaggcgcagatgcgggccatcgctacggccacttcgctggtcgaactggacaagatcctcacccagagcatggcccaactgcagattcaggctctgcttaaagaggatgggttgggccagatcctcgcgcgagtcgaagagctggcgcagcttgaggacgacgatgtagccagtttgcagattttggctgtgctggggcggcttgccgctgtggcaagggggcgagagggtgctgtaaaccgaactattgtggccctggcccctgaggatgaattgcctagccttgagtcgctggacagtgacgacaaggcctatgccgcgcaatgcctgttacagctggatacgccttggttgaatgaatatgcgctacgcgagtctgtagtgctggataccgccgagaagcccagaaagctgctgatcgaattaatgttgaagcgctttgctagcattgccgaggcatggtctgcacatgccgaggtgctggagttgttggggggaatcagcaatcccgagtcgcgtctgcgccgcgcgcgccgcatcagcggggcctggttagatgtgctgcgaggtggttctttcgagccgggcgtccaatctggattggcgctgagcgagtgggtagcggcactgctgcagggggacagtaaggatgtcgatgagagcctgttgttcagcatcgtggacgatgctttcaacctcctgctgcggttgatcgagctgcgcttctctcacgccatgctttcggacacttatcaggtaatagcacggactcgcagcctgcttggccgcgcccgttggatcgaattcatcggccactcacgtagccgcgaggcggtcaatttgtgcctacgtgaggccgcattggtattggctcgccagagcaagaccgacaaggcgctgatggatgtgatgcagtcgctatatcagtcgaaggcgcagttgatgaaggatctggctcgtcactttgctgaagcagaggagctcgatccggaagtgcgccagtggtgggtcaatgccggcgtggtcgctggcagctcacgtacagtggtgcacaaagtaggtatttccgaggaccaaatgatcggcgagctgctgatcgaagtgctcaacacccagccatttatggaagccttgagggatgcggtggcgccactgcttgagatcagtgacccgatttcggcagagaaggtaacgggggccgctgccggttatgccgatatcgcccgcaacgccctgatgctggcgcgtatgcgtcgtttgagcaaaacctcgcttaagggcgaagtcgtcgagttcaaccctttgcaacatgagctactgagcgacgtccgtcagggtgttcgctcggtcaaggtggttcgcgatggcattcagaaggactttggcggcagcatcaagacgctgatcaagccgcgggtggagccgcacaactga

SEQ ID NO: 356097 - DNA, 1770 bp, Pseudomonas aeruginosa
atggaacgtattgaagctcgaattctgttgaaaaacctgctgcggcgtatcaaaccgttggagtctcagcagttcgaattgccagggattttgacggaaggcgagcttgatgcgctgaaatatgcctatgcgctatttgacgactcttcgcaggtagctttggaccagcccggtgtgctagtcggcgatatgcgtgatgctcatgcgacctcggtcatcatccccgaagccgaagccgaagccgaagccgaagccgaagccgaagccgaagccgaagccgacctgggcggtttggctgtgggagctgaggaggaggcagccggcaggcgcatcgagctcgatcttagtgtattcgcattgcccgaagctccagacgatgcccggctgtgcctggacttcggtacggccatgtccaaggcaacgctggtgattgatgcaggtgattacgaggagattcatgtcctcgatctgggtattccgggcgatcagccggaggtcagtgaaaccatgctgatctcctccgtttacatcgataacaatggaattttgaggtttggtaagagcgccgtggacttttctctagaggaaggcggcgaaggcgagcgcatgcgggtcgacaacgttaagcgctatctttccgaggatgctttgcacagccccgtgcctgtggcctacaaccccaccggcattgttatcgcgttcggcgatctgcttttggcatatctgacgttcatgacctgggcggtcagtgagtgcctcgccagccacgatatgccgcgcaatctcaaacgccgttttgccatgccctgcttcgagcaggagaagagtcgtgcggtggctgctcggcttcgcgtgctgcttggtgaggctcaggtgctggctgacaccttcggcgagcgtctgcagagcggcttgcctctggaggagttcatcgctgcagtgcaattgctgcaggccgaaaggcgaaactatgcgttcgtcacggaaaacctcactgagccactgggtgtcgccaatgctctgttgagtagtgcaggcagcaccaatagcctgaccttggtagtggacgtgggggcgggaaccagtgacatgagcttgtaccggttgcagtccaatccgagtacgccggttcgtcaggctgtggaggtaaacggctcggcacgtggtatcatcagggcgggcaactacctcgatcaggcactgattcacctgttgctgaataaggctggtattggcagtgatcaccctcggaaagcgaatatccagcgtgatctttctctgcgtatgcgcgattacaaggaagcgctgtttaatgatggcttcttgactgtccgcttgctcgatggtgcgcttgttgaggtgacgctgcaggagttcatggagctgaagacagtcctaaagtttgcagaggatctagagcaatgtcttcgggacgtactggccaatgttgatgctagctggattcaggtagcccaaaggagcggcggtttggcagtggtgctgactggtggtggagcaaaactgccaatggtgaaggcactggcgagcggacagattgaggtcagtggccagtcagtacgccgtatccatgctccggatttcccgctatggcttagggaggaatatccggagctggaggatgacttcccacgcatcgcagtgtctctgggcggcgctcgcaagagcctgatcgcactgcatggcaaggcgcgcgtcactgcgggagatgtgactgggaggccggtgctaacagggttctatagccgataa

SEQ ID NO: 356098 - DNA, 750 bp, Pseudomonas aeruginosa
atgcatacattcaaggaacttaccgacggaattcttagagaaataacaatcctgatagaaaatataaaaaatcaacacacagaagagctcacaagagttgtaacctctcacctactcgctctagccccgccagaatcaattgagagagagatccctcccctagaaaattatttagtaaaaatatttcatagccacagtgaaatcgtaaaatcattagaaatgctaagaaacataccattctatatttcaagatttccatattcaaaaaccagaattactcgagaagagtacatgagattccatgtagaagccttctttaatgaaatatatatatttaaagaacgcctagagaaatattgcaaaactatcgaaagacaatttaaatcagacccctccacaccaaacgcaaaacagcagatatccgaagccaccacaactgcaatatcagccttaagcgaacttatcaaaaagagaggcgcacatgttcatgaaaagcgcctagacgaaagcaatatagatcgcatagggacccttgagctactttggagaaactccgaaggcgctttttccgaaatcactcactacaattacaagaaggaggtcaggcgcataaaaaaaatctggaaagaaaatatggaagagattattacccagctagaagagatattgaacaacatctcctcaattatttatccgattatatttaacctcgggacaaatacattaagacagccacatggtgtcagataa

SEQ ID NO: 356099 - DNA, 1041 bp, Pseudomonas aeruginosa
atggaaaagaaaacactgactaaaactttaacatcacttatagctgacttcacaggttatacaaaggctatatccttggcagactcaactgggatcacaccgatagcaataaccgccgctgaaataatagaatttggagtcactaagacttcccaaatacaacagagaaacctgaacatatattatagcgaattactaaacagtagcagcgacgaatacattccccctccgaccggattaaagctcgatgagttagattttttttccgtacttaaagcctgcgtccaggatattgagtcagagaaagccaaggcatatgccaatctaacaaaatcgttggcagtgggaaatatcccaagtgaatttcgcagacactttataattctatcctcacaattagagtacagcgaactaacaaccttaagggaagcatatatagcaaaacacaaccgcctaataaacaaatccatgtacggaagactcaaagtagaagacatattatcagagagacatctaggagaggtaaaatcaatatgcctaaccaagttcagggagaacaaactcacagagaatggaagcatatccaagattggagaaagatttatcgagtcgctattcaaacaagaagaactcaccccagaagctatagaatatcaatgctggagaagaagagacattatgatcattcaaaaagaaatattaagcgcagataaagtgctagccactcttaagccacaaagaatatattgcaaagtccaaaacataagcaaaataaccctcacaaacctgcctgacttaagaatatatgtggccgtgatcttggcaggagactttagtaagctcgagcataacgaaaggcttatattcaagaagataacagaagaatatagacacctttgggttggcccttcaggtggccttcctcgtgatatccccacctatacactaggaaaactagaaccaacagcacacaacattttaaaaaaattaaacatagactatgaggaaaccatcagggcaactgaggaagacagaacataa

SEQ ID NO: 356100 - DNA, 1389 bp, Pseudomonas aeruginosa
atggaaagtagtatggcatggtcaggtgaccttctaaagcgtaaagagattgcggaactgcttacggaatatctggatagctcaagctctattaaggttgttaatataaattcaccttgggggactggtaaaagttattttcttggggagtggaggttgtcactttttgcgtccaggcctgttgtgtattttaatgcttgggagaatgactttactggtgatccgttgatttccatagtggccaatataaaggagcaattgagtcagtatcggaagagctcggcaataaaaaaatccttggcaaaaatggttaagcaagctagtagagcttttctagccattgctccagtagttgggaagggggttctaaaaaagacaactggagtggtggctgaagaactaggtgcttcggtagagaatattgcagttgaaacatctggcgagacagcggaaaagctcatagagaaactgattgaggacaatcaaaagagtcttgaagaagttgttaagtttaaggagagtctgcgacgtctttttgctgaggtagcagaaaaagattcatgtcctgtttatatatttattgatgagttggatcggtgtaggccgacctatgccattgagctgctcgagcgaattaaacatttatttgaggtggatggttgtcggtttattatcgcgactgatactgttcagctatctcattctattcgcgctgtatatggggctgaattcgcctcaatagactatctaaaacgtttttttgatttgacatatacttttgaaaagcctgatcttgataattggatactgactaatgttggccgatttgatgtggtgaggctcgggtattatttgtccgctagagtggatcatccacctattggtaatgcgcgaaaagtttcgccgattaactgcgtttttcgatctgatatgtctgaaaatcaaatgctatttatgttgctggcgaagacctttgatatcgatttacgccagcttgataggataaatagagcactagaagcattgatatctaggactaggttgcaacagctagagtttgcattcatagcttatctttgttttcttatgaataaggatgagcagttgttcatagctttaaggtctgattggaaaggtacttttgagttgataaagaagagatatccaactgaagaaaacttgtatttttttagctcatatctaaatgttcacggtattgcttataattatttgttagtggctttttctaatagggaggaacttagagctatgatgcgtcctgatgcgcttgagttcgttaatagaatagttcagagggagcttaatacattgggcgagggcctaaaaacttactttgaagaggtgaaattggctggccggattacataa

SEQ ID NO: 356101 - DNA, 123 bp, Pseudomonas aeruginosa
atggataagaccattgacccggtcatcctgatggcgttgctgatttgtttcagtcggatgtctagagacgaacaaatagacttgctacgacttgcatgcgcctatatggataagtccatttga

SEQ ID NO: 356102 - DNA, 1404 bp, Pseudomonas aeruginosa
gtgcagtccgtcgctgtgtacctggtggtcctgcgagagcgggagattcgcgccttcacaccaatcaagcatttcggggtggaactggccttcgtttcgcccagcgacggccgcacctggaaggcggagtgggatccagtgcccacgtttgccagcaaggaatttccgtatatccaggatcgtcaactcgcagaactggtgggggctatacgcaatgtgatcgtcgagacctgcattgatggcgaagaaaccgatatgcctccggcgccgttcatctcctcttcgctccagatggcagccggaaatgcactgaagtggtcacccgacaagacgatgaaagtcgcccagcggctgtatgaacaggggctcatcacttaccaccgaacggacaaccccaatatttcgaaggactcgatgccggatatccgtgctgtcgccaaagccttggggctgaagtgtgtagagcaacagcgaatgttcaaagcggaccaagacgctcaggaaggccaccccgccatcacccctaccgactggatggccgctaccgccggtgaaactgctgatgagcaggcgctgtaccagctcattcgagttcgcgcgcttgccagccagatcgaagctgccgtgtacgcagtgagaaccatcaccctcctgggcgtcggccccgacaaaaagccactgcgcttcggcgccaaagggaagctgttgaacgtgcctggatggagaaaactgctgcagggcgatgatgccgaggagcaaaagaacgaaacgccttcaagccccatcccggcgctggagccaggccagatactcaaggtctacagcggcgaggtcctggagaagaaaaccacccctcccaaacgcttcaccgatgccagcctggtgggcgagatgaagcgccgcgggattggtcggccatcctcctacgcctcgatcgtgaagaacatcatcgacaagggccaggtgcagatgaagggccgaagcctgatccccggcgagctgggcgaggccaccatagcgctcctggagcacaacttcagcttcctcagcctcgacttcacccgcaacctcgaggtcgccctggaccggatcgccaacagcgaggacacctacatgaacgtggtccagcagttctaccagctcctgcagtcagagctgcagacgctgcgcgcgctccccagcgcacagggcgacccgcgagcaagctctaccgccagcgctccctcggcgccggccagtgacttcctctgcggcaagtgcggtctgcccctggtccaccgaaagaaagccggcaagggcggcttcgacttctggggttgcagcggctatcgcagcaccggctgcaaagtcagctaccccaccaaggacggccaacctgacttcgacaacccgcgcgggctatag

SEQ ID NO: 356103 - DNA, 1506 bp, Pseudomonas aeruginosa
gtggcgctgaccggtaatcccctcctgaaattgctggtcatccccgtcgtgatcggcgccatcctgatcggcgtgagcatgatgggcaagaaggaaagcgcgcagtcacaaggcgccgcaaccccgacggtaacgtcggaagaagcggcaaccctgggcatcgacggcgacacgcccgccgacacactgcgcaccatcgtggcggaaagccggcagctcaaggaccagatcagcaaggtcatccaggagaatgactcgctcaaagccgccaatgagaacctgcagggccgcctgcgcaacatcgatcagaacatcgagcagaagctcaacaacaccgcccaggagctgcagcaacagcaggagaaccgtagccagacgatcctggaccaagtacagaaacggctcgagaacctaacccacgttcccgaggccggcgacaccgacctgcccgtaggattcggcgtgcgaccagaggatggccagcactttcagggagcgggctcgtcttcatcggacatcgtctggatcgagccccaggacgcccgcgcggtcgatgccaatggccagccgctggccgccggctccaccacccaaccgagcggattcagcttcccgacctccttcggcaatgcggtcgatcgcggccagaacgcgctggagcggatcgatgacgggctgcaccccgtcggccaacagcgatccgacctcgagaaccgcaagctcgtccgcaagacctacacgctgccgcagaactcgacgctcatgggctcggtggccatgtctgcgctgatcggtcgtgtgccggtcgacgggacggtcaatgatccttacccgttcaaaatcctcatcggcccggacaacctcaccgccaacggcatcgagctgccggacgtcgccggcgcggtagccagcgggaccgcctcgggcgactggacactctcctgcgtgcgtgggcagatccgcagcctcacgttcgtgttcaacgacgggaccgtgcgcaccttcccggcgccggccgaggaggtgaatgacaaccagagcaacaacaaccagaccgccagcgccgaccagaaaaccatccagggcggcctcggctggatcagcgacccctacggcatcccctgcatcgccggtgatcgccgatccaatgccaaggagtacctgggcaatcagagcctactcacggctgccggggccggcatcgccaagctcctggacgccgacgagaacaacactagtaccgtcttcagcggcaacggcaccagcttcgggacgaccggaaccaacagcaactcggccctcaacagcatcctctccggcggcgtcggcgacatccggcagtggatgaacaagttgtacggggaggccttcgccgccgtctacgtgcaaccgggcgcgcgcgtcgccgtgcatctcgatcagcaactggcgatcgactacgaactcaagggccgaaaggtcgattacagctctggagccgctcatgcaacagcagacctggactaa

SEQ ID NO: 356104 - DNA, 195 bp, Pseudomonas aeruginosa; identical to SEQ ID NO: 344409

SEQ ID NO: 356105 - DNA, 3138 bp, Pseudomonas aeruginosa
atggctcgtttcttcattgaccggccggtcttcgcctgggtgatctccctgctgatcgtgctcgccggggtcctggcgatccgcttcctgccggtcgcccagtacccggacatcgcgccgccggtggtcaacgtcagcgccagctatcccggcgcctcggccaaggtggtcgaggaagcggtgaccgcgatcatcgagcgcgagatgaacggcgcgcccggcctgctctacaccaaggccaccagcagcaccggccaggcctcgctgaccctgaccttccgccagggcgtgaacgccgacctcgccgcggtggaagtgcagaaccgcctgaagatcgtcgagtcgcgcctgcccgaatcggtgcggcgcgacggcatctacgtggagaaggcggcggacagcatccagctgatcgttacccttacctcctccagcggccgctacgacgccatggagctgggcgagatcgcctcgtccaacgtgttgcaggcgctgcgccgggtggagggcgtgggcaaggtcgagacctggggcgccgagtacgccatgcgcatctggcccgacccggccaagctgacctcgatgaacctcagcgccagcgacctggtcaacgccgtgcgccggcacaacgcccgcctcaccgtgggcgacatcggcaacctcggggtccccgactcggcgccgatcagcgccacggtgaaggtcgacgacaccctggtgacgcccgagcagttcggcgaaattccgctgcgcatccgcgccgacggcggcgcgatccgcctgcgcgacgtggcccgcgtcgagttcggccagagcgagtacggcttcgtctcgcgggtcaaccagatgaccgccaccggcctggcggtgaagatggcgcccggctccaacgcggtggccaccgccaagcgcatccgcgccaccctcgacgagctgtcgcgctacttcccggagggcgtgagctacaacatcccctatgacacctcggcgttcgtcgagatctcgatcaggaaggtggtcagcaccctgctcgaggcgatgctgctggtgttcgccgtgatgtacctgttcatgcagaacttccgcgccaccctgatcccgacactggtggtgccggtggccctgctgggcaccttcacggtgatgctcggcctgggcttctcgatcaacgtgctgaccatgttcggcatggtcctggcgatcggcatcctggtggacgacgcgatcatcgtggtggagaacgtcgagcggctgatggccgaggaaggcctgtcgccgcacgacgccacggtcaaggcgatgcgccagatcagcggggccatcgtcggcatcaccgtggtgctggtctcggtgttcgtgccgatggcgttcttcagcggcgcggtgggcaacatctaccgccagttcgcggtgaccctggcggtctccatcggcttctcggcgttcctcgcgctgtcgctgaccccggccctgtgcgccaccctgctgcgcccgatcgacgccgaccaccatgagaagcgcggcttcttcggctggttcaaccgcgccttcctgcgcctgaccggacgctaccgcaacgcggtggccggcatcctcgcccggccgatccgctggatgttggtctacgccctggtcatcggcgtggtcgccctgctcttcgtgcgcctgccgcaggcgttcctgccggaagaggaccagggcgacttcatgatcatggtgatgcagcccgaaggcacgccgatggcggagaccatggccaacgtcggcgacgtcgagcgctacctggcggagcacgaaccggtggcctacgcctatgcggtcggcggcttcagcctgtacggcgacggcaccagctcggcgatgatcttcgccaccctgaaggactggtcggaacgccgggaggccagccagcacgtcggcgccatcgtcgagcgcatcaaccagcgcttcgccggcctgcccaaccgtacggtgtatgcgatgaactcgccgccgctgccggacctgggttccaccagcggcttcgacttccgcctgcaggaccgtggcggggttggctacgaggccctggtcaaggcccgcgaccagttgctggcgcgcgccgccgaggacccgcgtctggccaacgtgatgttcgccggccagggcgaggcgccgcagatccgcctggacatcgaccggcgcaaggcggagaccctcggcgtgagcatggacgagatcaacaccaccctggcggtgatgttcggctcggactacatcggcgacttcatgcacggcagccaggtgcgcaaggtggtggtccaggccgacggcgccaagcgcctgggcatcgacgacatcggccggcttcacgtgcgcaacgagcagggcgagatggtccccctggcgacgttcgccaaggccgcctggaccctcggcccgccgcaactgacccgctacaacggctatccctcgttcaacctcgagggccaggccgcgccgggctacagcagcggcgaagccatgcaggcgatggaggaattgatgcagggcctgcccgagggcatcgcccacgaatggtccggccagtccttcgaagaacgcctgtccggcgcccaggcgccggcgctgttcgccctctcggtgttgatcgtgttcctcgccctggccgccctctacgaaagctggtcgatcccgctggcggtgatcctggtggtgccgctgggcgtactcggcgcactgctcggggtgagcctgcgcggcctgcccaacgacatctacttcaaggtcggcctgatcaccatcatcggcctctcggcgaagaacgccatcctcatcatcgaggtggccaaggaccattaccaggaaggcatgagcctgctgcaggcgaccctggaggccgcgcgcctgcgcctgcgaccgatcgtcatgacctcgctggcgttcggtttcggcgtgatcccgctggcgctctccagcggcgccggttccggcgcccaggtcgccatcggcaccggggtgctcggcgggatcgtcaccgccacggtactcgcggtgttcctggtaccgctgttcttcctggtggtcgggcgcctgttccggttgcgcaaggcgccgcgcaccggcaactcgccccagatccccacggagcaagcctga

SEQ ID NO: 356106 - DNA, 270 bp, Pseudomonas aeruginosa; identical to SEQ ID NO: 355876

SEQ ID NO: 356107 - DNA, 612 bp, Pseudomonas aeruginosa
atggtctccagggagtccttgctgctggtcaacaatgtgctgttggtcgtcactgccggcgctgtcgcgctcggtacgctgtacccactgctcgtcgatgcgctgggcctgggcaagctctccgtggggccgccatacttcaatgcggtgttcgtgccattgatgatccccgcgttgcttctgattgcggtaggacccgccgccaattggaaggccgcccagttcggtgccatcttcaggcagttgcgcgtgccgatgattgctgcacccctggtgggcctgaccgccccgttcgtgctggggcactggtcagcttctgcggcgttgggcttgatgctcgccacgtggattgcggtgtcggtggtgacgggcatcttcggccgaatgcgcgccacccgcggcgggttgcgtgcccagccacgcagttggcttgggatgcatatggcgcatctgggcatcgcggtattcgtgactggcgtgaccatcgtcagtgggtatgagaccgagcgagacgttcgattggcccagggcgagtccgtcagcatcggcggctacgacctcactttgatcggcgtcagaagcacgcggggcccaactacgtggcgcagatag

SEQ ID NO: 356108 - DNA, 960 bp, Pseudomonas aeruginosa
atggctcttgatgggaatagacgggctcacgaagattatccaaacctagatagaaaaggtaaaacaaaatccggtatacgactgggagatcaacgagggctattcatttctgtaaacggcataaagatatgtagatatatggatatattctctagcctggaaggctatgagatactcgcagagggcgaaagccctagccattacacgttaattctagatggcgacttcgacctcgttacaaaccgtaactcacttagcaagaaagcttttgacgccctttccgaccccgacctcctcaaagaaataaaaaaatttctagatcacttaaagaagaccgacaaggtatttcaagagcttctctctcgactaaaaaaagagagcactgaaaacaaactaaacgagcaaatagagatactcgacacatcaaaagaagacctcaagagcagagaaaaattcagaataaaagatcaaagcaaaaataatctaatctttgtatccccacaacctggcgaagagtacttagttggggttctttactcatccctatataacctaatagatccgagcaatgaacattatgacaaatggaaaagagtaataacattctccacccaggggattgacagcctcggcataaaagacacaagcactacccaccccctagcaagtgaaaatatcgtatcaatagaatacaagtacaactttaataactacggcccattcaaccacgccttagcaattgttgattacatagtagcctgggaagtggacatagaagaagagcaaatagttcaagacactttcacttgctctggaagaatcaagcaatcagacaacaccgacttcgagtgggaaatatacgagatagaaagcaatgatggagcacaatacccaaaagaagtaaaagttatctgcttaaaaaaactcatagagaaaactttcaacacaaagttcagataa

SEQ ID NO: 356109 - DNA, 876 bp, Pseudomonas aeruginosa; identical to SEQ ID NO: 355862

SEQ ID NO: 356110 - DNA, 861 bp, Pseudomonas aeruginosa
atgagaaagtctcggccgggcgttgtgcgttttcacagcggcctaggtgtttcggcccgaaacactcagtcaggtcctgacctcggcgccgacggcgaactgggtgttgcggcccgcaacactctgccaaggaacgacctcggcgccggcagcgaactgggtgattcggcccgaatcacttcgccaggtcctgacctcggcgccgacggcgaactgggtgttgcggcccgcaacactctgccaaggaacgacctcggcgccggcggcgaactgggtgatgcggcccgcatcacttcgccaggtcctggcctcggcgccggcggcgaactgggtgattcggcccgaatcacttcgccaggtcctgacctcggcgccggcggcgaactgggtggttccactggaaccacttcaccaggaactgacttcggcgccggcggcgaactgggtggttccactggaaccacttcactaggaactgacttcggcgccggcggcgagctgggtggttccactggaaccacttcaccaggaactgacttcggcgccggcggcgaactgggtggttccactggaaccacttcaccaggaactgacttcggcgccggcggcgaactgggtggttccactggaaccacttcactaggaactgacttcggcgccggcggcgagctgggtggttccactggaaccacttcaccaggaactgacttcggcgccgacagcgagctgagtgccttgctccgattcgccatgggaaattccccagcgacgaaccatgtatttcctactgcgcgctcctaccccgatcagcacgatgtggccgaaccccttccctatataggaacactgcaccatggctga

SEQ ID NO: 356111 - DNA, 690 bp, Pseudomonas aeruginosa
gtgagctctaccaaagctgcggaaatgaccaaattgctggaaaatattcatcgcgcggtgaatatcggcctggtcaatgagatgaaagtagtcgcggaccgaatgggtatcgatatttttgaagtggtagatgctgcagcgaccaaaccttttggatttaccccttattatccagggcctggcttgggagggcactgtattcccatcgatcctttctacctgacctggataggttgtgctttcaagagagacgacttgtccttcacgcagatacggcttaatagcttccgtcgtattaaccacaaaactcatatccggctcgcgatatttattcagcggggtcggaacacaaagaataagtgcgtcgcactcttttgcccgagagaaatcggtcgtagcttcaaaaccagaagagcaagcgtgagaaatgctttccgcggatatatgctcaatatagctttcaccggaattcagccttctaactttttcggcgtcgatatcaatgccaagcactctaaaaccgatcgaattataacgcaacataagcgggagtccgacatagcccaaccccacgatcccgacaagagcctctttatccttgaactttctagtaactttttctctcaggttttccatatttccatctcagcaagtagtaacaggacctatatgaaccacctgttatcatga

SEQ ID NO: 356112 - DNA, 354 bp, Pseudomonas aeruginosa
atgggcttgcaccaccgtttcgcgatcggcttgctgttccaggcgccccagagtggatttgccggccagcggttgcaggcggttgaccgcagtctgcagcgcgtagtcatggcgcaggccgtcatgatcgttgagatcctcgtagccggcggccagtgcatagatacgctgggcgagcagtgtctgcagtccatgctggacacgcccaggatcacgccgatcgggaacgattttggccaggcggcgggtcaagccatgttgccggtcgacctcgcgcagcagcaacaagcccgcatccgaggtgatgtgaccaccggtgaaagaggcctcgacgaggcggcgagagaggggtga

SEQ ID NO: 356113 - DNA, 354 bp, Pseudomonas aeruginosa; identical to SEQ ID NO: 356112

SEQ ID NO: 356114 - DNA, 354 bp, Pseudomonas aeruginosa; identical to SEQ ID NO: 356112

SEQ ID NO: 356115 - DNA, 354 bp, Pseudomonas aeruginosa; identical to SEQ ID NO: 356112

SEQ ID NO: 356116 - DNA, 354 bp, Pseudomonas aeruginosa; identical to SEQ ID NO: 356112

SEQ ID NO: 356117 - DNA, 354 bp, Pseudomonas aeruginosa; identical to SEQ ID NO: 356112

SEQ ID NO: 356118 - DNA, 354 bp, Pseudomonas aeruginosa; identical to SEQ ID NO: 356112

SEQ ID NO: 356119 - DNA, 354 bp, Pseudomonas aeruginosa; identical to SEQ ID NO: 356112

SEQ ID NO: 356120 - DNA, 354 bp, Pseudomonas aeruginosa; identical to SEQ ID NO: 356112

SEQ ID NO: 356121 - DNA, 354 bp, Pseudomonas aeruginosa; identical to SEQ ID NO: 356112

SEQ ID NO: 356122 - DNA, 354 bp, Pseudomonas aeruginosa; identical to SEQ ID NO: 356112

SEQ ID NO: 356123 - DNA, 354 bp, Pseudomonas aeruginosa; identical to SEQ ID NO: 356112

SEQ ID NO: 356124 - DNA, 354 bp, Pseudomonas aeruginosa
  misc_feature (50)..(50): n is a, c, g, or t
atgggcttgcaccaccgtttcgcgatcggcttgctgttccaggcgccccngagtggatttgccggccagcggttgcaggcggttgaccgcagtctgcagcgcgtagtcatggcgcaggccgtcatgatcgttgagatcctcgtagccggcggccagtgcatagatacgctgggcgagcagtgtctgcagtccatgctggacacgcccaggatcacgccgatcgggaacgattttggccaggcggcgggtcaagccatgttgccggtcgacctcgcgcagcagcaacaagcccgcatccgaggtgatgtgaccaccggtgaaagaggcctcgacgaggcggcgagagaggggtga

SEQ ID NO: 356125 - DNA, 354 bp, Pseudomonas aeruginosa; identical to SEQ ID NO: 356112

SEQ ID NO: 356126 - DNA, 354 bp, Pseudomonas aeruginosa; identical to SEQ ID NO: 356112

SEQ ID NO: 356127 - DNA, 354 bp, Pseudomonas aeruginosa; identical to SEQ ID NO: 356112

SEQ ID NO: 356128 - DNA, 354 bp, Pseudomonas aeruginosa; identical to SEQ ID NO: 356112

SEQ ID NO: 356129 - DNA, 354 bp, Pseudomonas aeruginosa; identical to SEQ ID NO: 356112

SEQ ID NO: 356130 - DNA, 1503 bp, Pseudomonas aeruginosa
gtgaagaaggcccgcggcaaccgccgcgagatcgtcggcaagatccaggagtcgctggtcaactgcctcgcccgcgaaggcatggaaggccaggtgatcggccgcgagaagcacctctacagcatctaccagaagatgcgcggcaagcgtaaggcgttcaacgagatcatggacgtctacgccttccgcatcatcgtcgacaaggtcgatacctgctatcgcgtgctgggcgccgtgcacagcctgtacaagccgttccccggacgcttcaaggactacatcgcgattcccaaggccaacggctaccagtcgctgcataccaccctgttcggcatgcacggggtgcccatcgagatccagatccgtacccgcgagatggaagagatggccaaccacgggatcgccgcgcactggctgtacaagtccaacgacgagacgcccaagggcacccatgcccgcgcccggcaatgggtgaagggcgtgctggaactgcagcagcgcgccggcaactcgctggaattcatcgagaacgtgaagatcgacctgttcccggacgaggtctacgtgttcacgcccaagggccgcatcatggaactgcccaagggttccaccgcggtcgacttcgcctacgcggtgcacaccgacgtcggcaacagttgcatcgcctgccgcatcaaccgtcgcctggcgccgctctccgagccgttgcagagcggccagacggtggaaatcgtcaccgccccgggcgcccggccgaacccggcctggctgagcttcgtggtcaccggcaaggcgcgcacccatatccgccatgcgctcaagctgcaacgccgctccgagtcgatcaacctcggcgagcgcctgctgaacaagacccttaccggcttcgacagccacctcgagaagattccccaggaacgcatccaggccgtgctcgccgagtaccgcatggaagtcttcgaggacctgctggaagagatcggcctgggcaaccgcatggcctacgtggtcgcccgccgcctgctgtccagcgagggcgaggaagcgccaagcgccgagggtccgctggcgatccgcggcaccgaaggcctggtcctgagctacgccaagtgctgcacgccgattcccggcgacccgatcgtcggccacctgtccgccggcaagggcatggtggtgcacctggaaagctgcaagaacatcagcgaagtacgccacaacccggaaaaatgcatccagctcagctgggccaaggatgtcaccggcgaattcaatgtcgaactgcgcgtcgagctggagcaccagcgtggcctgatcgccctgcttgccaccagcgtcaacgcggccgacggcaacatcgagaagatcagcatggacgagcgcgacggtcgcatcagcgtggtccagctggtcgtcagcgtgcacgatcgcgtccacctggcccgcgtcatcaagaagctgcgcgccctcaagggagtgatccggatcacccgcctgcgtagctga

SEQ ID NO: 356131 - DNA, 354 bp, Pseudomonas aeruginosa; identical to SEQ ID NO: 356112

SEQ ID NO: 356132 - DNA, 354 bp, Pseudomonas aeruginosa; identical to SEQ ID NO: 356112

SEQ ID NO: 356133 - DNA, 912 bp, Pseudomonas aeruginosa
atgcgctgcgccctggtcattcccacgcgcaacgccggcgcgcacctggaccggctgctgccggccctggccgcgcaacggcggcagccggacagcatcctggtggtggacagccgctccagcgacgacacggtggagcgcttccgcgccttcggcgcgcgggtcgaggtcatcgagccggccagcttcaaccacggcgggacgcggcgctgggccagccagcaggtcgaggccgacgcgctgatctacctgacccaggacgccattcccgcctcgcccgacagtttcgccaacctgctcgacgaactctatgccgaggccgacatcggcgtggcctacggccgccagttgccgcaccccggcgccggcctgctcggcgcccaggcgcggcgcttcaactacccgccggaaagccgcagcaagcgcctggccgacgcctcggaactggggatcaagacctgcttcagttccgactcgttctccgcctaccgcagcgacgccctggcggccgtcggcggcttccccgaagacgtcatcggcagcgaggacgcctacgtcgccgcgcgcctgctgcaggccggctacgcggtgcgctacgcggccagcgccgaggtctaccattcccacgattaccgcttgctggaagagttccgccgctatttcgacatcggcgtgttctacggccgcgagcgttggatacgtgccgccttcggcggcgcgggtggcgagggcaagcgctatgtcctcgccgagatacaggccttgcgtgccgccggtgccctgtatcgcgtacctgaaatagcgctgcgtagcgcgttcaagctgctcggctaccgccttggccagctggaacgccacctgccggtcgccctcaagcgccgcatcagcatgtttccaggctactggaagtga

SEQ ID NO: 356134 - DNA, 795 bp, Pseudomonas aeruginosa
atgacctacaggaagtgctccctcatgaaacgcaccctcctcatgctcgccatgctcgccctggccgcatgcaacacccccgcacggattcccgcaccggacagcgacaccgtggacagcggcaagcgtgccctggaagaactcgccaggctaccgccggcgatggagcgggtgcgcgtcggggacaccctgcggatcgtccgcgatgccggggagatgccgaccctctcggcgttcaacgtcgccaccatctatgaactgacgctgtacaccgtgctcaacgacggcagcatctactatccgttcatcggtcgcatccaggccgcgcaccgcacgccgcaggaaatcgccaacgagctgaccaccaagctcgcgccgatctaccgcgagccgcgggtcacggtgaacatcaaccaggcgccgggcaatacggtgttcgtcggcggcgcggtgcgcaacccgtcggccgtgccgatccccgccgccaacaacatggagcaggcgatcctcggcgccggcggcatcctgccggtgggcgacgcccgccgcgtggcgctcatgcgcgaggactcggaaggccgctaccacgcctacttcctcgacttcagccagttgatgaagatcgggccggaaggccgcaagcccctggccatgcagcgtggcgacatcgtcttcgtgcccaagtcgatggtcggcgaccgtatcgagggcgtcgacgtctacctgaaccagttgctgcccttcgccaagtccatcggcgtcggcgtcagctacaccgtcaacaacgatcgctga

SEQ ID NO: 356135 - DNA, 354 bp, Pseudomonas aeruginosa; identical to SEQ ID NO: 356112

SEQ ID NO: 356136 - DNA, 354 bp, Pseudomonas aeruginosa
  misc_feature (106)..(106): n is a, c, g, or t
atgggcttgcaccaccgtttcgcgatcggcttgctgttccaggcgccccagagtggatttgccggccagcggttgcaggcggttgaccgcagtctgcagcgcgtantcatggcgcaggccgtcatgatcgttgagatcctcgtagccggcggccagtgcatagatacgctgggcgagcagtgtctgcagtccatgctggacacgcccaggatcacgccgatcgggaacgattttggccaggcggcgggtcaagccatgttgccggtcgacctcgcgcagcagcaacaagcccgcatccgaggtgatgtgaccaccggtgaaagaggcctcgacgaggcggcgagagaggggtga

SEQ ID NO: 356137 - DNA, 354 bp, Pseudomonas aeruginosa; identical to SEQ ID NO: 356112

SEQ ID NO: 356138 - DNA, 1632 bp, Pseudomonas aeruginosa
atgctccttcaccgccttgcggcagaccttggcgatctgccgctcgaggctgcgcaccccggcttcgcgggtgtagtagcgaatgatgtcgcgcagggcgccttcctcgaaggtcagctcgcccttcttcaggccgttggcctggacctgcttcggaatcaggtacttggcggcgatattgaccttctcgtcctcggtgtagcccggcaggcggatgacttccatccgatccagcaggggcgccgggatgttcatcgagttcgcggtgcagaggaacatcacgtcggacaggtcgtagtcgacttccaggtagtgatcgttgaagttgtggttctgctccgggtcgagcacctcgagcagcgccgaggcgggatccccgcgcatgtcgctgcccatcttgtcgatttcgtcgaggaggaacagcgggttgcgcacgccgaccttggtcatcttctggatcaggcggcccggcatggagccgatataggtacgacggtgaccgcggatctcggcctcgtcacgcacgccgccgagcgccatgcgcacgaacttgcgattggtggcgcgagcgatggattcggccagggaggtcttgcccacgccgggcggtcccaccaggcaaaggaccgggcccttgagcttcttcacccgcttttgcacggcgagatactcgagaatgcgctccttgacctcttccaggccataatggtcggcatcgaggatgtcttccgccttggcgagatcatggcgcaccttgctctcggccttccacggcacgttcagcagccagtctatgtaggaacgcaccacggtggcttccgccgacatcggcgacatctgcttgagcttgttcagctcggcagtggccttggtgtgcgcctccttggtcaggccggcagcgtcgatgcgcttcttcagctcctcgacttcgttgtgcccttcgtcgatatcgccgagttccttctgaatggccttcatctgctcattcaggtagtactcgcgctggctgcgctccatctgcttcttgacccggccgcggatacgcttttccacctgcagcaggtcgatctcggcatccagcagcgccaggacatgctcgacccgcgacgacaggtcggtgatctccaggatgtcctgcttctgctcgatcttcagcgccatgtgcgcggccatggtatcgaccagcctgctcggctcgtcgatgctgttcagcgaggaaagcacctcggcggggactttcttgcccaactggacgtattgctcgaactggctcagcaggctgcgagtgaagacctcggcctcgcgctcgccgacattggcgtcgtcgatggcctggaccgcggcacgaatgtgcccttcctcctcgatgaagcgctcgacctggccgcgctgctcgccttcgaccagcaccttgacggtgccatccggcagcttgagcaactgcagcacggtagcgaccgtacccatgcggtacaggccatcttcgcccggatcatcgtccgcggggtttttctgcgccagcaggaggatttgcttgtcgccggtcatcgctgcctccagggcctcgatggacttttcccgaccgacgaacaacgggatgaccatgtgcgggtacaccaccacgtcacgtag

SEQ ID NO: 356139 - DNA, 354 bp, Pseudomonas aeruginosa; identical to SEQ ID NO: 356112

SEQ ID NO: 356140 - DNA, 354 bp, Pseudomonas aeruginosa; identical to SEQ ID NO: 356112

SEQ ID NO: 356141 - DNA, 354 bp, Pseudomonas aeruginosa; identical to SEQ ID NO: 356112

SEQ ID NO: 356142 - DNA, 354 bp, Pseudomonas aeruginosa; identical to SEQ ID NO: 356112

SEQ ID NO: 356143 - DNA, 354 bp, Pseudomonas aeruginosa; identical to SEQ ID NO: 356112

SEQ ID NO: 356144 - DNA, 354 bp, Pseudomonas aeruginosa; identical to SEQ ID NO: 356112

SEQ ID NO: 356145 - DNA, 354 bp, Pseudomonas aeruginosa; identical to SEQ ID NO: 356112

SEQ ID NO: 356146 - DNA, 354 bp, Pseudomonas aeruginosa; identical to SEQ ID NO: 356112

SEQ ID NO: 356147 - DNA, 354 bp, Pseudomonas aeruginosa; identical to SEQ ID NO: 356112

SEQ ID NO: 356148 - DNA, 354 bp, Pseudomonas aeruginosa; identical to SEQ ID NO: 356112

SEQ ID NO: 356149 - DNA, 354 bp, Pseudomonas aeruginosa; identical to SEQ ID NO: 356112

SEQ ID NO: 356150 - DNA, 354 bp, Pseudomonas aeruginosa; identical to SEQ ID NO: 356112

SEQ ID NO: 356151 - DNA, 354 bp, Pseudomonas aeruginosa
  misc_feature (60)..(60): n is a, c, g, or t
atgggcttgcaccaccgtttcgcgatcggcttgctgttccaggcgccccagagtggattngccggccagcggttgcaggcggttgaccgcagtctgcagcgcgtagtcatggcgcaggccgtcatgatcgttgagatcctcgtagccggcggccagtgcatagatacgctgggcgagcagtgtctgcagtccatgctggacacgcccaggatcacgccgatcgggaacgattttggccaggcggcgggtcaagccatgttgccggtcgacctcgcgcagcagcaacaagcccgcatccgaggtgatgtgaccaccggtgaaagaggcctcgacgaggcggcgagagaggggtga

SEQ ID NO: 356152 - DNA, 354 bp, Pseudomonas aeruginosa; identical to SEQ ID NO: 356112

SEQ ID NO: 356153 - DNA, 354 bp, Pseudomonas aeruginosa; identical to SEQ ID NO: 356112

SEQ ID NO: 356154 - DNA, 354 bp, Pseudomonas aeruginosa; identical to SEQ ID NO: 356112

SEQ ID NO: 356155 - DNA, 354 bp, Pseudomonas aeruginosa; identical to SEQ ID NO: 356112

SEQ ID NO: 356156 - DNA, 354 bp, Pseudomonas aeruginosa; identical to SEQ ID NO: 356112

SEQ ID NO: 356157 - DNA, 354 bp, Pseudomonas aeruginosa; identical to SEQ ID NO: 356112

SEQ ID NO: 356158 - DNA, 354 bp, Pseudomonas aeruginosa; identical to SEQ ID NO: 356112

SEQ ID NO: 356159 - DNA, 306 bp, Pseudomonas aeruginosa
atggagaatcggatcaaggaccaacagttggatctgttcgccgaccgcacctccagcccacgctggtggaccaaccagtggcggctgatgctgtcggcctttgcctatgtgctgttcgaacggctacgcgatcatctccagggcaccgcattggcgcgcatgagcatccataacctgcgcttgaaactgctcaagatcggtgcggtgatcattcgcaacagccggcgcatccgcgtgctgatcagcgaggcctatccgcatcaggaactctttgcggggctggttgcccgcctcaagccgacctga

SEQ ID NO: 356160 - DNA, 354 bp, Pseudomonas aeruginosa; identical to SEQ ID NO: 356112

SEQ ID NO: 356161 - DNA, 306 bp, Pseudomonas aeruginosa; identical to SEQ ID NO: 356159

SEQ ID NO: 356162 - DNA, 354 bp, Pseudomonas aeruginosa; identical to SEQ ID NO: 356112

SEQ ID NO: 356163 - DNA, 354 bp, Pseudomonas aeruginosa; identical to SEQ ID NO: 356112

SEQ ID NO: 356164 - DNA, 306 bp, Pseudomonas aeruginosa; identical to SEQ ID NO: 356159

SEQ ID NO: 356165 - DNA, 354 bp, Pseudomonas aeruginosa; identical to SEQ ID NO: 356112

SEQ ID NO: 356166 - DNA, 306 bp, Pseudomonas aeruginosa; identical to SEQ ID NO: 356159

SEQ ID NO: 356167 - DNA, 306 bp, Pseudomonas aeruginosa; identical to SEQ ID NO: 356159

SEQ ID NO: 356168 - DNA, 306 bp, Pseudomonas aeruginosa; identical to SEQ ID NO: 356159

SEQ ID NO: 356169 - DNA, 354 bp, Pseudomonas aeruginosa; identical to SEQ ID NO: 356112

SEQ ID NO: 356170 - DNA, 306 bp, Pseudomonas aeruginosa; identical to SEQ ID NO: 356159

SEQ ID NO: 356171 - DNA, 306 bp, Pseudomonas aeruginosa; identical to SEQ ID NO: 356159

SEQ ID NO: 356172 - DNA, 306 bp, Pseudomonas aeruginosa; identical to SEQ ID NO: 356159

SEQ ID NO: 356173 - DNA, 354 bp, Pseudomonas aeruginosa; identical to SEQ ID NO: 356112

SEQ ID NO: 356174 - DNA, 306 bp, Pseudomonas aeruginosa; identical to SEQ ID NO: 356159

SEQ ID NO: 356175 - DNA, 354 bp, Pseudomonas aeruginosa; identical to SEQ ID NO: 356112

SEQ ID NO: 356176 - DNA, 354 bp, Pseudomonas aeruginosa; identical to SEQ ID NO: 356112

SEQ ID NO: 356177 - DNA, 306 bp, Pseudomonas aeruginosa; identical to SEQ ID NO: 356159

SEQ ID NO: 356178 - DNA, 354 bp, Pseudomonas aeruginosa; identical to SEQ ID NO: 356112

SEQ ID NO: 356179 - DNA, 354 bp, Pseudomonas aeruginosa; identical to SEQ ID NO: 356112

SEQ ID NO: 356180 - DNA, 354 bp, Pseudomonas aeruginosa; identical to SEQ ID NO: 356112

SEQ ID NO: 356181 - DNA, 306 bp, Pseudomonas aeruginosa; identical to SEQ ID NO: 356159

SEQ ID NO: 356182 - DNA, 306 bp, Pseudomonas aeruginosa; identical to SEQ ID NO: 356159

SEQ ID NO: 356183 - DNA, 306 bp, Pseudomonas aeruginosa; identical to SEQ ID NO: 356159

SEQ ID NO: 356184 - DNA, 354 bp, Pseudomonas aeruginosa; identical to SEQ ID NO: 356112

SEQ ID NO: 356185 - DNA, 354 bp, Pseudomonas aeruginosa; identical to SEQ ID NO: 356112

SEQ ID NO: 356186 - DNA, 354 bp, Pseudomonas aeruginosa; identical to SEQ ID NO: 356112

SEQ ID NO: 356187 - DNA, 3057 bp, Pseudomonas aeruginosa
atgaacaaatgctatgcactggtctggaacgtatcccagggctgctggaacgtcgtcagcgaaggcagtcgcaggcgcggcaagcccgccggcgccaaggcggcgatcgcctccgtcctggccctgctgggcgccacggccctggctccggcctatgcgctgccaagcgggggaacggtggtcggcgggagcgcgaacggggagatacacctgtcgggcggcaacagcctgtcggtcaaccagaaggtcgacaagctgatcgccaactgggactccttcagcgttgccgccggcgagcgggtgatcttcaaccagccgagcagtagctcgattgccctgaatcgggtgatcggcaccaaggccagcgatatccagggccggatcgatgccaacggccaggtcttcctggtcaaccccaacggcgtgctcttcggtcgcggcgcccaggtcaatgtcggcggcctggtggcttccacgctggacatcacggatgccgagttcaacggcaactcctccagataccgtttcacgggtccctctaccaacggtgtcctcaaccacgggggcgccatcaccgcggcggaaggcggcagcatcgccctgctgggcgcgcaggtcgacaaccgcgggacggtcctggcgcagatgggcggtgtcgggctcggcgcgggcagcgacctgacgctgaatttcgacggcaacaagctgctcgacatccgcgtcgacgccggggtcgccaatgcgctggcaagcaacggcggcctgctcaaggccgacggggggcgagtcctgatggcggccaggaccgccaatgcgctgctcaacacggtggtgaactcccagggtgccatcgaggcccgttcgctgcgcggcaagaacgggcggatcgtgctcgatggcggcccggacggcaaggtcatggtgggaggcgccttgtccgccaatgcgctgaacggaccggggcacggcggcacggtcgaggtccgggggcaggcggtggaggtggccctgggcacccaggtgaacacgctcgccagcaatggcctcaacggcacctggaagattgccgccgacaagatcgacgtgcgcccatcggcggtgtcggatggcgtcaccgttcatgccgacaccctgtcgcggaacctggcgagcaccaatatcgaactggtttcgaccaagggcgacctggacctcgacggctcggtgagctgggcatcgggcaaccggctggggctgggctccgcggccgacctgacgctgaatggcaggctgaatgccagtggcgccaaggctgggctggagctgaaggccgaaggcgctatcgatatcaatgacaagatcgttctcggcggggctggcagcgcgctggccatggatgccggcgaaggccaccgggtgaacggcacggcgtcggtctccctggccggggccaacgcgacctacgtctccggcggctattactacacggtggtgcagaacctggcgcagttgcaggcgatcaacaagaacctggacggcctgtacgtgctcggcggcaatatcctgggcggcagctattactgcacggcactgcagtccatcggcgggcccgccggcgtcttcagcggcaccctggacggtctcggcaacagcatcggcaatctctcgatcagcaacaccgggccgaatgtcgggctgttcgcccgctcctcgggcaccctgagcaacctgaaactgaacaacctgcgggtatccgataacacctacggctccggtccgtcttcgctcggcgccctggtcgggatcaacagcgggcgtatcgccaacgtcagcgccagcggggtctcggtcgtcggcagccgactgcgctccaacgcactgggcggcctggtcgggcgcaatatcaacgggcagatcacgaacgcatccgtcagcggcggcgtcaccgcttatgcggcgagcacggcggtcggcggtctggtgggggagaacttcaccaccgcctgggggccggaggcggtcatcgagaacgcccacagcaacgtccatgtggctgcacagtccaccgagcgcaacagcctgggcggcgtcggcggcctggtcggactgaatgcgaaggccacgatcagggcgtccggcagccaggggaaggtcgagacctaccggcccggcctgaacgtcggcggcctggtcggctacaacatgttcggccacgtctccgatagtagcgccagcggccaggtggaggccggcggcgcggggaataccggcgggctggtcggcctgagttccggcggcgagatattccgctcgcaggcgagcgggtcggtgtacagcaagggcggcctggcgaccggcgggctgatcggcaaggcagaaggcaacggcatgctcggaaacctgaaagccagcggcagcgtcacggaccagggcggcgcggatctgggcgggctggtcggcaacaatagccagggtgccatcgagaccgccgaggcgacgggcaaggtcagcggcggcagcaacagtcgcgtcggcgggctgattggacacaacctcggcggttccgtcgcccatgcgatctcgcgcggcgacgtgagcggcgggttcaacagtctggtgggcgggctcgtcggccacaacggcggcgaactggtcaacgtggatgccagcggcagggtcagcgccgctgcgagtgcgtcggttggcggcctggtcggcagcaacgccggttcgatcctgtcggcgcgcagcagcagtaccgtcaacggcagcgggcgcagccgcatcggcggcctggtcggcgagaaccagatccagggacgcatcgtttcgtccatgtcggaaggcaccgtcagtggcgactactacgtctccatgggcgggctggccggcgtcaacctgggatcgatcgagtactccggcgtcagcggcaagatcgacttcaagcctcagtcccattacggccagatctacggtgcgcaggtcggcgagaaccatggggtcctgggcggcaactacgtgatcggcgaggcggcgctcctgccgcctgccggtatcgactacggcaacatctggtaa

SEQ ID NO: 356188 - DNA, 354 bp, Pseudomonas aeruginosa; identical to SEQ ID NO: 356112

SEQ ID NO: 356189 - DNA, 306 bp, Pseudomonas aeruginosa; identical to SEQ ID NO: 356159

SEQ ID NO: 356190 - DNA, 306 bp, Pseudomonas aeruginosa; identical to SEQ ID NO: 356159

SEQ ID NO: 356191 - DNA, 306 bp, Pseudomonas aeruginosa; identical to SEQ ID NO: 356159

SEQ ID NO: 356192 - DNA, 354 bp, Pseudomonas aeruginosa; identical to SEQ ID NO: 356112

SEQ ID NO: 356193 - DNA, 306 bp, Pseudomonas aeruginosa
atggagaatcggatcaaggaccaacagttggatctgttcgccgaccgcccctccagcccacgctggtggaccaaccagtggcggctgatgctgtcggcctttgcctatgtgctgttcgaacggctacgcgatcatctccagggcaccgcattggcgcgcatgagcatccataacctgcgcttgaaactgctcaagatcggtgcggtgatcattcgcaacagccggcgcatccgcgtgctgatcagcgaggcctatccgcatcaggaactctttgcggggctggttgcccgcctcaagccgacctga

SEQ ID NO: 356194 - DNA, 306 bp, Pseudomonas aeruginosa; identical to SEQ ID NO: 356159

SEQ ID NO: 356195 - DNA, 354 bp, Pseudomonas aeruginosa; identical to SEQ ID NO: 356112

SEQ ID NO: 356196 - DNA, 354 bp, Pseudomonas aeruginosa; identical to SEQ ID NO: 356112

SEQ ID NO: 356197 - DNA, 354 bp, Pseudomonas aeruginosa
  misc_feature (5)..(5): n is a, c, g, or t
atggncttgcaccaccgtttcgcgatcggcttgctgttccaggcgccccagagtggatttgccggccagcggttgcaggcggttgaccgcagtctgcagcgcgtagtcatggcgcaggccgtcatgatcgttgagatcctcgtagccggcggccagtgcatagatacgctgggcgagcagtgtctgcagtccatgctggacacgcccaggatcacgccgatcgggaacgattttggccaggcggcgggtcaagccatgttgccggtcgacctcgcgcagcagcaacaagcccgcatccgaggtgatgtgaccaccggtgaaagaggcctcgacgaggcggcgagagaggggtga

SEQ ID NO: 356198 - DNA, 306 bp, Pseudomonas aeruginosa; identical to SEQ ID NO: 356159

SEQ ID NO: 356199 - DNA, 354 bp, Pseudomonas aeruginosa; identical to SEQ ID NO: 356112

SEQ ID NO: 356200 - DNA, 306 bp, Pseudomonas aeruginosa; identical to SEQ ID NO: 356159

SEQ ID NO: 356201 - DNA, 5538 bp, Pseudomonas aeruginosa
gtggcgccggcgacggagctggagcgcacattggcagcgatctgggcggatgtgctgaagctggagcgggtcgggatggccgacaacttcttcgagctcggcggggattcgatcatctcgctgcaactggttagccgggctcgccaggcgggaatccgctttactcccaaggatctgttccagtaccagacgatacagggactggcaggggctgtgcggttcgatacggggcagcttgtcgatcaggggcctgttctcggctcgatgccactgatgccgatccagcaacgtttcttcgaggaggatgtccccgagcgccatcactggaaccagtctttgctgctggaacccagcgaggcgctcgaccctcaggcgctgcagggggccctggcggcgctggtcgaacagcatgatgccctgcgcttgcgttacatgcctggcgaaaggggctggcaggcggagttcctgccgcaggaggcgagcgaagagttgttgtgggaacgtacgctggatgctacggaagaactggaggaggtgatcgaggcctgccagcgcagcctggatttgcgtcatggccccctgttgcgggcgttgcttgcggccctgccggacggcagccagcgactgctgctggtcgtacaccacctggtggtggatggggtgtcctggcggatattgctggaagacctgcagcaggcctatcaggcattggcgaccggagagatgccgcacctgccggcgaagaccagttcattcaaggtctgggccgagcgtgtgcaggaacatgcccgggggccggcactcaaatcggagcttgcctactggcaggcacagcttcagggcttgtcggataacctgccctgcgacaaccctcatgggagacgtcagctgaagcatgccgcctacgttggcgggcggctggagcgagagtggacccgccgtctgttgcagcaggctccggcggcctatcgcacgcagatcaatgatctgctgttgacggccctggcccgggtggtctgccgctggagcggtgaggccgaggtgctggtgcgtctcgaaggacatggtcgcgaagatcttttcgaggatatcgacctgagccgtaccgttggctggttcaccagcctctatccattgcggctcagtccacgaatcgatctggtcgactcgatcaagaccatcaaggagcagatacgggccgtgccgaacaagggtatcggctatggcctgctgcgctatctcggcgacgatgaagctcggacaacgctcgggtgcctgccggagggccaattggtcttcaactatctaggccagttcgacggcagcttcgaccaggagcaggggttgttcgtgcccgcgcgggagggaagcggtgccgagcgtagcgacgaggcagttctcgacggcctgctggctctgagcgggcaggtctatgacggcgaattgagtctgcaatggacgttcagtcgggaagtgttcgaagaagccaccatccagcggcttgcggacgaatacttgtcagaactccaggcattggttgcgcactgttgcgaagagcggaatcgtgggctgacgccttcggactttcctctggcggatatcgaccaggcacgcctggatagcctgccattgcccgtcggctcgatcgccgacctctacccgttgtctcccatgcagcagggtatgttgttccactctttgtacgaagagggcgctggcgattacatcaaccagatgcaggtggaagtggaagggctggacgtcgcccgcttccgcctggcctgggaagcgaccctggaggcgcacgatgtcctgcgcagcggcttcgtctgggagggagagctgggtcggccgttgcaggtggtgcacaaaagcgtttcgcttccttttgccgagcacgactggcgcgggcgcaccgacctcgagtcagccctggaggacctggcagaccaggagcggctgcggacgttcgatttgcaacaggcgccgctcctgcgttgggtctcggtacgagtggccgaccaccggcatcgcctgatctacaccaatcaccacatcctgatggatggctggagcggctccctgctgctcggcgaagtacttgaacgctactcggggcgtcagcctgctcctcaggccggccggtaccgcgactacatcgcctggctacagcgacaggaccgggaaagcgccgagcgctactggaaagagcggctcgccgagctcgatgcgccaactcgcctggcacaggctatacgttgcgaactgttgccagcgagcggacatggccatttcgtccacgccttcgatccggtttccacccagcatttcgaggcatttgcccgcacccagcgggtgaccttgaacaccttggtgcaatcggcctggctgttgctgttgcagcgttacaccgggcaggacacggtgtgtttcggcgccacggtggcggggcgaccgatggagttgcccggcatcgagcaacaggtgggattgttcatcaatactctgccggtgatcgctagcccgagggcggacctgagtgttgtcgattggatcagtcaggtgcaggactgcaacctgggcctgcgcgagtatgagcatacgccgctgtacgaagtgcagcgctgggccgggcagggcggcgagggattgttcgacagcctgctggtattcgagaactatccggtatcggaggcactggagcagggagccccgtcggggctgcgcttcggtgaggtagagaaccgggagcagacgaactatccgctgaccttgtcggtcggtctgggggagaccctccaggtacagtacagctacgatcgccgttatctggattccgagacggttgagcggttggcgtcgcactggcgcaacttgctagaggctatgtgccgggcgccggaaatccgccttggcgaactgcggatgttggacgaggacgaacggcagcgttacctggcgcttggctgcgacatggatgcggaatatcctcgcggtctttgcctgcatacactgttcgaggcgcaggcagggcgcttcgcggacgcgcctgcggtgctcttcgacggtgagctactgacctacggtgaactcaaccgacgcgccaaccgcctcgcgcactacctgctcgctgagggagtggggacagagagtctggtgggaatcgccatggagcgcgggccggacatgcttgtcggcctattggcggtgctcaaggcaggtgccgcctatgtgcccctggatcccgactatcctcgcgagcggcttgcctacatgctggaagacagcggcgtacggctggtactgagccagtcctggctgtcccctgggttgcccttggcgaagggcgtggccgccctcgacctggatcggactggctggctggatggttatccctcgaatgacccgctgcgtcccctggctgcggaaaacctggcctatgtgatctacacgtcaggctcgaccggcaggccgaaaggtgtccagatcgaacatcgttcgctgctcaacttcctcgccagcatggcgcgggagccggggtgcacctcttccgaccggctgctgcaattgacctctctgtccttcgatatcgctggcctggagctatacctgggcctgacccgcggtgcctgtatcgtcatgcctaaggctcagcagagcaaggatccgcaggcgctgctggccctcatcgaagaggctgaggtcagcatcatccaggcgacgccggcgacttggaggatgctgctggacggcgctccggagcgcgccgaggtcctgcgtggccgcaaggcgctctgtggtggtgaggcgctgggcggaggcctggcacgacgtctgctcgcgcacgtggactccctatggaacgtctacggtcccaccgagaccaccatctggtcgtcctgccagcgtgtgctcgacagcgaggtcatccatcttggcggacccatcggcaacaccgcgctacacgtcctggatgacgaactcgaacccatgccggcggggggcggcggtgaactgctgatcggcggggacggtctggccaggggctatttcgcacgtcccgccctgacagcagaacgcttcgtgcccaacccgttcgatgcacacggcggacgcctctaccgcaccggagatttggccagccgccgctccgatggcgttatcgactatctcggccgtgtcgaccatcaggtgaagatccgcgggttccgcatcgaactgggcgagatcgaggcgcgcctgcaggagcagggcctcgtgcgcgaggctgtggtgctggcacaggagggagcccatggcgcgcaactggttggctacgtagtgcccatcacgtcagaactggcaccagattggcgcgatgtgctgaggaatgcactgaagggctgcctgccggaatacatggtgcctgcgcaattggtggcgctcgaacggttgccgctgacgcccaacggcaagatcgaccgcaaggccttgccgaagccggatgccggcgcacagacgcaggcatacgcgcccccgcagaccgaagcggaaaaagacctggcgcggctctggagagaggtactcggtgtcgagcgggtcggtttgcacgacaacttcttcgagcttggcggcgattcgatcctggccgtccaactggtggggagaatcaggctgtggcgtgctccgggcttggagatcagcctgcgcgacctgatgcacaagccaaccatcgccgcgttgctggagtcgcggtcacatgcagggagtccgctggtgagcttgaacagggggcttgagcaggtgccgccgttgttctgcattcacggaatcttcggcacggccttcgactacctgccgttggcgcggcggatggagggacgacgcacggttatcggtatccagtcgccgttgctctccggttatcgccccgaaggcctggcgatgcgggagctggccaggcagtacgccggactgatcaggcaaagacaacctcagggtccttacagcctgatgggctggtcgctgggcgcagtcatcagcctcttcgtggcgcgggaactggagaagcagggcgaggaggtcgtcttcctcggcctcgcggatgcaccgctggtcgacggcaggggaagaagcgatcaggagctgggccaggtcctcgatgagttcttggagatattcctggggacgcgctcccggcttccggccgaggcgtcggtggatgcctctgtcgtagccagtcatatccgtgctcaggtggcggagaaacctgttcgccatggcctcacggcggatgagctgattggtgtgttcgaaaccgtggcgaccttgcgcaagctctgctgggatgccgccgaactcgcaggactcgttgccggggctcattgctggtgggtcgaagggcgcgaggcggaggcgcggcagttccaggcgcagatgtctttcaccttggcgcgagaaaccttctgccaggccgagcacgacacgatcatgcaggacgagcgcctgttgcaggagcttgacgaggctagcgagcggtctttgaagcaacgtacgtag

SEQ ID NO: 356202 - DNA, 354 bp, Pseudomonas aeruginosa; identical to SEQ ID NO: 356112

SEQ ID NO: 356203 - DNA, 306 bp, Pseudomonas aeruginosa
  misc_feature (64)..(64): n is a, c, g, or t
atggagaatcggatcaaggaccaacagttggatctgttcgccgaccgcacctccagcccacgcnggtggaccaaccagtggcggctgatgctgtcggcctttgcctatgtgctgttcgaacggctacgcgatcatctccagggcaccgcattggcgcgcatgagcatccataacctgcgcttgaaactgctcaagatcggtgcggtgatcattcgcaacagccggcgcatccgcgtgctgatcagcgaggcctatccgcatcaggaactctttgcggggctggttgcccgcctcaagccgacctga

SEQ ID NO: 356204 - DNA, 276 bp, Pseudomonas aeruginosa
atgagtactgcttcgccaataaaaacaaacgagcaggtacgtctgaatccgatcgtgttcttcggctcgaccgcactgatcctggttctgaccgccgccctcatcctctatcccgacagcgccggagccttgctcggccgcatccaggcgtggctgtcgcacagcttcggctggtactacatgctggccatcggcgcctaccccggatttctcatgaggccggcaggcgtggccggtgaagcctcggcgtatcaacaacctgccttccaccgctaa

SEQ ID NO: 356205 - DNA, 306 bp, Pseudomonas aeruginosa; identical to SEQ ID NO: 356159

SEQ ID NO: 356206 - DNA, 306 bp, Pseudomonas aeruginosa; identical to SEQ ID NO: 356159

SEQ ID NO: 356207 - DNA, 306 bp, Pseudomonas aeruginosa; identical to SEQ ID NO: 356159

SEQ ID NO: 356208 - DNA, 306 bp, Pseudomonas aeruginosa; identical to SEQ ID NO: 356159

SEQ ID NO: 356209 - DNA, 354 bp, Pseudomonas aeruginosa; identical to SEQ ID NO: 356112

SEQ ID NO: 356210 - DNA, 354 bp, Pseudomonas aeruginosa; identical to SEQ ID NO: 356112

SEQ ID NO: 356211 - DNA, 306 bp, Pseudomonas aeruginosa; identical to SEQ ID NO: 356159

SEQ ID NO: 356212 - DNA, 354 bp, Pseudomonas aeruginosa
  misc_feature (105)..(105): n is a, c, g, or t
atgggcttgcaccaccgtttcgcgatcggcttgctgttccaggcgccccagagtggatttgccggccagcggttgcaggcggttgaccgcagtctgcagcgcgtngtcatggcgcaggccgtcatgatcgttgagatcctcgtagccggcggccagtgcatagatacgctgggcgagcagtgtctgcagtccatgctggacacgcccaggatcacgccgatcgggaacgattttggccaggcggcgggtcaagccatgttgccggtcgacctcgcgcagcagcaacaagcccgcatccgaggtgatgtgaccaccggtgaaagaggcctcgacgaggcggcgagagaggggtga

SEQ ID NO: 356213 - DNA, 306 bp, Pseudomonas aeruginosa; identical to SEQ ID NO: 356159

SEQ ID NO: 356214 - DNA, 306 bp, Pseudomonas aeruginosa; identical to SEQ ID NO: 356159

SEQ ID NO: 356215 - DNA, 354 bp, Pseudomonas aeruginosa; identical to SEQ ID NO: 356112

SEQ ID NO: 356216 - DNA, 306 bp, Pseudomonas aeruginosa; identical to SEQ ID NO: 356159

SEQ ID NO: 356217 - DNA, 306 bp, Pseudomonas aeruginosa; identical to SEQ ID NO: 356159

SEQ ID NO: 356218 - DNA, 354 bp, Pseudomonas aeruginosa; identical to SEQ ID NO: 356112

SEQ ID NO: 356219 - DNA, 741 bp, Pseudomonas aeruginosa
gtgaaaagtggagtttttctggtagcattttgtgcgcggctgaagacttatggggctttgtttggcgacaagaatcataaggctttcagccgtttttgtttatgcggtcatgagaaatccgggctagaacgctccgactaccggaccgttgtggagcatctggccgacgcccaacggcgtgacgtggctatcctggccgactctctaaatgacttcggcttagcggacatggctttcctagtcgaacaagcctcagcccgttccacttttcttgatcatttagagcgattggccaacaccgccgataccctcgaagcaaccatgcataaggccatcgaacacaatctctggattttcggttcagagtattccttgttcagctcgaaccagaccttgcagcgccaagttgaggactaccttgatcggacatatcggggcgaattcgcgaacaagcgccccgaccttctgctcaacgagaatctcaatggagagtacctattgatcgagttcaaacgcccattgcatgcgctgaatttcgctgactaccagcaggctactggttaccgacacgactttctcaagcacgtcagtaaaccgatcaaggtgctggtcataggcggcaaacgttctggggattatcccgtgcagaatttggagcccaatgtatccaccatgctgttcgccgatattatttccacggcacgacggcagattcaatggcagttacgtaccaaattttag

SEQ ID NO: 356220 - DNA, 354 bp, Pseudomonas aeruginosa; identical to SEQ ID NO: 356112

SEQ ID NO: 356221 - DNA, 306 bp, Pseudomonas aeruginosa; identical to SEQ ID NO: 356159

SEQ ID NO: 356222 - DNA, 354 bp, Pseudomonas aeruginosa
  misc_feature (86)..(86): n is a, c, g, or t
atgggcttgcaccaccgtttcgcgatcggcttgctgttccaggcgccccagagtggatttgccggccagcggttgcaggcggttgnccgcagtctgcagcgcgtagtcatggcgcaggccgtcatgatcgttgagatcctcgtagccggcggccagtgcatagatacgctgggcgagcagtgtctgcagtccatgctggacacgcccaggatcacgccgatcgggaacgattttggccaggcggcgggtcaagccatgttgccggtcgacctcgcgcagcagcaacaagcccgcatccgaggtgatgtgaccaccggtgaaagaggcctcgacgaggcggcgagagaggggtga

SEQ ID NO: 356223 - DNA, 354 bp, Pseudomonas aeruginosa; identical to SEQ ID NO: 356112

SEQ ID NO: 356224 - DNA, 354 bp, Pseudomonas aeruginosa; identical to SEQ ID NO: 356112

SEQ ID NO: 356225 - DNA, 306 bp, Pseudomonas aeruginosa; identical to SEQ ID NO: 356159

SEQ ID NO: 356226 - DNA, 354 bp, Pseudomonas aeruginosa; identical to SEQ ID NO: 356112

SEQ ID NO: 356227 - DNA, 354 bp, Pseudomonas aeruginosa; identical to SEQ ID NO: 356112

SEQ ID NO: 356228 - DNA, 351 bp, Pseudomonas aeruginosa
atgggcaagagagtggttgtattgctatggctgctattcacatcaatgtcagcccacgccatcgataaaaaagtcaacaacgttaccatcatgcgcgtgggcttcatggtggacgcgaattctccgggtggaggctggggctgcatcgtcagcaagccgggagcggcggattgcggctttggcctgatgcgcctgccgccgatgaataccgatgccggcaaggccatgctgtcgctgatgctgagcgcccaggccacacagaacaaactgccggagatcgcctattcggccagcgccacggtgaacgaggtatgccagatcacttcggcgcagatagacagcggcacttga

SEQ ID NO: 356229 - DNA, 306 bp, Pseudomonas aeruginosa; identical to SEQ ID NO: 356159

SEQ ID NO: 356230 - DNA, 306 bp, Pseudomonas aeruginosa; identical to SEQ ID NO: 356159

SEQ ID NO: 356231 - DNA, 354 bp, Pseudomonas aeruginosa; identical to SEQ ID NO: 356112

SEQ ID NO: 356232 - DNA, 354 bp, Pseudomonas aeruginosa; identical to SEQ ID NO: 356112

SEQ ID NO: 356233 - DNA, 1221 bp, Pseudomonas aeruginosa
  misc_feature (689)..(689): n is a, c, g, or t
atgagaaatccgggctacccgaccacgctctgggacatcgccgggaagaccggccacccgttgcgcaccaccatcagcgagatgggcccgctgctgctggccaacctcctggagttgaccgatagccagcaggccgcgctgttcgccgccttccaggtggccgaccgggaaggcctgctgctgctcgacctgaaggacctgaaggcgctgctcaaccatctgaaggacaatccggaaatccttggcgaggaccgggcgctgttcactggcgcttccgggcaggcgctgctgcgccgcctggccactctggagcagcagggcgccgaggccttcttcggcgagcctgccctgcaactggaagacatcctccgccccgagccggacgggcgcgggcgcatccacctgctcgacgccagccgcctggtgcacgaggcgccgaaggtctacgcgactttcctgctctggctgttggccgagctgttcgagcaactgccggagcgcggcgatgccgacaagccggtgctggcactgttcttcgacgaggcccacctgctgttcaacggcacgccgaaagccttgcgcgaccgcctggaacaggtggtccggctgatccgctcgaaaggcgtcggggtgtacttcgtcacccagtcgccgggcgacctgccggacgatgtcctggcccagctcgncctgcgtatccagcatggcctgcgcgccttcaccgccaaggagcagaaatcgctgcgcgcggtggccgacggtttccgcccgaacccggcgttcgacaccctgggggtgctgaccgaactgggtatcggcgaggcgttggtcggcaccctggaggaaaagggcacgccggccatggtccagcgcgtcgcggtggcgccgccctattcgcggatcggcccgctgagcgacagcgagcgcgctgaactggtccagcggtcgccgttgaagggtcgctacgaccagccgatcgatcgcgagtcggcctacgaggtgctggcgaacaaggcgggcgccaaacccgaggtccagggccaggcgactgctcagcaggaaagctcgtccggcgtcggcggcatggccgggcagattctcggcagcctgctgtccaattcgacggtgaagagcgccatgcgccaggcggccaaccagttgagccgggagctggtgcgtggcctgctcggctcgttgatgggcgggaagaagcggcgctga

SEQ ID NO: 356234 - DNA, 354 bp, Pseudomonas aeruginosa
  misc_feature (4)..(4): n is a, c, g, or t
atgngcttgcaccaccgtttcgcgatcggcttgctgttccaggcgccccagagtggatttgccggccagcggttgcaggcggttgaccgcagtctgcagcgcgtagtcatggcgcaggccgtcatgatcgttgagatcctcgtagccggcggccagtgcatagatacgctgggcgagcagtgtctgcagtccatgctggacacgcccaggatcacgccgatcgggaacgattttggccaggcggcgggtcaagccatgttgccggtcgacctcgcgcagcagcaacaagcccgcatccgaggtgatgtgaccaccggtgaaagaggcctcgacgaggcggcgagagaggggtga

SEQ ID NO: 356235 - DNA, 306 bp, Pseudomonas aeruginosa; identical to SEQ ID NO: 356159

SEQ ID NO: 356236 - DNA, 306 bp, Pseudomonas aeruginosa; identical to SEQ ID NO: 356159

SEQ ID NO: 356237 - DNA, 354 bp, Pseudomonas aeruginosa; identical to SEQ ID NO: 356112

SEQ ID NO: 356238 - DNA, 354 bp, Pseudomonas aeruginosa
atgggcttgcacgaccgtttcgcgatcggcttgctgttccaggcgccccagagtggatttgccggccagcggttgcaggcggttgaccgcagtctgcagcgcgtagtcatggcgcaggccgtcatgatcgttgagatcctcgtagccggcggccagtgcatagatacgctgggcgagcagtgtctgcagtccatgctggacacgcccaggatcacgccgatcgggaacgattttggccaggcggcgggtcaagccatgttgccggtcgacctcgcgcagcagcaacaagcccgcatccgaggtgatgtgaccaccggtgaaagaggcctcgacgaggcggcgagagaggggtga

SEQ ID NO: 356239 - DNA, 306 bp, Pseudomonas aeruginosa
  misc_feature (15)..(15): n is a, c, g, or t
atggagaatcggatnaaggaccaacagttggatctgttcgccgaccgcacctccagcccacgctggtggaccaaccagtggcggctgatgctgtcggcctttgcctatgtgctgttcgaacggctacgcgatcatctccagggcaccgcattggcgcgcatgagcatccataacctgcgcttgaaactgctcaagatcggtgcggtgatcattcgcaacagccggcgcatccgcgtgctgatcagcgaggcctatccgcatcaggaactctttgcggggctggttgcccgcctcaagccgacctga

SEQ ID NO: 356240 - DNA, 306 bp, Pseudomonas aeruginosa; identical to SEQ ID NO: 356159

SEQ ID NO: 356241 - DNA, 354 bp, Pseudomonas aeruginosa
  misc_feature (118)..(118): n is a, c, g, or t
atgggcttgcaccaccgtttcgcgatcggcttgctgttccaggcgccccagagtggatttgccggccagcggttgcaggcggttgaccgcagtctgcagcgcgtagtcatggcgcagnccgtcatgatcgttgagatcctcgtagccggcggccagtgcatagatacgctgggcgagcagtgtctgcagtccatgctggacacgcccaggatcacgccgatcgggaacgattttggccaggcggcgggtcaagccatgttgccggtcgacctcgcgcagcagcaacaagcccgcatccgaggtgatgtgaccaccggtgaaagaggcctcgacgaggcggcgagagaggggtga

SEQ ID NO: 356242 - DNA, 354 bp, Pseudomonas aeruginosa; identical to SEQ ID NO: 356112

SEQ ID NO: 356243 - DNA, 306 bp, Pseudomonas aeruginosa; identical to SEQ ID NO: 356159

SEQ ID NO: 356244 - DNA, 306 bp, Pseudomonas aeruginosa; identical to SEQ ID NO: 356159

SEQ ID NO: 356245 - DNA, 228 bp, Pseudomonas aeruginosa
gtgaagaagctacttccggactcgctcggctcgttgatcgacaagatgacgtcgttccggcaaggcgaagctttactggtgggtgagtccatcattcttccgtcaatcgtccagatcgaaccgtgcgctgacgccccatcctccaacgacatcccgtactggcagctttggaaagaggaatggaaggacatggacttcgaggcaatcaaggcggagtggtacaagtaa

SEQ ID NO: 356246 - DNA, 354 bp, Pseudomonas aeruginosa; identical to SEQ ID NO: 356112

SEQ ID NO: 356247 - DNA, 423 bp, Pseudomonas aeruginosa
  misc_feature (394)..(403): n is a, c, g, or t
atgactgcgacagacagaacgcccccgccattgaaatggctctgcctcggcaaccgtgatgcgaacgacggattcgagctcttcgcccatggcatctatgcgaggaacggcgcgttggtcggcagcaagctctccctgcgcgaacggcgccagcgcgtcgacctgtcggccttcctttccggcgcaccgccgctgcttgccgaggcggcggtcaagcacctgctggcacgcctcctgtgcgtgcaccggcacaacaccgacctcgaactgctcggcaagaacttcattcccctgcatgccagcagcctgggcaacgccggggtctgcgagcggatcctggcctcggccaggcaattgcagcagcaccaggtcgaactctgcctgctgctagccnnnnnnnnnncaagagcatcgagtacctga

SEQ ID NO: 356248 - DNA, 129 bp, Pseudomonas aeruginosa
atgctttgcctcaacgtcgacaatgaggaactgcaccaacaagccaacgcactccccttcgccttccgtcacggcaggcactattcggagcctttccaggcctggccgttcagcagtccggcctgctga

SEQ ID NO: 356249 - DNA, 306 bp, Pseudomonas aeruginosa; identical to SEQ ID NO: 356159

SEQ ID NO: 356250 - DNA, 306 bp, Pseudomonas aeruginosa; identical to SEQ ID NO: 356159

SEQ ID NO: 356251 - DNA, 354 bp, Pseudomonas aeruginosa; identical to SEQ ID NO: 356112

SEQ ID NO: 356252 - DNA, 306 bp, Pseudomonas aeruginosa; identical to SEQ ID NO: 356159

SEQ ID NO: 356253 - DNA, 354 bp, Pseudomonas aeruginosa; identical to SEQ ID NO: 356112

SEQ ID NO: 356254 - DNA, 354 bp, Pseudomonas aeruginosa
  misc_feature (29)..(29): n is a, c, g, or t
atgggcttgcaccaccgtttcgcgatcgncttgctgttccaggcgccccagagtggatttgccggccagcggttgcaggcggttgaccgcagtctgcagcgcgtagtcatggcgcaggccgtcatgatcgttgagatcctcgtagccggcggccagtgcatagatacgctgggcgagcagtgtctgcagtccatgctggacacgcccaggatcacgccgatcgggaacgattttggccaggcggcgggtcaagccatgttgccggtcgacctcgcgcagcagcaacaagcccgcatccgaggtgatgtgaccaccggtgaaagaggcctcgacgaggcggcgagagaggggtga

SEQ ID NO: 356255 - DNA, 306 bp, Pseudomonas aeruginosa; identical to SEQ ID NO: 356159

SEQ ID NO: 356256 - DNA, 306 bp, Pseudomonas aeruginosa; identical to SEQ ID NO: 356159

SEQ ID NO: 356257 - DNA, 354 bp, Pseudomonas aeruginosa
atgggcttgcaccaccgtttcgcgatcggcttgctgtttcaggcgccccagagtggatttgccggccagcggttgcaggcggttgaccgcagtctgcagcgcgtagtcatggcgcaggccgtcatgatcgttgagatcctcgtagccggcggccagtgcatagatacgctgggcgagcagtgtctgcagtccatgctggacacgcccaggatcacgccgatcgggaacgattttggccaggcggcgggtcaagccatgttgccggtcgacctcgcgcagcagcaacaagcccgcatccgaggtgatgtgaccaccggtgaaagaggcctcgacgaggcggcgagagaggggtga

SEQ ID NO: 356258 - DNA, 306 bp, Pseudomonas aeruginosa; identical to SEQ ID NO: 356159

SEQ ID NO: 356259 - DNA, 792 bp, Pseudomonas aeruginosa
gtggccgagttgccagaggttgtcgtagcccagcgaaaccaccgagcgcaagtgacgggtgtcggcgctgtagtcgttgttcaggccgatgctggcgtgccagggattcttgtcttccacctgcaggtcgacgtccatggtgccgggccgctggccctcgcgcaccatcggcagcacctggcggccgggggtgcggttgacctgcgccagctcgcgctggacctgggcgaagtcgggcaccttgccctcctccagggccggcacttcctcgcgcaactccaccggcgaatagtgcttggcgccgaccacccggacgcgaccgacagtggtctcggtgacttgcaggtagaccaccccgccgctcacctgctgctccggcagctcgacgtagaccgactggtagcccttctcctggtaggcggcctgcagcgcatcgcgcgccccctcgatgtcgcccaggctgcgctgcggtccgaggaagggatacaccgccgcctcgatggcgcggttgtccagcacggtgttgccgcgtaccacgtactcgttgatgtccaccagacgctgggtctcggctcccgccgcggcgggaggggcctcgtcggccagcgaagcgcacgacaatgcgacagccaggcaaccgatcgaccagcgctggcgaaacgggtgcgcacaattgaacagcgaacgcttcacacggtcccccgaagttccatcgggacttattgttctaatgcaacaagtccgttcatcgaacagttctgtgaaagacaacaaactagcggcgacgcatga

SEQ ID NO: 356260 - DNA, 354 bp, Pseudomonas aeruginosa; identical to SEQ ID NO: 356112

SEQ ID NO: 356261 - DNA, 306 bp, Pseudomonas aeruginosa; identical to SEQ ID NO: 356159

SEQ ID NO: 356262 - DNA, 354 bp, Pseudomonas aeruginosa
atgggcttgcaccaccgtttcgcgatcggcttgctgttccaggcgccccagagtggatttgccggccagcggttgcaggcggttgaccgcagtctgcagcgcgtagtcatggcgcaggccgtcatgatcgttgagatcctcgtagccggcggccagtgcatagatacgctgggcgagcagtgtctgcagtccatgctggacacgcccaggatcacgccgatcgggaacgattttggccaggcggcgggtcaagccatgttgccggtcgacctcgcgcagcagcaacaagcccgcatccgaggtgatgtgaccagcggtgaaagaggcctcgacgaggcggcgagagaggggtga

SEQ ID NO: 356263 - DNA, 306 bp, Pseudomonas aeruginosa; identical to SEQ ID NO: 356159

SEQ ID NO: 356264 - DNA, 306 bp, Pseudomonas aeruginosa; identical to SEQ ID NO: 356159

SEQ ID NO: 356265 - DNA, 354 bp, Pseudomonas aeruginosa; identical to SEQ ID NO: 356112

SEQ ID NO: 356266 - DNA, 354 bp, Pseudomonas aeruginosa; identical to SEQ ID NO: 356112

SEQ ID NO: 356267 - DNA, 306 bp, Pseudomonas aeruginosa; identical to SEQ ID NO: 356159

SEQ ID NO: 356268 - DNA, 306 bp, Pseudomonas aeruginosa; identical to SEQ ID NO: 356159

SEQ ID NO: 356269 - DNA, 159 bp, Pseudomonas aeruginosa
atgagccactatctcgaagttctaactccgcagaacagccagatcatcttcatcgaccagcagccacagatggcattcggcgtacagtccatcgatcgccagacgctgaagaacaacgtagcccggatttctcatgaccgcataaacaaaaacggctga

SEQ ID NO: 356270 - DNA, 354 bp, Pseudomonas aeruginosa; identical to SEQ ID NO: 356112

SEQ ID NO: 356271 - DNA, 306 bp, Pseudomonas aeruginosa; identical to SEQ ID NO: 356159

SEQ ID NO: 356272 - DNA, 354 bp, Pseudomonas aeruginosa; identical to SEQ ID NO: 356124
  misc_feature (50)..(50): n is a, c, g, or t

SEQ ID NO: 356273 - DNA, 444 bp, Pseudomonas aeruginosa
gtgctgaagtcggcgctcaaggcgagcctgccggaatacatggtgccgacccagtgggtgttcctggcggcgctgccgctgacgcccaacggcaagctggaccgcaaggcgctaccggcgccggacgccagtgacagccagcaacagtatgtggcgccggtgacggagctggagcgcacattggcagcgatctgggcggatgtgctgaagctggagcgggtcgggatggccgacaacttcttcgagctcggcgggcattcgttgctggcgactcaggtcacggcacgcatccatgccgagctggacatgaatgcccccctggtcttgctgttccaggccgagactttacaggcctatgcgacttcgcttgaaggctacaaacctaccgacgcagcggacttcgacgagctgcgggaattcatgagcgaactcgaggccgtctga

SEQ ID NO: 356274 - DNA, 405 bp, Pseudomonas aeruginosa
atggtgccgacccagtgggtgttcctggcggcgctgccgctgacgcccaacggcaagctggaccgcaaggcgctaccggcgccggacgccagtgacagccagcaacagtatgtggcgccggtgacggagctggagcgcacattggcagcgatctgggcggatgtgctgaagctggagcgggtcgggatggccgacaacttcttcgagctcggcgggcattcgttgctggcgactcaggtcacggcacgcatccatgccgagctggacatgaatgcccccctggtcttgctgttccaggccgagactttacaggcctatgcgacttcgcttgaaggctacaaacctaccgacgcagcggacttcgacgagctgcgggaattcatgagcgaactcgaggccgtctga

SEQ ID NO: 356275 - DNA, 306 bp, Pseudomonas aeruginosa; identical to SEQ ID NO: 356159

SEQ ID NO: 356276 - DNA, 354 bp, Pseudomonas aeruginosa
  misc_feature (31)..(31): n is a, c, g, or t
atgggcttgcaccaccgtttcgcgatcggcntgctgttccaggcgccccagagtggatttgccggccagcggttgcaggcggttgaccgcagtctgcagcgcgtagtcatggcgcaggccgtcatgatcgttgagatcctcgtagccggcggccagtgcatagatacgctgggcgagcagtgtctgcagtccatgctggacacgcccaggatcacgccgatcgggaacgattttggccaggcggcgggtcaagccatgttgccggtcgacctcgcgcagcagcaacaagcccgcatccgaggtgatgtgaccaccggtgaaagaggcctcgacgaggcggcgagagaggggtga

SEQ ID NO: 356277 - DNA, 306 bp, Pseudomonas aeruginosa; identical to SEQ ID NO: 356159

SEQ ID NO: 356278 - DNA, 231 bp, Pseudomonas aeruginosa
atgatcgttgagatcctcgtagccggcggccagtgcatagatacgctgggcgagcagtgtctgcagtccatgctggacacgcccaggatcacgccgatcgggaacgattttggccaggcggcgggtcaagccatgttgccggtcgacctcgcgcagcagcaacaagcccgcatccgaggtgatgtgaccaccggtgaaagaggcctcgacgaggcggcgagagaggggtga

SEQ ID NO: 356279 - DNA, 420 bp, Pseudomonas aeruginosa
atgctcgacctacgccgcctgcgctgcttcgcagccgttgccgaaaccctgcatttcggccgcgccgcccagcgcctgcacatggcgcagccgcccttgacccggcagatatccgcgctggaggaagagctgggctttcgcctgttcgaccgctccagccgggcggtgaccctcaccgccgagggccgcctgttcctgccttacgcacgcgccctgctggaccaactggagcgcaccgccggcttcgcccgcaagctggcgcaggggctggccggccacctgaccctcggctacgccagctccatcgccctgtcggacctgttcaccgaggcgatccgactgttccgcgagcgccatccggaggtgcaactggagctgctcgaaggcgcttcggcggcgcaatgggcgcagatcgcttaa

SEQ ID NO: 356280 - DNA, 384 bp, Pseudomonas aeruginosa
atgcatccacaaaccatcaccgcacacggtttcaccggcttcctcggcaaaggcctgtccctgcgtgagcttcagtgcgtcctgggcatcgctgcgggtcgtacctcgaaggagttggcccgcgacctgggcatgcagccgggcacggtgggtaagcgcgttctggcagcgaccaccaaactcggcgtcacccgccgtgccgccctggtggccgaggctatgcgccgcggcatcctgacccatgcggtgttcgtacttgcggccttgacctgcctgcactgcgctatcggtgacgatccaaccatgaggacgcggcgcggcggcgagcgtcgggttgagtttcgagtggctgcgcgtcgggttgaaacctggctgaccgcataa

SEQ ID NO: 356281 - DNA, 537 bp, Pseudomonas aeruginosa
atgatgcaccgcgtctacttgtccggccctatgaccggcattcccgagttcaactaccccgcgttcaacgctgaggagcggcggatcagagccctcggctatatcgtcgagaaccctgccagcaacatggtctaccgcggatcgccgtgggagacgttcatgcgcgacgggatcaagcggctcatggactgcgacattctcgcgttgctccctgggtgggagcgttctcgcggcgcgaacatcgagcgcaacctcgctatcactctcggcatgcacgtcgtcgacgccgaggcactccctccgcccgatttcgtctgcaagtgccgcgcaattcagttcacctgctgctccgtaccgagtgacaacgatccgttcgtgtgccggcgcctggcaggcatgcccgcctacaagtccccggaggatcaactggcaaccgcacggcaagccctcgaacagatcgccgcactcaccgacgtctctaccggcggtatcggtatggacgtgctcaagatcgccaagcaagccctttccaactga

SEQ ID NO: 356282 - DNA, 531 bp, Pseudomonas aeruginosa
atgagcatcgacatcaaacacaagcattccggtcacgtcatcatcatcgaaggccacgccttcaaggcaaacgaccggggccaatgggacctgacagacatctggcgaaccctgaagctgccaaagggcaagcaaccgggccaatggaacaacttgaaggaaggccaatacatgagggaaatgggtttttcccattccgctaaggctggtgcagttacagtgacccacgccaacaaacgagcagctcttgcctatgcgggctgggtctctcgtgagttcgagacgatggtctatgacgccttcgaggcgatccttgagatgccggaggtagctgcactggtggccgacaagatggcctcactgggcaatgaccatggtgcaaacatcctcaagcgcatgaccttcaacgacaagtgcgattggaaagcaatgaaggctccccacaagaatactcaaaggggcctaaaggctgccgtcagaaaaggccatttgacacttcagcgagctggcgagcttggacttagaatctaa

SEQ ID NO: 356283 - DNA, 1002 bp, Pseudomonas aeruginosa
atgactaagccattccagtacaccaaaccttcgacctacactaccgccatcaccgatgagcacactgggtcgattcgattcaacactgctgatgttcgcccagagacccaagcggccaccgatgtgtccgtctatgtggaggcccttgtggaggccgctgaggactatttgaacggcgatgagtggcgagaggctgccatggaggccaccccttgtgagttccgtccggctggctctgaggccactgggcaacagatcatcaccatggccgaccgctccgtcaccttcgacccgcgcaagaactgggacaaccagaccatcgacaagggtgaagtcctggccggttctgtgatcttcactgaggccaccgacacggcattggtcatcagccaccgtgccaccatcctcgaccacaatctgatggcaggcttcaccgtccagtccatggagcaaaccgctgacaagatgctccgtgacatcgagcacagcgcagccggtaaggtcgctgccatcttggcgactgccccaagcactgagagcttcaccgagggcaagcctacgggcaagcctgtcgagatcgctgaggacctcatcgacatcctgacgacccacgttaaccagactgtgggcacctcgttgagtgacttcgtgatcctgctcccagtgtcgctggtggctgtccttgagcgtgctgctcagcgtgctggtctgggttctatcgaggaactcattggcgcaggcgtacagccgtacaccgggactgaccatggcatcttcatgttgcccaagctgttcacctcgctgagctaccgtgagcgccaagacggcagcgtgtggcgcatcgaagcgacccgcaatccgaacgcccaaggctgggaccttgagatcatggctgtggtggacatcatcgccaacggtatggtcaaggtggccttaactgaggatcgtcttcagactgtccaagtgccgttcccgctggtcactcgcattgccctgagctga

SEQ ID NO: 356284 - DNA, 402 bp, Pseudomonas aeruginosa
atgaaaatcactatcacgaaagtcctgaagaacgaagtcaccgtgtcgggccagaccctgaaccgtgagtacgtcgagaacatcatgttgcccatgctggtcgcccaatgcgggaccgttaagggccagcaattcgagatcgttaaggcgttcgatgaggccggtctgccactccaagcgattcctgtagttgcccgagagtaccgccaagaccagcaccagaaggcccaagagaaggctcagagagaggctgaggcccgttggcatcaagagcgctgccgtgagtacacacctcgtgagatcgcccaagcgaaggccgataaggaagcccgagccgctgccattcgtgagcatggtgcccgtatccgtgccgcctcccgtgccaatagcgctggctggtaa

SEQ ID NO: 356285 - DNA, 291 bp, Pseudomonas aeruginosa
atgaaattccactttgtacttgacggcatcccacaaggacgccaagagaccctgttgtctattgaggcagctatgcccactggtcgccatcgcctcgctgtcttcaatctcaagaacatcggtctacggaccagtaaaggatatgagagctgccttgagtatgtgtcgggcaagctgggagcgttcctcatgggtccccttgaagaaaccctaacggctaccggtctcgacctgctccgtttctaccatgtcatttgtggcgtgcctgtggtcctcacagcccgtcattga

SEQ ID NO: 356286 - DNA, 510 bp, Pseudomonas aeruginosa
atgtccagctacaccgcgatgccatccctcgaatcccttcaagaaatctacaagatcgacccggcgagtccctcgggtctctcccgcatcaaggccacccgtggtcgaaacggtcgagtcggcccagtcgtgagcatgggcagcgacggctactatcgaatgaagtttgacggccagttctaccggacccatcgagtcatcttctttatgcacaccggcatcgaccctgccgagcttgttgtcgatcacattgacggcaacaagttgaataacaaggttgagaacctgcgcacctgtacccagcaggagaacctttggaactccaagtgccgtaagaaagccgatggacttcccaagggtatcttccagcagggaagtcaattcggcgtcaggctttctattggagacgacaagcccggcgtggtctggtttgcaaatgtccgagcggctaccagatatgtagatcagattcgcaagcgctaccacggcgaatatgcacgcaacgcttaa

SEQ ID NO: 356287 - DNA, 198 bp, Pseudomonas aeruginosa
atgctgctccgtggtcacgctccccagtctgagccgttccgcaagtgggtcaccgaggaagtcctcccgagcatccgcaagaccggtcgctatgacgcctccgagtccaccgacccaatcgctgcgggcatcatggacgaactgaagctgctccgtggtgaactggtggaactgaagggcacaatatgtagtatctga

SEQ ID NO: 356288 - DNA, 753 bp, Pseudomonas aeruginosa
atgcatcagattatccacggcaataccgaaaccgtcgttccgaaaaatgcgaaccacgacttcgtggcacgcaaaatgagcaccctcaagctgcgcgatctcatcaatgatgcccgcgcggatgctggggagcccagggtcaggaatgatcagtttcttgctcgtgtcgaagacgagttgggtgatgaacttgagggggtgcaaaaatattacacccccttccatggcaaccaggtcgccgcctacgacctgactcttgaccagtgcgtgctggtagggatgcgcgaatctaagtcggttcgccgaacggtattggccaaactgaagtccttcgaggcccctcgtgttattgccacgctcccagacttcaccaacccagtagtggcagcccgcgcttgggcggatgaggtggagcagaaacaggtggcccagcaagcactggcgattgctgcgcccaaagcagagtttgtcgacaagtatgtcgaatccaccgggctcaagggctttcgccaaaccgccaagctgctgagggccaatgaggcccgattccgtgagttcttgctcgacaagaagatcatgtatcgcatgggcggcgagtggcaggcataccagaaccatatcgacgctggacgcttcgccgtcaagaccggcacaagcgacagcggtcacgccttcaatcaagccaaatttacccctaagggcgtcacctgggtggccggcttgtgggcgcagcacaacctggaggtccaatga

SEQ ID NO: 356289 - DNA, 810 bp, Pseudomonas aeruginosa
atgatggcacgttcaagaaacatcaagccagggttcttttcgaacgagcatctggtggagctggactttgcaactcgcctcctgttcatcggcctttggaccgaggctgaccgggagggtcgcctcgaagatcgcccgcgccgactgaaaatggccttgttcccggctgacaatgtcgacatggaccgaatgctcgatgaccttgatcacttggggttcatcaagcgctacaccgtgggcgacgtgaaggccattcagatcatcaactggtcgaaacaccagaatccgcacgtcaaggaagccaagagcatcatccctgaaatgcccgaggtagacgcatgccagggaaagaatgaggaaagcaccgtgcaagcaccggactcgcacagttctttccctgctgattccctctctcttgattccggattcctgattcctgattccctcaacccgtcgcaagctccggttgaccgcgcagagatgttctcgcggttctggaagctgtatccgcgaaaggtcgggaaggacaaggccgagaaggcgtgggcgaagctgaagctcactgccgacctgtttgacacgatcgtcagcgccctggccaagcaccggcagttgcccagttggaccaaggacaacgggcagttcatcccgcatgcatcgacgtggctcaacgggaagcgctgggaggatgagattgaccttccgcgcggcaatgtccaccacctaccaagcagccgccaccacgggtttgctgatcgcgactacaccgcaggcttgatcgagcgggaggacggcacctatggcttctaa

SEQ ID NO: 356290 - DNA, 1278 bp, Pseudomonas aeruginosa
atggttaccctcgctactcctccgtctactatcgacggcatcaagcgcttggcaaaggccatcaagcgcgaatcttttatcactcaccacgctgctctcgaagaggccgcccgcaaggcaggcttccagaacttccttcacgctacacgtgcgatcgccaaaggctctgatcaaagctataccgcctacgtgactgtgtactggaatgacctcagatctgaggctccatcttccggacggtacaccgtggaggttcagctcacgcgtcccctttccgagttacttgctgacggcctcaaggttggcggtgcgtatctgcgtaatttcaggcttgaagcgccagatcacatcgaaatgcgaactgatgcagccagctcgctcagtgcgatgcaatatttggatcaagccagctttaccctgctctttattaactcaaccgggttggtgagagttttccggaaagagaacattgaggtgatgaatggccttgaacggatcccctttgcagatcacatgaccggctgggaggatccacaaagtggcgactggttgctgctggacgagccctacatctcgcctaagacggggttcaggaaggagtggctgctggagaataaactgcatcaggtggccccactatggccgggagtttactacccgggtaatgctgtcccatacctgatttctcctagtcaagagctactcgcgaaagtacaggcacaggtcgagggaattccggacagctcctttcccatgggcattcctcaagcgatggcgtacgactcctgctttattagccctgcccgcaacgccttaggcaagccacggaggtcgcgcacgcagccaagcagcggtgtcaggaatggggctttagcgtacggtggggccccgggagttcgctccaagtggcgccctgcacggagcatgccacttgagttgcacactactattggtcccatcctacataagctatgcaacagttctgtccggactgccggcataactgctagggtttacgatcgattggaccaggtgcgatctctccttgagaactgggcgttcatggaacatcctggcagcatctcggctgaggtcgagtctaagctctactatggcccacgtgttgcggggtacacctgcccacaagacactctcaaggccattgagactgtccgggacgtactcttgaaagggtatggggagtgcaagccaagggcacagatgcttgcgaagattgaggccgccgccgcggaccttcagaaaaaggtaaaccgttag

SEQ ID NO: 356291 - DNA, 297 bp, Pseudomonas aeruginosa
atgaaggaaaagcagaccgacggaaagcttgtcgtagcgcaaatacacctcaaatccgacctgtcatttgcttgcgatatcagcgtggatggccagcagattttcaccgccactggcatctggcagcgccagggtaacgagatgcactggacctacgcatatagcacgccggaactgccgcagtccgcgcgggaggacgtcgacgagatcatgactgtcgggcaggaccagatcgtactcaagtcgagcctcaccggtaaacaaagaactatgactcggctccccgataatgggtga

SEQ ID NO: 356292 - DNA, 543 bp, Pseudomonas aeruginosa
atgagcaaggatgtgacagatgccattcggaaggcgaagccagggattgcaaagtacctagcgctgatggaccggtacggcaaggtgaacgtcacctcagatacagacttccaacgtgcgtacaacggcttctacaagatgcgtcagcggaagccgctttattaccaggcctactatcagcttatggagcagttgcgggggaccacgccgagcttcgacaccgtgattgatgcgcttcacgccgcgaccggccgttttgaaccttcattctccagcaagatggttgcgaccattgatcctcacaagcctgtttgggacatgtatgtgttacaaaacctcggtttgaaggcatcgaccggaaacggaaaaacaaagctcgacgatttgaaaaagtgctatctcgctatcgaaggctggtaccaacatttcctcggaacaagcgaagctcacaactggatccaacagttcgatagcctggtggcagagcatgcaaactttactcagttaaagaagatcgacctgatcctctggcaaacccgttaa

SEQ ID NO: 356293 - DNA, 186 bp, Pseudomonas aeruginosa
ttgccggcgcggctggacgtcgagctggccagcatctatctgcaatcgctctgggacggcatctgcggcaccctggcctggaccgagcgcctgcgcgacgatccctggaaccgcgccgaacgcatgttccgcgccggcctcgacagcctgcgcagttctccctacctgttgctggcggacgcctga

SEQ ID NO: 356294 - DNA, 780 bp, Pseudomonas aeruginosa
atggctatggtgatcgaagccgcatatgcagacggcactggtgtagccaatgcactgcgtatgtctcaggtgcagtggcacgagttgcaacggaattaccgcgttggtgatctgcagatgccttgctgcagcgctccagcggtccccaaggtcagtgctaatggctacccattcttcgcacatctaggaggtgcgtgcactacttccgaagaaagccaatggcatctggcggccaagatacttgtgcgcagcgtgctcgaagacttgggttgccgcgcttcggttgaaatgccgggttcgggtgacgcaggccgctggcaggctgacgtttggggtgagcgcaatggtgttaggttggccgtcgagatccaaaggtcgtatcagtcgctccgcgactaccgtaaacgccaagggcggtacagcgacgagggcgtcaagtcgctttggttgttggggcaggagcgatacagcactctcgcaaagagcatgggcaaggagcgcttgcgcaccgaatttgggggtaagttcccgccaggcggacacttcggcccgtgccttcctgatctacccgtcgcgatgcttgagctagagccagtgcccacgatcaaaggtgccggattctttactgcgacccttccagacctgcttgaggcagtgctaagcaatcgctttctctgcattgacggtctttggtgtattaataacctggactcgatgagtagcgccgccaaacgctcacacgagctcgccgcagccaagcgcgtggcggcaaacacgtag

SEQ ID NO: 356295 - DNA, 591 bp, Pseudomonas aeruginosa
atggcagcgccaaccctgacggcgccgctgcgcgcactggtggtcgctgctggcctgtacgtcagcaccgtctatgcccaggaggttccgccgccggcctaccagcttgccgcccagcgcgcgggcatcccttcgacggtgctctacgccgtggccctgcaagagagcggtatccgacgcaacgggcgcatcgtcccgtggccttggtccctcaacgtcgccggccagtcgcgccgctacacgacccgagccgacgcctgcgcgggtttgcagcgggcgatgcgctcgacgcctcatacgcgcatcgacgcgggccttgggcagatcaacctcggctaccaccagcagcgctacagcaccgcgtgcgacctgcttgacccgtaccgcaacctcgccatcgccgccgagattctgaaagaacagcacacccccggtgaggactggctggtggcggtcggccgttaccaccgccccgcgggtggtgagccggccgcccgctaccggcgcagcgtatcccgccacctcgcccgcgtgcagggtgcgcgctcaaccactgcggcgtccgccgcgcgccaggagacctccccatga

SEQ ID NO: 356296 - DNA, 384 bp, Pseudomonas aeruginosa
atggtggcttcaacctggctgcgcgccgcgcatcgcggcgtgcccacttttctcgtgacggccctcctgatgggtcagtccccgatggcggtggccgagtccccggcacagcgccaggaactggccggcgcgctgcgccagctcgacgcgctggagcgcaccgtgaccgacagcgccgcgcacaccgccgtcattccgggcgagcgctaccacttcgactacccgcggctgctggccgacctggcccgcgtgcgcgctggcatccaggcccatctcacaccgtcgcgcgcccagccgcgcgacccctccgaactggccggcgactatcgcaccgagcggccggctgagccgctgccggctacgactgcggagggcaagccatga

SEQ ID NO: 356297 - DNA, 918 bp, Pseudomonas aeruginosa
atgaagtccagaatcggcccaaacggggtgcatcttttcgatcgacattcaggtctgaatgtcctgctagacgagttgcgcccggaagaggcggtttggtcgacgtccccccgccaggtatccattgcactcaccaatgtttgcgaccttcactgcgcgtactgctacgcgccgaagcacaaggcgtcgctgcatactgaccaggtgctcggctggttgaaggaactggatactgaggggtgcctcggcatcggatttggcggcggcgaacccacgctgcatcctgacttcgtcgacatatgcaaacgggttgcgggagagactcagctcgcggtcacattcacgactcatggtcatcgcctgacgccacagctggtcgagcgcctcaagggctcgatccacttcgcacgcattagcgttgacggggtaggtcgcacctatgaagaacagcgcgggaagcagtttgccagcctgctccgaggcatggagtcgattgcgaccctgtccccctttggaatcaacgtcgtggtcaacgagcgcacggttgcagaacttgacgcgatgagcgagcttgcacaagaggttggagctagcgaattgctgttgcttcctcagcaagcaaccaccgcggtcgcaagcatggatgaagtggtcggccgagcacttcaggactgggtctccaactacagaggcaaggttcgccttgcggtcagtgaggcgggtgcgtcaggactgcctacgtgcgacccgctccccgatgagcgaggccttcaggcgtatgcgcacattgacgcgtccggcgtgcttcgcgcgagttcttactcgcccgtcggcgcgaagattggagacgccggcgttctgtcggcgctcaagcgaataagaaataccttcgagatccaacgagagacgcaatcatga

SEQ ID NO: 356298 - DNA, 408 bp, Pseudomonas aeruginosa
atgaagatttggaacggattcgggtctgagcattcgatgaacctggttctcatcgggaggttcaagcgagcacaagacgcagagaaggtcgagaaagacattgacaggctcagcgctcaggcttcgaaagatgacagccactccatctcttttggtgatccagaggatcagagattttcagatgacatgctctcgttgctgcgcagcctgaacctcaacaccttagggccagctgaacttggacagctggtatctgaccatcacctcaagcgtgaaggcgatcgaatcactgtcacgactgacgaggctgaggtgtccgcgttcgtgaagctctttatcgaggctggggcgaaggtcgaagtcttctcggcgcacgactacccgtccgatgccgacgaagccagctga

SEQ ID NO: 356299 - DNA, 4035 bp, Pseudomonas aeruginosa
atgcctgaagcaaattgggatgtattcagcgagctgcccggagcagcggatgagaacttcgagaagctttgccgctccctggtgcgccgccactacgggcgcttcggtcgcttcaagcaactcgcaaaccagcctggcgtagagttccacctccagctgacggagtcttgtgatctcggatcgccgccacgctggattggttggcaatgcaaatggtatgaactggcgaacggacaagacttgggagccacgcgccgcaacaagatcatcgagggcatggagaagacgcgcaagcatgtcccaggtgtgaccgattggaagctttggacacaccacacgctgacaaagggagaccaagagtggttcttcgcacttgagaaagaccgcttccccgagttgaagttggagctgctgacggcaacggacatcgaagacctcttggttgggccgggagcgctacttcgcgaaacctacttcggtgagctcgttctgacgcctgcgctacttgctgagcagtacaggctcgctgcagctccgttcaagagccgataccaaccggacgttcatgttgtcgttggagcagaggagaaggtactcaggcgtctgggcggccagagcgcgtgggcatcactgaagaagctctcaagtgccatcaagaggaattgcacggacattgcttcgctgacggggcaactcaaaactgaaatcaaggccgaagtcgaatcgctcttggctcgagccaccggattggctgacctgcttgatagcctgcacgcggcgctcggcaagggcgacttcgacgctgtacagcaaatgctggcgtcgaatccgtcgcagccggtgcgctacgacaggctgctctcgaagctgcgtggggcgcattcagacggagcgccgttagccgcgaatctggttgcagacatccacgcagtttcgtcggcactgcgcagtctggagcggtcgatcggcgttcgagccgtggccgtgcttgcggctgcgggcgaaggaaaatctgagcttgccgtcaaggtgacgcaagcggacggagaattccccggtggtgttttgctacttggcaaaaatcttcatgcaggccaggggcttgacgatctcgtgtctgccttcaagatttctggcacgccggcggagagcttcgaccggctggttgaggccgtagatgcagcaggtcagcgcgcgggcaagcgtatccccattgtcattgacggtctgaatgaggcggaggacccgaggaattggagagatgagctatcccgggcggatgagcttctgaaggactttccgtacgtcctgctggttgtcactctgcgcaatgagttcgcgcagatgtgcctgccggaggaatttcctcaagttgagcacaacgggttccaggaagacccgcagacggccatcgacaagtactttgagtactacaagatcgacgccaccgacgcggatctgccaatcgagttcttacagcacccgttgacgctgagaatcttctgcgaggtggcaaacccacgtcgccagcacattgtcggggtggaggcgctgcccagttcgcttgcaagcctgttcgaagagcacttcaacaaggttgccgcacgagtcgctgatctttcaccgacagcgcatcgcatctatcaagaggaagtccaagatgcgctgctgacgatcgcgagtctcctctgggagggcaacgcgagaagcgtggagttcaaagctgctcggacggcagttcacgacgtgggccgttgggatctcagcgtcattcgcgcgctggagtccgaaggcgtcctcattcgaacgacttctgaagaaggcggtcaaggagtcgcattttcatacgacctgatggctggacatatgatggcgcgccacctgctcgcgaggccggccttggggcagtggctgcaaaacgatgaaggacgcgcgcagttccaattccgtgagcctggttcgcataccttcgcctatgacgtgttccaggctctggttggcctgtatccgcaacgccctggcaggcgccagctttggcaagacttgttggacgagaacctcgtcatgaacgctctgttgttgacggcgcaatcagacccaaggcacattgggcgggaaacggtggaacggttcgcgcgcgcaatgcaggagtcgaagccgttcgcacggcttgcctttaagagacttcggagtaccagggcagcgcgagcgcatccgtttgacatggacttcttgcacggcgtgctcttggccatgcccaatacgcagcgcgatctattctggtctgagtgggttcgcgagaggtctgaggaagttgaagacgatttcaagttcctgtcgtccagatggaaatcgggtgacctagacgagcgagagattcggcgggcgcgctgggtgatgtggacgctgacgtcaacgtccagaagcctgcgcgacgtggccaccaagactctgtacgaattcgcagccaagcggcccggggagtttttccggctggcagtggagtcaattgccgtttcagacccatacgtccccgagcggatgttcgccgcagcctacggtgtggcgctgaccacttggtcggatatcaatgctgtggagatgcgtgaggcactgcctagagtcgctcgtgagatttatcaagcgatgttcgcacctggcgcgacgcatcctacttggcatgccctatatcagcagtactgtctgggaaccattaccatcgcaaggatggttgatccggcttgcatgtctgaggacgaggcagctcacctccttccaccgtttagccatctgcccagtccgtttgagaacatgccgcaatacaacccagcggtgatcgaacgtgcgaagcatgcggcgattcgaatggacttcggcaactacacgatcgggacactgattccaggtcggtcgaactacgacgaccgcaacccagagtaccagcgggtgctgccggcaatcgtttcgcgaatgctggtgcttggctatgaccccgagcagttcgaagctgttgaccggcaaatgaactcgggccctcgtatgggaggtgacaagcacaaggtcgacagatacgggaagaagtacggctggatcgcttacttcgagatgtggggtgtccggtacgcgcagggcctccttgccgaggagcgcggcgctcgcccctcagacgcggacatcgacccgacgttcccgctcgaggccgcgagcatcgacctgctgctcccagacttgttcagcggtcagcctacgggtactggtgactgggtggtgagaggtccacaaccagactaccgcggaatcctcgagatcgcggagattgatggcctgacggggccgtgggtcgtacttgacgggttcctcgaacagaacgctcccgctgatgaccgacaggtctttaccttcctccgaggtgtactcgtggacagcggagaagtcgaacgcctgtgcacgttgttcactggtctcgaataccccggcaatcacgccattccggaggggccaagctactactacacctatgcgggggagatgcctttctcctcgattccgggactccccgtcgctgatgagcaagagggcgaccacgccgaatacatggtgtccactgataggtggtcaaacaatggcgtcacggtcgacatcccggtgcagcagtacaactgggagagctaccacagcgtggtgaatcagggcagcggtgcgcgcctgccctcaaaacggctctgtgaagccttgagtctcaggtaccgcgccaacgaatgggacttgcacgatgctgcaggcgtggcgtccctgtaccgcgaagtcggcgagtatggctcgcagatgagtggctttttcagctatctgcgtcgtgaccttcttgacagctacttgacgcagtccggcaaggcgctggtgtggctcatgtggggagagcgtggctttcatcaccggtcagccgaggcgcacaacctgcacgagtactacgcgaaccaccagcatattcacaagcgtactcacgtctatcagcctgcttcgagcactcaatcgtag

SEQ ID NO: 356300 - DNA, 639 bp, Pseudomonas aeruginosa
ttggcagagtgtttcgggccgaaacaccaaacgcaccggcggtgccgaggttggttcctggtgaagtggttccagtggaaccacccagctcgccggcggcgccgaggccaggtcctggcggagtgttgccagtggcaacacccaactcgccgccggcgccgaggtcggttcctggctgagtgttgcgggccgcaacactcagctcaccgccggcgccgaggtcgatccttggcagagtgttgccagtggcaacacccagctcgccggcggcgccgaggccaggtcctggcggagtgttgccagtggcaacacccagctcgccggcggcgccgaggtcggttcctggctgagtgttgcgggccgcaacactcagctcaccgccggcgccgaggtcgatccttggcagagtgttgccagtggcaacacccagctcgccggcggcgccgaggccaggtcctggcggagtgttgccagtggcaacacccaactcgccgccggcgccgaggtcggttcctggctgagtgttgcgggccgcaacactcagctcaccgccggcgccgaggtcgatccttggcagagtgttgccagtggcaacacccagcttgccctcggcgccgaggccaggtcctggcggagtga

SEQ ID NO: 356301 - DNA, 894 bp, Pseudomonas aeruginosa
  misc_feature (178)..(178): n is a, c, g, or t
atggaagaaaaaaagccaggaatacttgatagactgacttcaggtgaaagctttgcaattgccgcactcccgtttattgggacctgcgtctcctttgtttttgaatcactgtatttaaagtactatgatgcccctgtttcgctaatccaaatggatataaccagaatagttagcgcanacataattatcggctttctttcaattggtgttgttttcggaatatttactacgattaaagtaatcgtaaaaagtaaaaatccaatacgaagggcactgtttgccccactgttttatatggctttttttgggattgcgatttacatatctccaataccctataaagggtatttattttggggcgcctttgccttttttatgctgtcccagtttgggtggcctgtattcacaggggataaaagcaagagttacctagagcgactcagcaagcagaatgagatagaaagctcttctaatgatgagcccccgaagttgactttgcctcttgtactgtccgcagccttttatgctgtccttcttattggcgggctttctacaaagtatgcggaaggcaaagcatattattttattgatccgtctgatgaggctaggttcttaattgaaatatatggcgatactgcaatatttggaagatatgacccgaaaacaagggaattaaaggaaggggtggagataaggaaagttggtgatgaaactaccaggctggtttataagaatatagggccaatagtaaatgttcgacagcagatggattttttaagttatcttaaactggcgagagagaataaaatgaaagaagctactacagataaattagaagtcagcgcagggaaggcgccttctttatggcctttcagtgtcgaagctaataactaa

SEQ ID NO: 356302 - DNA, 4644 bp, Pseudomonas aeruginosa
atgcatagcagcaaacgtagcaaagcctttaccgcccatttcgctccgttgccgctggccgtcagcatggcggctgccgggatggtttccggattcttcagtccacaggcacaggccctgtgtacgacagtcggctccactatttcctgtactggcatcaccgtaggcctggtcacctcgaccagcggcctgacggtcaacgtgcagaacggggcgcagatatatcccggcgttattgacacagtcaacgcggtgtcgctcaccggtaccggcatcaccgtgaacaacgccggacgtatcgaccctttgcttctgccgggcctggtttccctggcttccgggcttaatctcagcaatgccgcgggcagcacggtgctggtaaacaacctttccaccggccagatcatgggcacttccagcctgctctcggcgaacctgctggggctgggtgggattggcctggtagtgcagaacggcgcgggcggtaccaccacggtgaataacaccggactgatcagcggcactgcgctgcttggcgccgctgtactgccggaagacatgcccgtgatcgcactgcgtggcggtgctagaaacgtgctgaccaacaatgcgtccggcatgatcaccggccgcgtggcgatgcaggcttcggccgcaggcaacaccttcaccaacgccggtacggtcaccggcagtatcaacctgggtgccggcgccggcgccaataccttcaacgccgtcaccggctcagtgatgaacgctggggcgggtgtcggaatcgatcttggtgtgctcggcggcctaggtctcgcctacgcgccggcgggcatcgtcaatggcggtacttcaaacaatggcaacaccctcaatctgcagaacgccatcggcggaggctctggagcgagtggcgcgggcaccattgatggcagcaaatacatcaatttcagtaaactgaacgtcaccagcggtacctggtcattgaccaaccagctctttgcgggcgggacgaccaacgctacggtcgcgctcaacggtggtctgctcaatgtggacagctcagctcttaccggagctagcattactgccaacggcggcggcctcggtgctgcagtggcgggtacaacggtgagcaacggcatctccctcggtgccaacggcctgctggtcagcaacggcgccaatggcctgaccctgtccggcgtgctcaccggtgccggcgccctgaccaagaccggcaccggcaacctaaccctcagcggcgccaatgacttcagcggcggtaccaccctggccgccggcacgctgaccctcggcaatgccgcggcgcttggaacccaaggcctgaacgtgaccggcgccagcaccttggcgaactcgagcgcgttgtccgtgaacaatgccatcttgctcaacggcgctaacctgacggtgaacagcggtgctgccctggcctttggcggggcggtcaacggcaccggctcgctgaccaagaccggcgccgccgacctgaccctgagcggcgccaacaacttcggtggcggcctcaacatcaacgccggcaagctgatccttgcccatgccggggccaccggcggcggtaccatcactgccggcgtcggcggcacggcggcgctggacaccagcaccgtccagaccctgaccaacctgatccagctcaacggcaacctgaccctgaccggcagcaacgacctgaccctggtgggcaagatttccggtaccggcggactgagcaaggccgggaccaataccctgaccctgagcggtgccaacgatttcaccggcaactcgacgctgggtggcggcaccctgatcctgcagaataataccggcctcggtaacagccagctgactctgagcgccaactcgactcttgatgcaagtggactttcgctaggcaacaacatcgacttgggcacccgtaacctgaccctgaccaacggcaccgctacctccctcggcggcgcccttagtggcacgggttcgctgatcaagagcggtgctggcgaccttaccctggcaggtcccaacgccagctacaacggcgatgttctactgaccaatggcaccctggtcattgccaacgatgccgccatcggcaacggcagcctgcgcacttcggccaacaccaaactggacagcgacgccgcgcgcaccattagcaacgccgtcagcctgcttggcaacctgaacctggccgggagccacgacctggctttgaacggcgacgtttccggtaccaatggcagcctgaccaagaacggcgccgcaaacctggtcctcaatggcattaacacctacaccgggggcacccaggtgacgtccggcaccttgctggtcggggatagcagccatgcatcggcccgcatcgcaggtccggtttcggtttcccgcggcgcttcgctggggggcttcggcaccgtggctggcaacgtcgatgtggcctctggcggtcatctcgcttcgggcgctccggtcggggtgttcaccatcgacggtgacctgaccctgcgccagggcagccaggccgacttcagcctgggcgcctcgaacggattttccacgccaggggccagccatagcgtttcggtctccggtaacctgaatctactgggggcccagctcaacctgttcgacgcgggcggctacggccctggcctttatcggctgttcgattggggcggtgctctgaccatgagcaacggaggcctggttccaccggcggggtcgtccctgcagatcttgaccgccaacaagcagatcaacctgatcaatgcgaccaaccagtcgctcaacttctggaacgccgacggacttgcgagtgcctcgcagatgggcggcggctcaggtgtctggtcgcaggccggcgcaaactggacggatgctacaggcagcgtcaccgcgtggcgcaaccccaatgatgcgttttccatctttggcggcgcggccggcacggtgaccgtcgatagcagcgctggcgccatcgaggctcagggcatccagttcgccagcgacggctatcacctggtcggcgacggcctggcgctgatcagcaccataccgagtgctctgggagaggtgcgcgtaggcgacggtagccaagcggcgagcgcttggacagcttatgtcgacaactcactggcgggtgccggtatcgacaagaccggcatgggcaccctggtcctccgcggctctaacacctacacgcagagcacacgcctgagcctgggtaccctgtctgtttccagcgacgccaacctcggcgcgtcctcagccaaccttaacttcgagggcggcaccttgcgcgtcaccggcaccagtttccagagcacagcgcgcagcgtggtgttcggttccgccggtggcggcgtcgatattgccgacgccagcaacaccttcaccctcggccaggcactctccggcagcggcgcactgaccaagctcggtgacggcacactggtattgagcggcaacaacagctacagcggcggcacgctgatcagcgcgggcacgctcaccggctcggccggcagcttcggcagcggcgcgatcgtcgacaatgcagcgctggtgctgcaccaaaccactgatgccacgctgaccaatgccatttccggcagcggctcgctgaccaagaccggtgccggcaacctgaccctgggcagcaacagctacagcggcggcacactgatcagcgcaggcacgctcaccggctcggccgacagcttcggcagcggtgccatcaccaacaacgcacgcctgattctcgatcaggacagcaccgccagcttcgccaacgtcatgtccggcggcggcagcctggtcaagcgcgggaccggcgccctggaactggaaggcgactccagcgtcggcggcggtacccaggtgcaaggagggcgactggtcgttggcggcagcgcgggttcgagcgcgcgcttgaccagtaacgtggacgtcgccagcggcgctacgctcggtggccacggcgtcatcgacggcaatgtcacccttgtcagcggtgcgaaactggcgccgggcaattccatcggcaccctgaccgtggatggcgacgtgaccctgggtgccggctcgatcctggaagtcgaaagcgcgccggatggcagctcggaccggctcatctccaccggcgccgtcaatctgaatggcgccaatctcaacgtactcgccggtacggggaattgggcgcccggcaccttctacggcatcatccaggccgcgtcgctcaccggcagcttcgccgctgtcagcagcaatctggcgttcctcaccccggagctggcttacagcgccaccggcgtggagctgaccctggagcgcaacgacgtcagcttcatctcggcgggccgcacctacaaccagcgctcagccgccgccggcgtcgaatcgctcgcaacgggcacgctgtacaacgccatcagcttgctcaccgccgagcaggctcaagctgcctacgacaatctctccggcgaactgcatgccagcacccaggggcgctgttcgacgacagtcgctatgtacgcgatgccattggtcagcgcctgcgtgcggccaaggggcaggcctccacggacgccatcctgcacactgatgccgacagtggcatga

SEQ ID NO: 356303 - DNA, 822 bp, Pseudomonas aeruginosa
atgaccttctggttgcagggctatggcggctggggcgacagcagcggcaacagcaatactgcgcgcctggatcacgacagccgcggcaccctgctgggcatcgacctgccggtgggcgacaactggcgcgttggcgtcgcggcgggctatggcaccagcaagctcgacgtcgacgcgcgcagctcctcggccgagatcgacagcacctcgctgaccctgttcgcctccggccaatgggaggccctgaacctgcgcgtcggcgcctcgcacgcctggaacgacatcgacagcagtcgccacgtgcgggtcggtagcctcgccgagcacgacaaggccagctacgacgccaacaccacgcaagtcttcggcgaactgggctacgccatcgccgccggcgacttcaccctggaacccttcgccggtctggcacacgtcaaggtcgacagcgacagctttaaggaacacggtggcagcaccgcgctgcgtggcaacagcgagcaggacgaggtgacctacggcacccttggcctgcacgcctccacggcgctgaccgcagtgggctcggtgccgctcgccctgcaaggcacgctaggctggcaacatgcgttcgacgatctcgatccgaagcgccagctgtcgttcgccggcggcgacgcgttcactgtcaagggcacgccactggcacaggacaccgcgctggcacagtttggcgtcaccgcgcaggttgccagcggcaccacggtggacctgggttattccgggcagttcggcgatggccacaaggacaacgggattcgcctggggctaaacgtgagcttctga

SEQ ID NO: 356304 - DNA, 795 bp, Pseudomonas aeruginosa
atgaactccggaatagaattagaaaagcatgtccagcaggtatattcctttcttctcaatatgaaagacgaaggtatcgtagttggtcaagatgttcaaattgttgataaatttggccgctctcaccaagtggatgtttactatcaatttgagaaggcagggattactcacaaggtcgcaattgaatgcaaagatcacgggcgaccagttgataatgggcatgtggcaaaattttttggaaaacttgctaacgctggaaacatccaaaaagtgatggtctctaggcttgggtatcagaagctcgcttacgaaattgccgaagacaacgatgttatgcttctcactgttgacgacttaccgagatttaacgagttgctggcagaaaggcttaaagctgtggcgctacccgatgaaagtacagtcggggagccgttctggaccatcatggaaaaaagagatggtcgagttacaggtagtttctttgcttatccgcacccaacaactaatcggcctgaaatgctgcttttttactccaaagaccatgctgaacgggcttttaaagaagcgcaacttagcgctaatcaatggtgcgttagaggcatgcctcaatatgttttccgggctttcctattgcaattagagctcttcgaaatgagaggtttcggtgcggctgtgttatttgcgcctccaggcgcacttaaagacaagccatttataaccctcccagcttccagagaagatctaattgcggagtactacaagggtaaactacccagtatcaaaaatcgcatttaa

SEQ ID NO: 356305 - DNA, 735 bp, Pseudomonas aeruginosa
atggaagaatgtccaaatagaaaagtattcgacttgctatcatcatcatttgaccgaattgacgaggctgcttggttcattcgactaatggaggagaactaccactccgccgacaagttcagatggtctttaaactcattcctgagaaccctgaaggaaatcatgcagctggtttcaatggaggttcaaggaagtaaagaactgagcaagcttgtagctgcaaaaaaatcagaattatcaagcgacccattaatcgcatttctgtacaagcaacgagacatcgttgttcacaaagaaatgctaaagccagcaagtcgaggaagtgttggatttactcgagggagaggtatgaagctagggctagacctaccgattgaccctttgagtgatagtagagaagcaataaagaaatatatttattttgtggcaaaagacactgacttcatgggtattctttacactgaagaagacggtggaggcgagtacacctgcgttcaaaggcaatggaggctgtctcagtttccagaaccagaaatcacagagctggcggcatcggcgtgggagaaagtggctcaggcttttttcgatgtggccggagagatgggtgctaaacttataaagccaacatttaaattgggcaaccctaaccaagtccagttcgagatatacaagcccgaatgggtaaaggaacagctagagcacttcaagaagctgatcgcgaagaatggagcttaa

SEQ ID NO: 356306 - DNA, 324 bp, Pseudomonas aeruginosa
atgatctgtcccgtctgtcgatctgcaaaggtcgttacacgtaatcttggcatgagaataggcagtctcatcggagccattggcggcgccagcagtggcctttccggggccctggccggaggtgaggcgggcgccagctttggatccctcggcggaccacccggtatggcgctgagctgcgttgccggggcagtcctgggcgcgctagccgggggcgtcgccggctgcgttgccggagccaccctcggcaaacaggtggatgagcacgtgttgcacaaccatcgctgtctgaactgcaagtacaacttcagcctctcctactaa

SEQ ID NO: 356307 - DNA, 3594 bp, Pseudomonas aeruginosa
atgcaaggcaagcagcaagacatggaggttttggatggttggcgtgcgttcgttgaagcggccgggatagccaagagccgaatcaaggaagccgatgtccatgagcatcagcagatcaagctcaacaggagaagcctccaggaggacgaccaggggttctgcttttctctatctggcgctcaagcgtctaccctgaagggccgtttcaccaagccggatgcgcagggtggagtgcaatccgacccgctacagctcggctttccgttgctgcgtgtcaccgaaggctcgaaagcatttttcattccgctctttcgctattcgttgcctgatacctggcatagcgaggagtcgccgctattcaccgtaccggttaagcaaggctccgaagtcgcgccgaacattgaggctttccgcctgtacctggatattgatgttcaggagctgggggccgagcggcacatgatgagtatcgctgccgcctgcatggaggatacgcaggagagttttggagagcttttcggtgcatttctgcgttggatcaaacagcgtttggacgatttgggcgagagctcagccaaaagcgcggctgcttccctagagctggctttcaccgcgatcatctgtccggaagcgaattctgacttcaacactagggagcagttgaaggattacgatgtgctcctgcagcgttctaacctgcagaaattgcctttacttcggcagtacatcgagcaccgctctgccggaacaacttcaacgtctttctcgcctttgcgtcctccctatggcctgttcgagcgccagtatcccttggggcgtggacagatgatggcgcttgctcaagtttcgagtggagcgtcgttgttggctgtacagggggctccgggtacgggcaaaacaaccctgttcaagtcactcattgccagtcagatcgtggagcgggcattggcatgcatcggtggcaatgatcgtaatctggggttggtggtgacctctaccgccaagaaggccgtagaaaacgtcatcgatgatcttcgcggcgatgattatctggaggacatcaactggctgtatttccaaggcggagacagtggccaggtggcgaatgagctccaacgtgtaagtgcgttgctacggcagcttgatactgaactctacgatcaggacaagcagaaaattttggcaaagaggattaccgagaaccagcgcttgattgatgtctgtctgaatcgattcgatgcgcttaaaaaacagctcgacgtggcgacggcgcccttgaagggggtgtcgctcgaagactatgaggcgcagttaagactgctcggaagcgatgtatctcgaaggtgctcggagttgggtttctccgtcgagcgaggggcagacattgctcagcaatgtgccgatgctcttgccagtctcgaagccaaaagggttgagcatgcacgcgccagtaggtggctgtctggcggctatggcaaattggttggtgctcctttccctctggaaaattaccgtgactggctaagcagttcattgagcgaaaaccttcagcaccattttgctgagcacccaacgagtggactgcggctgctactggccaggtgcttcggtggcaagtaccaagcggcccgggatcatctacacaaggcctactctgaagatttctcgaattatggcctgagcggcctcgatcagacgcagttggcgaagcttgcgcgtaaccgcaaggaactactcgcaaccgttgacagtggtcagctattgacggctgcggcgtggcaagagaccgatgcagagaaagagagaacttgggctttaaagcagctttcagctgccgtatctgaactttcatctcgcatcggtgatttacagcgatataaaggggcgaaacgtgccctgcaagacgagtttcctgagggcgattggttcgaagtgctgcgtatgcgcttcatcgcggaacagcgcttaatgttcgagtgcgcgattgcctacctctggcaggagctgctgcgacagaaggcttcagtgcgtcaggtgctgtcgctttggagcagcatgctcagtggcaagcaagacagtgggtactaccggtggaaggacaagctggaggagttctatcgctttattaccctggcctacccagtgatggcatcgaccttggcgtcggcgcataaattagccggctacaagctctctgatttgaatggggtcacgccgtaccaactgagccttgtggatgaagcgggtatgatttcggtggaatcgctggttccgctgctggcccgcagtcaaagggcgattgttgtcggtgaccccttgcagatcgagcccatacgctcgttggataaggtggcggcagaaaagctgagggcccggtacttcgaaaacaacactctctatgaagcggtctcgccaatgctagtcacggcctatcaccgggcggctggtaccttgaccggcagtgtcgccgatattggtaatggcatagtgctagacgagcacagacgttgtcagtcaccaatcgccgcgctgtttatgagcattgccgagtacagtggggtgcaggtgcgtaccgcgacagctgaccccagagttcaggctgcctgtgccaacatgggtggcttcaacctgatgttctacggggttcaagggcgtagaggtcttatgcccaataccaaccaagatgaagtggatgccattggtttgttgttggacaaacttgaggcggccgggtacgacctgacccgagatgttgggatcatcacgccgtactccaaccagaagaatctgctcatcaaggcctatggtgaacgcctcaagcaccggcagtcactcaagatcggttcggtgcatcagtttcagggcgttgggtttgaggtgatcatatactcgcctgtgatcttccaacgcaccgaccgggatgccttccagaacagcaagcccaatcttctgaacgttgcggtgtcacgcgccaagcaacagtttattgtggtcggcaaccagcagcgcctactggcagcaggtaagtcactggcccgaatggctgagatatgtgcagagtcgttcgttgtcaacatggagcatcagagcccttccttcgagaacgccagtgcctgcggtgtgaagcactattttgactgcgatcacatcgcggcgttcgaatcgctcgcttcctcaagccagcattcatttacggtcgttgtcccctggattcgtcaagggtctagttccaatcatcctccattgaagatacttcgcgcagcccaggagcgtggtgttgcggtgaccgtttattacggtcacgactgggctcacaaggcagatgccgatgatggggatccgggccttatcctggcttatcgccgtcagttgggggaggagaatgtcattcgtttgccccgaggaactcatgagaaaattcttctggtagacgagcaagtagcaacggtgggaagctggaattggctttcgcacagttactatcgctactgcgccatgcctgattggcagagcttgtcgttacggcgggagactagcgtagagctgcgagatccttctttgattgcgcagttgaaagcacgcattgctcgatag

SEQ ID NO: 356308 - DNA, 2256 bp, Pseudomonas aeruginosa; identical to SEQ ID NO: 342747

SEQ ID NO: 356309 - DNA, 405 bp, Pseudomonas aeruginosa
gtgatccgcccgcaagactgcgagatcctgcagtggcgctcgttcgacgacgaggccgccttcttcgccagcatgggccgcttcttcgccagcgcccgggtgcgccgcgaatgcggcggctacccgctgagcgacggtccctaccaccgctggttcgtgctccgccgccagggggacacgcggatactggggttcgtcagcctggagcaacatcccgacgtggttcgcctgcgcgatgcctacctgcgtgcggaagcgcgcggtcgcgggctgttccgcaaccctgcgcgagcgggtcctcgggcatgtcgaccaactcgggctggcctgtaccacccgcgcgccccaggcctgcgcgcgccttctcgaaccgcacggcttcgccgtgcattccacccggggtag

SEQ ID NO: 356310 - DNA, 498 bp, Pseudomonas aeruginosa
ttggagcgcgccggcgacaacgcggcgaaggtctccctgaagctggaggacggtagccaatacccgctggaaggtcgcctcgaattctccgaggtttccgtcgacgaaggcaccggctcggtcaccatccgcgccgtgttccccaacccgaacaacgagctgctgcccggcatgttcgttcacgcgcagttgcaggaaggcgtcaagcagaaggccatcctcgctccgcagcaaggcgtgacccgcgacctcaagggccaggctaccgcgctggtggtgaacgcgcagaacaaggtcgagctgcgggtgatcaaggccgaccgggtgatcggcgacaaatggctggttaccgaaggcctgaacgccggcgacaagatcattaccgaaggcctgcagttcgtgcagccgggtgtcgaggtgaagaccgtgccggcgaagaatgtcgcgtccgcgcagaaggccgacgccgctccggcgaaaaccgacagcaagggctga

SEQ ID NO: 356311 - DNA, 846 bp, Pseudomonas aeruginosa
atgctgggaagtgaagccattcagattaaagtcacgaaagatactgcgggccaagagcgttttcaactcgttcgcaagaatggtgctgtcgccaagaacctcagtgatggagagcgaacagcaattgcattctcctactttctcaccaagctcaaagaactaacccacgatgattttaaggaagcgattgtctacattgacgaccccatctcaagcctcgacagcaatcacatatttcaaattactgcagcgattaatgaaatgtttttttccaaaatcaaacaacccaatggcagtgaagcctggggcacaacctgcaagcagctgtttatttcaacgcacaactttgaatttttcaatcttatacgcgaactccaccccaccaaagaccaagtagcgagactattcttaatcaagcgagttgatagcgacaactccgaattgatcaatatgcccaactcactctcaaactacaactccgagtaccaattcctatttgactgccttcacaaattccatttttcaaccaacaaaatagaaaatgagaatctaattatacttccaaatgcactgcggcgattcttggagctttacacatactcacgggtccccgggacccatagtgatacagtcgatcagcgcgcaagcgaacttttcgggaaagaacgagccaagtcgatcttaaaattcctgcacacctttagccatggaaactcgattgagcggatcaccggaaataacgagcttatttttctgctagaggagacagtaaaggctgtcttcaacgaacttcaagaaaaagatgagcgccactggaaagctttattatcctcaacacagacctaa

SEQ ID NO: 356312 - DNA, 261 bp, Pseudomonas aeruginosa
atgaggatggtgctgatgttggtggtggtagcgttggcaggatgcgccgcccagatcgagcctgagccgcgccccgtgcgcgtagaagtgccggttgcggtgccgtgccgtgtgccgaccgttgaggtgccggcctgggtggcggatgggctgaagaagggggatgacctacagaccaaggcccgcgcattacttgcggagcgtcgccagcggatcggctacgaggcgcaactcctggctgcgagccgggcctgccagtag

SEQ ID NO: 356313 - DNA, 369 bp, Pseudomonas aeruginosa
gtgatctcggcacgcgttgtctcgatcatgctgggctgtatgctgctgatcggcgtgggagccgccggggggggctggctcagcgcgcgtcattaccagccactgcttgatgccgcgcgcgcggatctgaccgcctgccgttctgctcgtgggagcttggaggccgcagtagcggagcagagcaggcaggtcgccgcactgcgattggccggcgaacagcgcgccagggatgccgtccaggcgatggatcagggacggcagcaggctgccgagcagtatgccgcggcacagcgcctgctgaaccagcacaccgctggtgagcaatgcgcggccgccgaagcggtgatcgaccaggagttggggctatga

SEQ ID NO: 356314 - DNA, 630 bp, Pseudomonas aeruginosa
atgctgattaccgagcagcagctgctgcagatatttccgaacgccggccatcgcgccggcttttttgtgcccgcactgaatgctgccatggggcgcttcggcattacctcgccggtgcgtgtcgccgctttcctcgcccaagttgggcacgagagcgcacacctgacccggttggttgagaacctcaactacagcgcctgtggcctcgcggcgacttggcctagccgctatcgcggagcaggcgggaagcccaatgtgttggcgttgagtctggcccgtcacgccgaggcgatcgccaataacacatatgccaatcgtaacggtaatggcgatgagtccagcggagacggttggcgctttcgcggtcgggggctgttgcaaatcactggtcggagaaactaccgcaccgtcggagacagtctcggcttgccgctggaaatcgaaccggaactgctggagcagcccgagcacgccgccagttcgagcgcctggtggtgggcggcgcatgggctcaatagcctggccgaccgcggcgagtttgttgccatcacccgccggatcaacggcggcatgaacggccaagtggagcgcatggcgttgtgggagcgggcgaagagggtgctgtcgtga

SEQ ID NO: 356315 - DNA, 204 bp, Pseudomonas aeruginosa
atggacgagagatggctgacagtcgatgacatttgcaaatatctgaatgtaagcaatgaaacggtctacaaatggatcgaacaacgggctatgcccggtcatcgcgtcggccgtcgctggatgttcaaacaagacgaagtagacgaatgggtccgctccggcggtgcggctgataaatccgataagccggacaccgagcagtag

SEQ ID NO: 356316 - DNA, 516 bp, Pseudomonas aeruginosa
atggccgaaccgatacacgacaaaataaaacgatccctccaggcagccgaagggctgtatcaccgcctggtactgctggtgggtgagaccggttccggcaagaccggcgttcttcgggaagttgcccaggagttcggggcatccgtcgtcaacgtcaatctggctctttcaggcgaactgcttgagctgacggcaaagcagcggtcgcttcggttgccgagaatcctcgaccagatcgcggaccaggctcagtcacccgtggtgctggataatctcgagatccttttcgacaaggacctcaagcaggaccccttgcggttgctgcaaggcatttcgagaaaccggactgtggtggcttcgtggaacggaatcgtgaattccgggaggcttttgtacgccgaaaccggacatcccgagtaccgcagctatgactcagtcgatgcgctgattgtgggcatggatggcatggccacggtcgacccggcaaaaaagaatagagaggcaggacaagcatga

SEQ ID NO: 356317 - DNA, 3732 bp, Pseudomonas aeruginosa
atgaaatatggagaccttatccagttcgacccgattgagtcggtcgttcagttgcgtgacgcggacaaatcgagcgccgcgcacaccctcgtgaacacctatgtcatttcagatgaaatggccgaacggctcacgcagcttgtcatccctcagatgcagttcgatcagccggtcgataacaagggcctgctggtcgtcggtaactacggcactggtaaatcgcacttgatgtcggtggtctccagtcttgccgcagacgcctcactgatggaaggactgagccacactggtgtccgcgatgcagccgctcagattgccggtcggttcaaagttatccgtaccgagatcggagccaccaccatgtccctgcgcgacattctggtggccgaactggaagagcatctcgaaatactcggtgtgaagtatgtgttccctgaagccgggaccatcaccagccacaaacgggccttcgaagacatgatggccaagttcggcgaggtcttccccgaacacggcctgctgcttgtggtcgacgagctgctcgactacctgcgcacccgaaaagaccaggagctgatcctcgacctcaacttcctccgcgaggtcggcgaggtttgcaaaggcctgcgtttccgcttcattgccggtgtccaggaagccattttcgacagcccgcgtttcgcctttgtcgccgacagcatccgccgagtgaaggaccgcttcgagcagatcctcattgcccgcaacgacgtgaaatttgtcgtggccgagcgtctgctgaagaagaccgccgagcaacaggccaagatccgcgactacttgatgcccttttccaagtactacagcgggctcaacgagcgtatggacgagttcgtccggctcttcccggtgcaccccgactacatcgacaccttcgagcgggtcaccgtggtggaaaaacgcgaggtgcttaagaccctgtcaatgagcatgaaaggcattctcggcaaggatgtgccgcagaacgaacccggcctgatcgccttcgacagctactggaacacactcaagcagaacgcttccttccgcgccattcccgagatccgggcggtcatcgattgcagccaggtgctggaatcccgcatcgagagcgctatcacccgcaagcaatacaagccgatggcgctgcgcctgatccatgcgctgtctgtccaccgcctcaccaccggcgacatctatgcccccatgggcgcatctgccgaagagctgcgtgaccgcctctgcctgttcgatccgctgatcgcggagctgggcagcgatgaacccgacaaagaccttcagacccatgtggaaacggttctgcgcgagatccataaaacggtcagcggccagttcatctccttcaatgctgacaaccgccagttctatctagacctgaagaagaccgacgacttcgacgctctgatcgacaagcgggccgaaagtctgggccaggctcaactcgaccgcttctattacgaggcgctcaagcgggtcatggaatgccaggacgccacttacgtgaccggctacaagatctggcagcacgaactggtctggcaggagcataaggcagcccgcaccggctacctctttttcggcgctcccaacgagcgttccaccgccgtgccgcagcgggacttttacctctatttcattcagcccaacgatccgccgcgcttcaaagacgacaaggtcaacgacgaagtcttcttccgactgaaaggcaccgacgaggaattccagaccacgctgaggagctatgcggctgccctggaccttactgccacctcatcgggtcattccaaggccacctatgaatcgaaagccaacggcttcctgaggaagctggtccagtggctacagaaacacatgagcgatgccttcgaggtcacctatcagggccgtgccaagtccatgaccgagtgggccaagggcaaatccatccgcgacctgtcgggcctggcgccccatgagaccatcaacttccgcgacctggtcaacgccattgccggtgtttgcttggcaccgaacttcgagaaccaggccccggactatccgttcttctcggtcctgatcaccggcaacaaccgctctcaggctgcgcaggatgccctgcgggccatcgccgggcagaaccgcaccaagcaggctacggctgtgctggatgctctggagttgctcgacggcgagaagatcgccccttataggtcgaagtacaccaagttcatcctcgatgccgtcaaggccaaggggcacggccaggtggtcaacagcagcgagatcatccaggatgaccacggacttgaatacatgaatccgggtggctcgcgcctggagccggaatgggtgagcgtgttggtggcggcgctggtctactccggcgacatcgtgctctccatcccgggcaagaaattcgacgccaccgggctacatcaacttgccgcgactagcatggacgagctggtccgcttcaagcacctggagcagcccaaagaatggaatctgcccgcgcttaaaagcctgttcgaattgcttggcatgacgccgggcatggcccagctcgtcacccagggcaaagacgagccggtgcagaacctccaacaggcggtaggtcagatagttaagcgcatcgtcatgacccagcaggccctgcgcgaagggttatccttctgggggctggatctgctcgcgggcaccgacctggcccgccaggccagtgggctggacgaggccaagagcttctttgagtcgttgcaggcctactcctcgccgggcaagctgaaaaatttccgctacagcgcacccgaggtgctggcacacgaaaaggccgtgaaggcgctggatgagctgggcgcgctgcgtgagttcatcatggaccatagcccgacggcgtcctggctctccactgccgaggcagtgttgcctgccaacaatgactgggtggaccgcataaagatctcccggcaggacgtactggataccctcaagcaggccaacctgaccgaactggccagccagtctcaaagcatcggggccaagctgctgaagctgaaaaaggattacaccgtcacttatatcggactgcacaccaaggcccggctgggagtgaacgacgacaagcgcaaggcgggtctgctcaacgaccagcgcctgcaaaccctgctcaagctggccggtatcgacctgatgccccggcagcagctcactgactaccagaaccgcctggccgggttgaagagctgcttcgctctgaccgaacaaaacctcagcgcctcgcccatctgcccgcactgtgggttccggccttcggtggaaaccagtacagcggtagggccacagatgatcgatcagatggacacccagctcgacgccatggtggcggcctggacctccaccattctcagcaacctggaggatccgaccacccaggccaatatggacctgctgaagagcgacgaccgcgaaccgctggaggccttcatcaagtcgaagggactgccggtaccgctggatagcaactttgtccacgctctgaaggaggtgctctccggtctggtcaaggtcaccgtcaaggcacaggagctgcaacaggcccttcaggttaccgacggaccggccacgccgacggagatgaagaaacgctttgaggcgtacatcgatcagctaactaagggcaacgatccagcgaaagtgcggattgtggtggaataa

SEQ ID NO: 356318 - DNA, 657 bp, Pseudomonas aeruginosa
  misc_feature (633)..(640): n is a, c, g, or t
atggatattgaaccctctggtgcaatcaaactattttttcccaatccgtcattgaccttggtctattttgaggcgttggctaatgcgctggatgctggtgcaacagaggtgtccatcgatattgatgtgcaggcgtttgacaagccggatacattgaggatcgctgtttcagacaacggtgatgggtttacagatgaaaattttgatcgtttcaagacattgctgaaaccaagggacaagtttcataaaggcattggccgtctggtgtttctcaactattttgatcgtgttgaagtaatcagcgtgcgagataagtggcagagaaaatttatcttcaaaaagggatttgacggcaatgcaccactgcaaaatcttgagcaggagcagcaggccagaacaaccttgacgtttacgggctttattggagctcgcgtcaagtcatatggcgatctcaagccagatgcccttaagccactcttgattgagcaatttctgcctacactgaatgcacgcaaacgtgaaggaaaggcattcaaaatctccatcaatttgaagacaaatgaaagtaacgcgcagaaagaatttttcccgcacgaaacgacgataacaccagatgacctgccgtcaatgacnnnnnnnnatgtactatcacattga

SEQ ID NO: 356319 - DNA, 1209 bp, Pseudomonas aeruginosa
atgtactatcacattgaatctgtggcaggaaagggaagctcgctcatcgcattcaatattgatggtcggacgataccagccaacctgatatcgccttcgtcgttccctccaggctatctttgtgtctttctattcgaatcggaaatatttcattccaatgcagatagctcgcgccagaagctggtgctgccagaaggcatacaagaatcacttctttatcgtgtgttgcgccgcgaacttggcaaaattctggcggataaggttccgcagatcaacgagaaaaatgagaaggtaaaagaaaaatttgaagagcaattcccacacttgctgggctatttcgaggccgataccgttggcctgattgatcgagacgatgccttggcaatcgctcagcagcggttttttcgagttcagaaagaaatacttcaatgcgaaaaactgagtgaggttgcatacgaaaaatcgctggagctgtcatctcgcaccttgacggaatacattttgtaccgtgataagattatcggccgaatgaaagagatgacggccgataatgcggaagccgagatacataaccttattgttccaagatacaaggagttctcgcaagacaccatgtcttcagagatttaccagaacaatgcctggctgctagacgacaaattcatggtgtttcggaccatcctgagcgagaagagcatggatgccgttatcaacgccatacgccttgatgaagaaagcgtgggtgatactggtaggccagatatcgccatgatcttctcggccaacccaagcgacgctgttccggtagatgtggtggtggttgaaataaagaaaaagactgaagaagaaaaggataatttttacgcagtaaatcagctattggatcgagctgggaagctggtagcgtactgtccgaacattcaaagagtctggtattacgcgattatgaatatcaatgacactacagctttccgattgcggcagtttaagtggactccttttttctctaaagggaaggtttactaccaagaattcgataccccgcatcctgatggtcggattattccaacgccaaccttcgtggtgtcttttgatgcaattgtagctgatgctgaatgcaggaatcatacattccttgagattttgcgtgatggaatgaagaaatacgctgaagaacaaaataaatctgatacttcagctaatgcataa

SEQ ID NO: 356320 - DNA, 636 bp, Pseudomonas aeruginosa
atgttctttctgccgcatcaagcggccgaatacgataagaagcgtatgaccgtccaaggagtggagcaactgatgctctttatctcagatgaggcttccgcccgacaatggctgcgagagcaagtactgcaaaagccacagacctttcaggaattacacccgcagtttatgaaggagatcgggggctggagcaaaacggaaaaaccgctggagctttcaactctccttgagcaaaacttcctgcgctacgacggcaaaggccctgtgccggagcagatccacgcttacctttctaccaactggaaagagctccgcaacttatccaaggttgatccaaccctggtcgccaaggcccgcgatcgctggtacgtgcccgaccctaacaaggcaggcgacctggagaagcttcgcgagaaggcgttgctcaaggagttcgaggagtacaaagaggtcaaaaagaaactcaaggttttccgccttgaagctgtccgcgccggatttaagaaagcctggcaggagcgcgactacggtgtcatcgtcgccgtggccgacaagatccccaacagcgtcctggaagaagatcccaagctgctcatgtggtacgaccaagcggttacacggatgggaggcgaatag

SEQ ID NO: 356321 - DNA, 1923 bp, Pseudomonas aeruginosa
atgattactaaatggaaggtcttcaactttaagtctattcgcgaggagactgagctagatctcggcccgctcacgattttcgctggcgcaaacagcagcgggaaaagcaccttcatccaatccgtccttctcgtggcgcagacattagcccataaagtcggatcacgatctgtcgtattgaatggcgctctcaccagcttgggccagtttgacgatctgaaatccaatggtagcgcgtcggaccaaatcaccatcaaatgtacctgtcgaccgcttgcggatcaggatgctgcattaggcagattgtctcagttcgcgccccgtggcgctatttactacgggccgcgctccaatcagcttcaggaaatagcttgtgagatctcgttcgatgctgatccttcaagttcccagcgtgatttgtttcaaatccaacctcggctctttgccactcagttgtcctgcatatccagagacgaggacaacgtggatcagaaagccaatatctcgattcatcattcctccaagactatctccgaaatcgcgagagcaaatggtgcgagtgaaatcgacgatcagctacgcgccagtttggcttacgctgttgaactagacgatggctccataactgaggtgaaggaagactttcgttcagccaagccaatcggctgcatgctgcgacacttccttcccgagagaattgtttatgccatcgataccatcgaagaggacgcgaacgccatcaccatggctctccaagaggatggccgtcgggccgttggcttacggcgcaacatgggaagagagatccttctttccgaagagatcattgctgtgttgcgcgaagtcctcaaaggcacaatcgattttgaccagactttcaaggataggtatcggcaggagtcactattcggttccgagtccgagacgcttacattcaggtcttggtatgaaaggttgcgcagcctcccacgtgacgagcgtctgaaggttcagcaggttctgcgtgagcgcgatgatcttttcagccgtattcacgcagctatgaaggcaacaacggccgggaagtcagagacccatgcctttgtccaagccaggccacctcgcttgataactgaggctgcctggtatctggataatttcttcgcctcatccttgaagtacctcggcccgttgagggatgctcccaaaccgctgtatccgcttgcgccagcagccgacccacatgacgtaggcttacgcggagagcacactgcttccattcttgaactgcataaaaataagaagatccgctacatcccgtcaacaaatttcaaagacccggtaattgaccgcaaaacagtgacccggactctcgaagcagcggttatcgattggctccaatatctgggagtggctagctcagtcaaaagccgagatcagggaaagttgggacacgagctgaaagtggggctttccaattcggatagcacgcatgacctcacgcatgtgggcgtaggcgtcagccaggttctgccaatccttgtcatgtgccttcttgctgacacggactctacgctcgtttttgaacagccggagctgcaccttcatccgaaggttcagaccctgctcggcgattttttcctttcgatggcgctatgcaacaagcaatgcattgttgaaacccacagcgagtattttatcgaccgcctccgcttccgaattgcagcggcaacacccgagaaggagctgaacagccagaccaagatttatttcgtggaaaagccgtcgcagggatcagctttccgggaggtggtgattaatgagtatggagctatctcagattggccggaagggttctttgatcagtcccaacagcaggccgaggaaatcctgagagctgcggcgatgaagcgcaaggcaacccggaggaataaagatgcatag

SEQ ID NO: 356322 - DNA, 1050 bp, Pseudomonas aeruginosa
atgcatagcctgcccagcgtcacaattgatgcaggcgtgcttgcagttccccatgttgattgcgccaaggatgatgctttccagtacgtggataggctactggactggagcaagttgcttgatgagccctgggtagccatttacatgagcgagcgggcctcagagtcactttttgccgacggattgtatccactgagggagcaactcagagaactgttcaatgtccacggcatagtagagtacgacgtcaatacggttgcgagaattgccaaccagcttctgacgatcactccatcctttgaaacctactatcgggtcaaagatatcttgtcagaacatctggcaacaaatccggaagttattcggctgacaactcatgacggcctccagtccgatcttgcccgatgcatcacgttgatagccgtcctacgcaagcactgctcccaacctcttggtggccattctctcatactgagagaggcgcccaaacaggtaatccaggtaagagcccatattcacgagctcgagcattccagagacgatatccctgtcttgccgtgcccgcccgagttctttgaaggcgatgtgttggtttgtgacgattttcgaggactgatcgattgtctcgatgaaaccgccattctggttggcgcgtctgacgaccttggaattaaactcgccgtccgaatcgctctgttcaaaaatgcgattgcgcaaggtgattcccctgactggggcggcgtgattgttccagccattgggtccagatttcgggagttgtgccagcagatttgcgctgaccaaggggactccgtaccacccaagattctccgatcaatcgttgagactatcaaaggacacaatcttccagccgtacacgctctgcggacagggacaggcggaaatgatccgcaaagaatgcgtggctccgataaagcgcagcggcgagatatcgatagggaattccatcttcattactgggagtgcgccgacgggacagtcgagttggcgtccgtggtttatcacaacgatttttcaattccgggatga

SEQ ID NO: 356323 - DNA, 2898 bp, Pseudomonas aeruginosa
atgctggatgtttggcaatacagcaccgttcataactgcgcctgcaaggtcatcgaagaacagaccttgtgggggcagacggtgtgccgtgtctggttgccgaaccaggatgcggtggtgcgtgtgcctcgctccgccttgcggccgctggatgccgacttgcagccggagattgaggcaggacgcattgcctatgtggcggcagcagccaaggtggctgaggtgctcgaaggctccaccagcgccagcgagggccatgtattgctggctcccatggagtccaacgttatcccgttgccgcatcagatcaacgccttgtcccgggccatctctggcgatcgcgtgcgctacctgatggccgacgaggtgggtctcggcaagaccatcgaggccggtctggtcatgcgcgaactcaagctgcgcggactggttcggcgaatcctggtcgtctctccaaaaggcatcgctacccagtgggtggcggaaatgcaaacccacttcaacgagcagttccagcttgtgctgggcgacgacatcggcacattgcagcgcctggctccaggggctgaccatcggaactcagcttggtcgatgttcgatcaggtcatcgtctccctggattcggtcaaacccatggacaaacggcgtggttggaccgccgagcgcgtcgccgaatacaaccgcagccggttcgaggatctgattaccgccggttgggatctggtggtggttgacgaagcgcaccgcctgggtggcagcaccgatcaggtcgcacgctacaaactcggcaaggggctggcggaggctgcgccctatgtgttgcttctttccgctacgccccaccaggggaagaccgatgccttccatcgcctgatgaatctgctggatgacgacgcctttccggatatagacagcgtctcccgcgatcgggtggctccgtatgtcatccgcactgaaaaacggaaggctatcgatgccgatggcaagccgctcttcaaggctcgacgcacgcagatggccccggtggcttgggagagccgtcatcacctgcagcagcttctctatgaggcggtgaccgactacgtgcgcgagggctacaaccaggccctgcgcgagaagaagcgccatatcggttttctgatgatcctgatgcaacgcctggtggtctccagcacccgggcgattcgcaccacattggaacggcgactcgcggcgctcaaggaaggcgaacagcaagccagtttgcgtctggctgaactggaaaacggcgcggagggattggaaagcccagacgatgaaatagccgagctctacgacatggacgggcaggagctgctcgatgagttgctgaaatcccatgtggcggctctgcaaagcgaaggcagccatgtagagaccctgctggatgcggcggttcgctgcgaacaagctggaccggacgccaaggccgaggcgttgatcgagtggatatacgagctgcaggccgaggaaaacgaaccggatttaaaggtgttgatcttcaccgagttcgtgcctacccagcagatgctgaaggagtttttggaagccagggggatctcggtcgtcactctgaacggctccatggatatggaggaacgcaagcagtcccaggatgccttccgtagatcgcaccgcgtgctggtttccaccgacgcgggcggtgagggtctgaacctgcagttcgcccatgtcatcatcaactacgacatcccctggaacccgatgcggttggaacagcggatcggtcgcgtggatcgtatcggccagcccaaaacggtgcgggcgatcaatttcgtgtttgaggattcggtcgagttccgggtccgcgaagtgctggaacagaagctcttggtgatcttcgacgagttcggtatcgataagaccggcgacgtgctcgactccgctcaggccggtgaactgtttgaggatgtgttcgcctcggccatcctcaatcctgacggtatagaaaccgctgtcgatcacacggtggctcggcttcgcgatgagattcagcaggtgcacgagtcttccgccatctatggaatctcggacgaaccggatgtgcaggcggccgagcgtctgcgttcccatccactgccccactgggtggagcggatgacggtcggctacctcaattcgcacggcggtttggccagccgcaaacgctcctggtgggatctgaattggccggacggccaagagcaccgcaaggccgtgttcaacgcccgggaagcgaatcgcctgaccgatgcaaccctgctcaatcttgaaaacagctgtgtccgtgggctggccttgaacctcccgcagatcgcggcgggccagctagtgccttgcgtgactgtgagcgggctaccggccaccatctcgggtttctgggggctctttgagatccgccttcaggccgggatgcaccagaaggctcaactcttgcgcatccccatggtgcggcgcggttatgtcagtgtgttcttgagcgaagaaggcaaactgtttctgcccacggcccggcatatctgggatgcgctgcagactgcggaagcccaggtgcaggtcaccctcgaacaggatgaatccattgccgtccatgagcggttgcaggaagcggccgaacaggtcggacaggagctgttcgacgcattacagcaggcgcatctcgcctctgtggctcgggaggaggaacgcggaatcgtctcctttgcctcgcgccgcaaggccattgagcgggctggattgccggaggtgcggcaattcaggctatctcgttgcgatgcggacgaatccgagtggcgacacgagttgcagtcagcgcggcagatcgtgccagaaatccggccgttgctgatgttgcgaattatcaagggaggcgctcaatga

SEQ ID NO: 356324 - DNA, 1995 bp, Pseudomonas aeruginosa
atgagtagttggcgagacgccatcctgaatgactttatacccaacgtcagcaagctaaccctggttgccgatccggactgcttattgaccgaggagacgttggcattagaacttcgcgggcgcggcttcgacctgatcgagttcagtgatccggtcgaattcagatacgcctatgaatccaggtaccgttcgatctgggatcggggtgagcacaccgatctagtggtggtcctgcgcttgcaggatacggagctggagtcgctgccatacgacctgctccaggcgggtcggaaactgtcgttcaacctgggggatctctttcccaatttgagctacccggtcatcgagaagctcgaccggagcctgctggattcactttttgaggcccagcgtaagtcgccgccggatcgcatgggcgacaacgccaccaaggatttcattctccgtcatgtgttcggcattgcggcggaactgatcgccaatgaggtggagctgcttcgcgccttgctccgcctgcactacggcaagctgcaactcccgctgatgctcgccgagcggcttatccaggttcttaaaggccatgatgggctcaagacttggccgctctctgaaatcgttccggacgatgaggccttctttgctttcctgcaggagcgctggccgctttttctttccaggctcggcagcgtcaatcaggtgcgggaagattcgccggaatacggcctcaagtatcccggtcctggccgcctgccgttcgaccataaggacatcaaggtatacatcgataacttgttcctggaagggaagctcgcccctgtcgaggccaaaggcattgaagtggatgcggggtcttgggttcgaagcggtatcgccacctccggcgtggacgatgatgagctgcggatctcccgcctgtttgaccttgtcgaaaaggagctgcccacagcggaagcgcgttactcggactggaccgcctttgctttgaaatgggccgagctctcttcgctggttcattgcggcaacagcaccgagcatcaggcccggctcaaagaaatcggcgacgcactgaacacgacctttgccggttggcttgccgaccactactccagtctgatcaatttgccgccgaccaatccggccatgctccaccatgtgccgcgccgcctggctcgggatatcgaagactccggcaatagccgggccgcgctgattgtggttgatggtctggccctggatcagtgggcgaccatccgccagcttctgcaaaagcaggatgccaatctagtcatgcgcgaatccgcgaccttcgcctggattccgacgctgacctcggtatcgcggcaatcgatcttctcgggcaagccgccgctctatttcccgtcatccatcaactcgaccaacagcgaagagaaactctggaagcagttctgggaaggtcacggtctgtcccggctggatgtcgcttaccagcgcggccttggcgacggcgatgcagcgggcgtcctcgactccgcaatccaccctgggaaaaccaaggtggtggggcttgtcgtggacaaggtcgacaagatcatgcacggcatgcaactcggctcggccgggatgcacaaccagatcaagcaatggtgccagggtgggttcctggttgctctagtcggccaactgttggaatacggctatgaggtctggctgacagccgatcatggcaacatccaatgcgacggtaaaggccgcccatctgaaggtgtgattgccgaaactcgtggcgagcgtgttcgtgtctatccaacgccggaactccgtgctcaggtggctggggccttcccgtttgcccacgagtggcagccggtcggattgcccgcagattatttccccctggtggccggtggccgcgacgcattcgtgaaccctggagatgccatcgtaggtcacggcggtgtagccatcgaagaagtcatcgtgccccttgtgaagtttgagaggagaacacggtga

SEQ ID NO: 356325 - DNA, 762 bp, Pseudomonas aeruginosa
atgggcaaaagacatgaggccattggcatcaagcaggtgatccgtttcgagtggatgcagaaagcagccaatctgctgctggctgggctcgacgccaagaccatccgccatgagttgcatgagtccttcgcggacagaaaaggcaacggctccgaaggcgaacgaagcgatcagacccggacctttgtcgtcaacaacctgatgaagatctgggtcgctcctgaccccgagttgattcccttccgggatgcctcactggcgtttttgcgggaaaacccgtccatgaccctggcggtccactgggggatgatctcggcggtctatccgttctggttcaatgtggcccggcagaccggccgtctgttggccctgcaagatcaggtgacacagacgcagatcatcaatcgcttgaaggagcagtatggcgaccggcaaacgattttccgttatggcaggtacgttttgaggtcatttgtagcctggggatctttgaaggattccggggccaaaggctgctatgagaaagccgctccggtgagcattgtcgacgcaaacctggccatcctgatgctcgagtccgcactcctggccacctcggaggccacaggcgcattggggctgctcctgaacaatccggcatttttcccgttcacgtttcccgtgatgaccggtgactttgtatcccagcatagcgagcggatcgacgtggttcgctatgggctagatgacgagctcctgagattaaaggcagctaaatattaa

SEQ ID NO: 356326 - DNA, 813 bp, Pseudomonas aeruginosa
atgaaagagattgagctgaaaatttcatatactggtggctatgcagacgagggacttctagatatctacgacgcaagcgagtcgataagaggcttggcgcgggcactagcaataactacacatgcctttgccaatgatggggagattcgccgccgagctgtttcagctcataacgcaaaaatttttctacaccccccgcgtcaaggtagttttgaggctttagctactgttgcacttgccaatcctgttgcgacattcattggaacttcagttgtcactaaatgtttctgggatttcctccaatggacatggtccaactctattggcagagcacatcaaccagaaacaaggtacgttcgcaagtttgacgatcgtgtcgagccttttgttgacgagatggggatctccctcgagtctgccatggaggagcttcaccgtccaatcaagggggcacctaacacagagataacaatatacaggcctcgtgttggtgaagttataaagcttgatcagaacaccttgtcctatgtaaccgcacaggttgtggttgaaaatcaatttgtaactggaaacgtaaccaaatacaatattcttagtgggtttgggaagttttacgatgatgagctagggcatactatttcgtttgatttagacgctgacgtttcaaacgaagagcgcgccctactcagcaggtctcttgacgaacggaacagggggcttgacggtaagatcgtcatgacagtccaaaaagtatatactggccgggaggttattaaacgttacaaggtatttggagtgcaggtacgcctgtag

SEQ ID NO: 356327 - DNA, 735 bp, Pseudomonas aeruginosa
atgaattctagcggagcatctcaagtctcatcagacattcttgaagctctagcaaaactaggaggggccgtaataggcctctctgtttttgcgtaccttgcgggctatttttatttgtcagcttactataaggggatcggtatctcctgggcccttgaaatggctaaagccgaggacttgttacggtatggatttgtaccttcaggagtgtttggcatcacactatccggcggactataccttctccttggtaacaaattaaagcctatgatagctatatttgtttttatcgcgcttctgattgcgcccttgttatatagtttatcagctgaggtcggcgcgaagccttctgtggcagtcgccatgtacatatgtatgttaatttatgctgccgcaggcttgattctatcagtgtcgataatgaggctttggaaagataaaacactatcaaatctaaaggttactggggtagttgtgtctgttttaattggcacatacattgctcccacatatagcggatcatctctaacaaatcaattaagaggttctcccgagagctttcttcccatggttacggggaaggatgggcgcaacgactggctacttgcaggctatgtatcagagaagctcattctggttcgtaagctgggcactagggagagcgaggcaattctcgttgagccgggagaggactggaaaatcggagcaagccctgaggtacccgtaaaaaagtag

SEQ ID NO: 356328 - DNA, 207 bp, Pseudomonas aeruginosa
gtgcgcgccgaggaacagggtgccgccgccggcgccctggtggccgtacatggcttcggcctgatcagcgggccgctgctcggcacgctgctccaccaactggacagccgcgccccctacgcgctggtcggtctgctgctggcgctggcggcgttctggccgagccaaccgacgcgccccgtggaaacgaggagcgaagcaccatga

SEQ ID NO: 356329 - DNA, 165 bp, Pseudomonas aeruginosa
atgttgttcggcacctacgagaacccccgccgcatcgacgagccgcagggcttcgccggcgacaaggagcagcagttcgtcgacatgctgctgttccgcgacgtgcacagcctccccggaaaaacccagcccgctcccgtcctggtcaagcccgacgtcaggtga

SEQ ID NO: 356330 - DNA, 267 bp, Pseudomonas aeruginosa
gtggacagccgcggcgcattgctgcagggctcgtattcatggggcaagaaccgcctggcgctgtcctacggcaagaccgtcgacgacggcaacggcctgggttccgcggccgactacgagagtcgcggcatcgcctatttccgcacgatcaacgacaacctcaagctggtcgccgagctgaaccgctaccggatcgacgggcgcgacggtgccgcgctcgacgaggacaccgacaccgtggccctcggcgccgtactgaactggtga

SEQ ID NO: 356331 - DNA, 183 bp, Pseudomonas aeruginosa
atgacctggctgtcccgcgccgatctcaagggcgccgacctgcgcgacgccaacctgcaggaagtcaagctggccgaggccaacctggaagatgccgacctgcgcggcagcaaggtgcgcttcggcaacttccagggcagcaacatgcagggttgcaaggattgccccgcgggctggcagtga

SEQ ID NO: 356332 - DNA, 504 bp, Pseudomonas aeruginosa
gtgagcaagctgttcatcatcgtggaacgcaaggaagactggacgtcctattaccccagcgaggatgtggtcaccgcccaggaatacctggaactgcccatcgacgacgacactggcaagcgggtccaggtgatcaacctgtgccggcactacaagtacctgcgccatggctactactgctcgctgctcgccgaggcgcgcgggcacaaggtgatcccctcggtgcggaccatcagcgagctggccaggaagtcgctgtacagcctggtcctggaggacctcgaccgcaccctggacaaggccctggccgcgcacccctacggcagcaccgatggtttcaccctgaccctgtatttcggccgtaccgacatcgagccgttgcaggacctggcgcgacagttgttcgaggcgtttccctgcccgttgctgctggtggagttcaagcgcaaccgcacctggcacatcgagggcatcaagcccggcgccatccacaagctgcgctag

SEQ ID NO: 356333 - DNA, 129 bp, Pseudomonas aeruginosa
atgagcgatacccttgctaacctgaccacgccccccgaaggctacggcgagtggttagctgatctcaaaggccgcatccacaatgcccaggcgacggtactctcatggaggaagaatcacagtgactaa

SEQ ID NO: 356334 - DNA, 2802 bp, Pseudomonas aeruginosa
atgaatgcagtagaaattgagtccgccatttcggacctggcctttgagccctttgacgcggtggagtttccgttcaccttcctggccgcattcggcaataaggaaaccgctctcaagcggctgcgcgccggcaacaacaacgcctcggacgtacctcgcggcgtactactgcgcaacaacattcatatcgccacctgcgagcccggcagcgtgggcgatacgctcaaggcattgcgtgccagcccggccaccgcaaaagccaaggccaaattcatcctcgctaccgacggacaaacgctggaggccgaggagctgatcacgggtgaaaccatcacctgcggctatccagaccttcccaaccatttcggcttcctgctgccgctggccggcatctccaccatcaaggagatcaaggacaaccccatcgacgtgcgcgccacgagccgcttgaacaagctgtacgtcgagctgctgaatgaaaacccagactgggccaaagccgaacgccgccatgacatgaaccactttatggcgcggctgattttctgcttctttgccgaagacaccgacatcttcactggcgatggtctgtttaccaagacggttgagcagttcagcgaacgcgacggctccaacacccaccaagtgctgtcggaaatcttccgcgccatgaacatcaagctggccgagcgcgccaccgctcagccgcgcctacccagttgggccaacaccttcccttatgtgaatggcggtttgttctccggcagtaccgaagtgccacgcttcacgcgcatggcgcgcacctacctgctgcacgctggcaacctcaactggcaaaaaatcaacccagacatcttcggcagcatgatccaggccgtagccgatgatgaagagcgtggcgcactcggcatgcactacaccagcgtgcccaacattctgaaagtgttgaacccgctcttcctggatgacctgcgtgctcaactagacgctgcgggcgacaacaaagccaagctgctgaacctgcgcaagcgcatggcgcgcatccgtgtgtttgaccctgcctgcgggtccggcaacttcctggttatcgcctacaagcagatgcgcgagattgaagccgagatcaatcgccgccgaggcgaggccaacaataaatcggaaatccctctgaccaattttcgcggcatcgaactgcgcgactttccggcagagattgcccgtctggcgctaatcattgccgaatttcagtgcgatgtgctgtatcgcggccagcaggatgcgctggcggagtttctgcctctggatgcgcagaactggatcgtttgcggcaatgcgctgcggctggactggctgagcatctgcccgccaacgggaacaggcgtgagagtgctcgccgatgacttatttggcacgcctctcaatcagacagaaattgatttcgagaacgaaggtggggaaacgtatatctgcgggaatccgccgtatcttggctcacgggatcagaaggacgaacaaaaggctgacttgcagactcttttcgataggcgaatccagaactggaagtcgctcgattatgttgccggctggttcattaaggccgctgattacggcaccaaaacccgctctgctgcggctttcgtgtccaccaactccatttgccagggtctgcaagttccaatcctgtggccggagatatttgccagtggccgccaaatcgaatttgcccacacatcctttcgttgggccaatcttgccagccacaatgcaggtgtgactgtagtcatcattggcatcacaacgcagccacgcaatccgaggcgcttgttctctctggacgactcgggacagaccatcgaacgccaatgtgcgcatatcaatgcatatttggcggtaggtgatagtgtcattgtggataagactagccagcccctgggtacgcagagtgagatgacttttggaaatactccaatagatggcggtcatttgctgctctcgcgggacgaacgcgacgccctgcaactcacacctgctcagcaaggccaatttattcgccggatttatggctccgctgagttcattcgcggcctggagcgttactgtctgtggatcgaagatcagcacttggctgaagcacaaacgatccatcctattgctcaacgtcttcgtgatgtgcgcaatatgcgactcaacggtgggaagacagcaagggacatcgctgaaagaccacaccaattccaaagaatgtacttcggcaagcattcaacgctcattgtccctagcgtctcctccgaaactcgcgcgtatctgccctgcggttatgcgcctgccgggactatcgtttccaatctcgccttcgccctctacgatgctccgctctggaacatggccctgattgcttcccgcttgcacttagtctggatcggcactgtctgcggaaaaatgaaaactgactttcgctactcgaacactcttggctggaacaccttcccagtgccgctactcaccgagcagaacaaggcggacctgacgcgctgcgccgaggacattctcctggcccgcgaagcccacttccccgccaccatcgccgatctgtacgccccggacgccatgccggccaacctgcgccgcgcccacgagcgcaacgatgaagtgctggagcgtatctacatcggtcggcgttttagaaacgataccgaacgactggaaaagctgtttgacctctacaccaagatgacagcagatacatcgaaggccgcgccgaaaaagccacgagggaaaaggcatgagcgatacccttgctaa

SEQ ID NO: 356335 - DNA, 1494 bp, Pseudomonas aeruginosa
atgaagctcctgcatgagtgcctcgtgcgcagtgcgcgcgagtatccgggcaatatcgccgtcgttgaccaggccggctcctgtagctatgccgaactggacgcgcgggccgaggcctatgccggcttgctggttgcgctgggggtggggcgcggagagcggatcctgctctgggcggaaaagtcggtggagttgccggcgctgatgcagggggccttgcgccagggcgttgtctatgtcccggtggatccgctgggaccggtgtcacggctggaaaagattctcgccgacagcggggcgagcctggttttttccaccgcgagtcgtctggcggatctggacgctctggaacggcgcccgcgtatcgtggtcctggacgatcccgcatgccccctgcactggtctcatgtggagctacccgccagcgcatccgccccggaggaaataggcgaacacgatctggcctacatcctctacacctcgggctctaccggcacgccgaaaggcgttgcgctgagccaccgcaatgccctggccttcgtggagtgggccaatgagcgttttgccttcgaggcacgcgatcggttttccaaccatgctccgttccatttcgacctgtcggtgctcgatctctattgcgccttcagccgtggcgcggcggtttgcctggttccggaaggcatcgccttttccccggcgctgttgacggcgttcctccaggaacagcggatcagcgtctggtattcggtaccttcggtcctgctcatgatgatgcgcgacggcaacctgctgcagtcttgcccggactccctcagagtcgtgctgttcgccggtgagccttttccgatcaaacacctgcgtgtgctccgggaagcgttcccagggctgcgcatggccaacctgttcggtcccaccgagaccaatgtctgcacctgttacgaggttgtcgcggtcgatcctgctcgtctccagccggtgcccatcgggacggctgcttccggcgacgaagtctgggcggaaaaggacgatggccggcgctgcgaggtcggggaggagggcgagctgatcgttcgcggccccaccgtgatgctcggctatttcggccagccggcggttaccgggagctatcgcaccggcgacctcgtcaggcaactggacgatggcaactacgagtatctcggtcgtcgtgacgacatgctcaaggttcgtggctatcgcatcgaacggggcgaggtggaggccgctctgctggcccatccgcgggtacgcgaggctgcggtgatcgtcgccggtggcggcatggacgccgcgctctgggcgttcctggtgccaagcgatggcgaggcagtctcgctcatcgaactcaagcgtcactgcgctgagcgactgccgcgctacatgatcgtcgaccgggcgaagacgctagcggaactgccgcgcaacgctaacggcaaggtcgatcgcttcaagttgaaagccctggtggaggactga

SEQ ID NO: 356336 - DNA, 813 bp, Pseudomonas aeruginosa
atgcggatcacctcggcgctgccagggctccagcagcggcgcgttcttctcgatgaagtagaggatgttctcctgcggctcgctcggatagcgcgccatggattgttccttgtccttgccgccgacgcgcgggatggtccgccagaggtcgttgacctggcgctggatcagttcctcgcgctccttctgccgctgccgctcctcttccgcggaaatcgggtagggacgcttgtagcggtcgacaccgtagttcatcagggcgtggcaggagtcgagcaggtcttccaccgcgtcgatcccgtagcgctcctcgcactgcatgatgtactgcttggcgaacaccaggtaatcgatgatcgaactggcatcggtccaggtgcggaacaggtagttgcccttgaagaaactgttgtgcccgtagcaggcgtgggcgatcaccagcgcctgcatgcactgggtgttttcctccatcaggtaggcgatgcaggggtcggagttgatcacgatctcgtaggccaggcccatctggccacgcttgtagttcttttccgtactgaggaagtgcttgccgtaggaccagtggttatagccgatcggcatgcccaccgaggcgtaggcgtccatcatctgctcggcggtgatcacctcgatctggttcggataggtatccagggcatagcgctcggcgatcctgctgatttcccggtcgtactgctggatcagctcgaaggtccattccgagccggtggcgatgggctggcgcttgctcatgcgacgagcctcctctggaacagctcgcggaacaccgggtag

SEQ ID NO: 356337 - DNA, 738 bp, Pseudomonas aeruginosa
atgacctatcgccatgaacgccgctgccgcaccggcacggccctgatggcgggcggcatggcgctggcggcgagcgccttcggtcatgcccagcccggctacgaattcgatgatcgcctgttgctcggctcttccctgggcggcggcgacctgtcgcgcttcaaccaggacggtcggatcgatccgggtcgctatcacgtcgatgtctacctcaacgagcgcttcgccagccgcagcgaagtgagtttccgcgccaaccccgccagcggcgcggtggagccctgcctcgacgaagacttcctgcgccagcgcctcggcgccaagcctggtgacgatccgcgcaagagcggcgacgggcgccactgcgcctttctcgatgcacgcctgcccggctcgcggttcagcctggacgtcgcccgcctgcgcctggatctctcggtgccgcaagccttgctcgacctcaagccgcgcggctacgtcagccccgaggagtgggacgccggcgacagcatgagcttcgtcaactacgacaccaacctctatcgctccgaataccgcggcggcgaatcgggacgatcggactacgcctatgtcggcctgaacagcggcatcaacctcggcctgtgggccaccagtccaactacacctattcccgctacaacgggcaggccaggcgcaagtggaacagcatccgcacctatgcccagcgcgccttgccggcctggcgcagcgaactga

SEQ ID NO: 356338 - DNA, 408 bp, Pseudomonas aeruginosa
gtgccgcagcatcccgaggagttacaggcgcacgacgggctggtctactacaaccgcgagcccggcggcatgctctgtctgccggtggacggcgaaccggcctcgttccgcatccgggtgaggatgcgcaccgactccgggcaccagttgctcgaaggtgcgcgcgccgggctcggcctggcgatcctgccgagcttcctggccgccgatgccttgctggccggcgagctgctgccggtcctgcctggctactcgccggacggcgggcaggtttccgtggtctaccgcaagacccaacggacgccccggaagatcctcgtcctcggccagttcctcgaagaggaaatcggcgatccggcaccctgggaccgcgcgctcgtcgagcgtggcctgttgccgccgggctga

SEQ ID NO: 356339 - DNA, 129 bp, Pseudomonas aeruginosa
atgaaaagcacaactaccctgagtcgctccctgctgttggtttgtctgcttggtctgctgtcggcctgtggcggcggcgagccggaaacccagtccgaagtcgaaagccacggtcacgctcacgactaa

SEQ ID NO: 356340 - DNA, 441 bp, Pseudomonas aeruginosa
atgtgggagttatccggttatttcggcctgttcctcgctgccttcggtgctgccacgttgctacccatgcagtcggaggcggtgctggtcgggttgctgctgactgaccgctatgcggtctgggcgctgctggcggtcgccaccacgggtaatgtactgggctcggtactgaactggctgctgggtcgctctatcgagcgctacagacacaagcgctggtttcccgtcagcgagggcaaactggaaaaggctcagcaggcttatcaccgcttcggtcgctggtcactgctgctcagttgggtgccgatcattggtgatccactcacagtcgtcgcgggtgtcatgcgagaacccttctggagctttctgttgatcgtgatgctggctaagaccactcgctatctggcactagctgccatgacgcttgggtggtttgggtga

SEQ ID NO: 356341 - DNA, 717 bp, Pseudomonas aeruginosa
gtgagcctgcagaagcgcgacaccaacctggatctgatcaagtggctggcgatgctgaccatgctgctggatcacctgcgctacatctggcctgacaacggatggttgttcatcgttgggcgcttagcctttccaatgttctgcctggggatcgccgccaatgtcgcgcgctcgcaaacaggtgagctgtattccgataacaacgttcgctacatgtgctggatgactgcgtttgcagtgatctcggagttgccctatcgcctgctttctaacgacagcagcacgctcaacgttatgccttcgctgctgttgggcctgcttatcacctggggagcacatcaccgtggtcgcgacggtttgatcctggctctggccggcgtgactgtcgcggtgctgatgcaagagcgcctgatgtacggcgttttcggcgcactgctgccggcagcgttgctgctggccattcagcgcccagggcttgtgtggctattgcctgccgcactgtgcgtactggccaatagtcgcaaccgctggctcgccgagtgggaattgcagccctataccttgctgatcgtgatcactgcgtttgtcgcacccttgcttgggttgtggctgctgcgccgactgcgccagttcagggtctggccggtcaagcgctggggttattggttctaccccgggcatctggccgtactacacatgatccgctcgctcggctag

SEQ ID NO: 356342 - DNA, 327 bp, Pseudomonas aeruginosa
atgagcagaatctcgatatgcgaactggcggaatggcaggcagcagatcgggcgttcactttgctggatgtgcgccgtacgagcgtgcggcttgccgatgccgaagaaattcccgacgcacactggcgtgatcccgaggctgtcttcacctggaaagatcaggtttcacgggacaggccagtgattgtctattgcgccaaggggcatgaaatcagccagggcatcgccgccacattggaggccatgggcctggatgctcgcttcttgatcgatggctttgctggctggtacggcgctggccggcccacccgtagcatatcgaggtag

SEQ ID NO: 356343 - DNA, 945 bp, Pseudomonas aeruginosa
atgaatagttggctatctctgatcatcgccttgccgaccgctaacgccacagagcggatgcgtgcctggcgtgccctcaagagcagtggcgcagcggtactgcgcgatggtgtctatttgctgcctgatactcccgcctgccgggaagcgttggaagctgttgagcgcgacgtgctgggtagcaatggcacggcctttctgttgcccatcaatgatccgcaaggcgagcgctttatcgagttgttcgaccgtagcgaggactacgccaagctgcgcgtcgagatcgaggcgtgccaggctcaactgacttcggataacgccctcactagcaccaagcaggtacgcaagctgcgcaaggcatttgcgcagcttgcggccatcgacttcttccctgcggcagcgcggaaacagaccgacacggccctcaaaacacttgaaacggccatcagtcgggcactatcgcgggatgagccgagcagtcaggatcagcctatcgaacagctggatcgccgcgactaccagggccgcctctgggctacgcgcaagcggccctgggtcgaccgcctggccagtgcctggctgattcggcgctgcatcgatccgagagcccgcattctctggttggacacaccgaatgattgccctgctgacgcgctgggcttcgatttcgacggtgcgacctttagccatgtcggcagtcgcgtcaccttcgaaaccctgcaagccagctttgcactggtcgagccaggcctaagccgcatcgcggctctggtgcattacctggatgtcggtggcgttcaacccgctgaggctgttggcatcgagcgtgtattggccgggctgcgcgaaaccatcctcaatgacgaccagttgctaacggctgcttgcgccatcttcgatgggttgctggcggcatttgtgaaagaagagacccctgatgaatga

SEQ ID NO: 356344 - DNA, 837 bp, Pseudomonas aeruginosa; identical to SEQ ID NO: 328709

SEQ ID NO: 356345 - DNA, 1884 bp, Pseudomonas aeruginosa
atgaacgccctgcccacatcgctgttgcagcgcctgctcgaacggccggcgccgttcgccttgctctaccgcccggaaagcaatggcccgggcctgctcgacgtgatccgcggcgaggcgctcgaactgcacggcctggccgacctgccgctggacgagcccggcctgggcctgccgcgccatgacctgctggcgctgattccctaccggcagatcgccgagcgcggcttcgaggcgctcgatgacggcacgccgctgctggcgctgaaggtcctggagcaggagctgctgccgctggaacaggccctggcgctgctgccgaaccaggcgctggaactgagcgaggaaggtttcgacctcgacgacgaggcctacgccgaagtggtcgggcgggtcatcgccgacgagatcggtcgcggcgaaggcgccaacttcgtgatcaagcggcgcttccaggcgcgcatcgacggctacgccacggccagcgcgctgagtttcttccgccagttgctgctgcgcgagaagggcgcctactggaccttcatcgtccacaccggcgaacgcaccctggtcggcgcctcgcccgagcgacacatcagcgtgcgcgacggcctggcggtgatgaacccgatcagcggcacctaccgctacccgccggccgggccgaacctggccgaggtcatggaattcctcgacaaccgcaaggaagccgacgagctgtacatggtggtggacgaggagctgaagatgatggcgcggatctgcgaggacggcggccgggtgctcggtccctacctcaaggagatggcgcacctggcgcacaccgagtacttcatcgagggccagaccagccgcgacgtgcgcgaggtgctgcgcgagacgctgttcgccccgaccgtcaccggcagcccgctggaaagcgcctgccgggtgatccgccgctacgagccgcagggtcgcggctactacagcggggtggcggcgctgatcggcggcgatggccagggcgggcgcacgctggactcggcgatcctgatccgcaccgccgagatcgagggcgacggccgcctgcgcatcggcgtcggctcgaccatcgtgcgtcactccgatcccctgggcgaggcggcggaaagccgggccaaggcttccgggctgatcgctgcgctgaagagccaggcgccgcagcgcctgggctcgcacccgcacgtggtggcggcgctggccagccgcaacgcgccgatcgccgacttctggctgcgcggcgccagcgagcgccagcagttgcaggccgacctgtccggacgcgaggtgctgatcgtcgatgccgaggacaccttcacctcgatgatcgccaagcagctcaagtcgctgggcctgacggtgaccgtgcgcggcttccaggagccgtactcgttcgacggctacgacctggtgatcatgggccccggcccgggcaaccccaccgagatcggccagccgaagatcggccacctgcacctggccatccgttcgctgctcagcgagcgccggccgttcctcgccgtatgcctgagccaccaggtgctgagcctgtgcctgggcctggacctgcaacgccggcaggagcccaaccagggcgtgcagaaacagatcgacctgttcggcgccgccgagcgcgtcggcttctacaacaccttcgccgcgcgcgccttgcaggaccgcatcgagattcccgaggtcggcccgatcgagatcagccgcgaccgcgagaccggcgaggtccatgccctgcgcgggccgcgcttcgcctccatgcaattccaccccgaatcggtgctgacccgcgagggtccgcgcatcatcgccgacctgctgcgccacgcgctggtcgagcggcggccctga

SEQ ID NO: 356346 - DNA, 624 bp, Pseudomonas aeruginosa
atgagcggcattcccgaaatcaccgcctatcccttgccgactgcccagcagttgccggccaacctggcgcgctggagcctggagccgcggcgcgcggtgctgctggtgcacgacatgcagcgctacttcctgcgcccgctgcccgagagcctgcgcgccgggctggtggccaacgccgcgcggctgcgccgctggtgcgtcgagcagggcgtgcagatcgcctacaccgcccagccgggcagcatgaccgaggagcagcgcggcctgctcaaggacttctgggggccgggcatgcgcgccagtccggccgaccgcgaggtggtcgaggagctggcgccggggccggacgactggctgctgaccaagtggcgctacagcgccttcttccactccgacctgctccagcggatgcgcgccgccggccgcgaccagttggtgctgtgcggcgtatacgcccacgtcggggtgctgatctccacggtcgacgcctactccaacgacatccagccgttcctggtggccgacgccatcgccgacttcagcgaggcgcaccaccgcatggccctggaatacgccgccagccgctgcgcgatggtggtcaccaccgacgaggtgctggaatga

SEQ ID NO: 356347 - DNA, 1638 bp, Pseudomonas aeruginosa
atgaaaatcctcgaaccacagatcgacaagctgtttgatgacaacccaattcttcgacaaccttttctccatgtttacaatcatttctgccaggttgccaccttccaattcattcaagaaaagcaagcacctcatagcttcgcaattccgtatacatttgtatttgagcgcatgaacgactttagtcctcaaagccctgaatcatgcgatgattttttgcgcaagctaaaccctgatgactttaaaaatttattcgcttgcgcaaacctcaatatagtcatcccatttattcgtagcaaaatatatagattcactcgcgaaagcagcgaaaagtcaacgatcgactacgctgatgaaattacactcaaacatgaaatcaatgacatcattgtaacgcatttatctctaccagttatttcaaaccaagctcacgattctagaccttggctcaagagcgttgttaatcggctaagaaccaacaagcccgtaaatcccacattttattttgattacatttccgagcagtacaaagcatctgaaaatgcattcattgaagcagatattattccacctgatttctatacgcagattggattttcttctgccgatgcctttaaaaaaatcaggaatgcttttatctgcatagggcaaatctataatgacatcacgttcatagtttacaaatacctggaagtcaatgaacttaaagactcaggggatggagatcatcatttacaaggccttggcatggccaggctgggtgccgccgagctgaaatttctagttcaaaagctcaccggggtggctgagtcagactacgataaattttctgagtttttcttctgcggcgagggaaaaaatggcagcctaagcttaaaattcatgccgccattctggagcatttcggatgacgtatacttctgcccggccttagttccaaccctactgggcacgagaaatcttttgatctccatactaatagatgatgataaaaatactaaatacaactatgacggattgatatctcactttttcgaacctgaactcttgagaagggctcaaaggcatttcgaaagcaatggcttttatacttatttagaatgtgactttactgggggcgagattgatttattggttttttgcaataaatccaataccgtgatgaccgtccaggcaaaagccactttataccctgagtcagctcgcatggtgcgacgtttggacgatagaattcgggaagcagttgagcagaccaaacgatttgataaactcgaacccaaggagaaaactagtttattcaaaaaatcttttctcagcttggatgattcggcgcaaatcaatcatattcgcgcagttttaacaaattccagtttcggaagcacttttagctggcaattactagaaagcaacaaaataaccccaataaactgcaatcttcttaaaaacgtattgccttgctgcaatgttttaactgaactaccagaacaaattgaagcatttattgcaaagataaaatccgagattgagatcactgaggaacaaaaagttttcagcctccctggccatacgatttatcaacgacacgttgaaacacatcgcatgaagaacctttacgacgccaagtattggggcgagtga

SEQ ID NO: 356348 - DNA, 831 bp, Pseudomonas aeruginosa
atgcccaaggccctgcgtttcctcggctggcccgtgctggtcggcgtgctgctggccctgctgatcatccagcacaaccccgagctggtcggcctgccacgccaggaggtgcacgtcgagcaggcgcctctgctcagccgcctgcaggaaggcccggtgtcctatgccaacgcggtgagtcgagcggctccggcagtggccaacctgtacaccaccaagatggtcagcaagccctcccaccccctgttcgacgacccgatgttccgccgcttcttcggcgacaacctgccgcaacagaagcgcatggagtcgagcctcggctcggcggtgatcatgagcgcggaaggctacctgctgaccaacaaccacgtgaccgctggcgccgaccagatcatcgtggccttgcgcgacggccgcgaaaccatcgcccagttggtcggcagcgacccggaaaccgacctggccgtgctgaagatcgaccttaagaacctgccggcgatgaccctcggccgctccgacggcattcgcaccggcgacgtctgcctcgccatcggcaacccgttcggcgtcggccagaccgtgaccatgggcatcatcagcgccaccggacgcaaccagctcggcctgaacacctacgaagacttcatccagaccgacgcggcgatcaaccccggcaactccggcggcgcgctggtggacgctgccggcaacctgatcggcatcaacacggcgatcttctccaagtccggcggctcccagggatcggcttcgccatcccgaccaagctggccctggaggtcatgcagtcgatcatcgagcacggccaggtga

SEQ ID NO: 356349 - DNA, 825 bp, Pseudomonas aeruginosa; identical to SEQ ID NO: 355845

SEQ ID NO: 356350 - DNA, 402 bp, Pseudomonas aeruginosa; identical to SEQ ID NO: 329443

SEQ ID NO: 356351 - DNA, 132 bp, Pseudomonas aeruginosa
atggactgggttgagctggccgtcgcgcagttctgccaggacctgcgggtgagcgtaccggcgccgctggcgcgcgtggtgcaactggatttcgaggacagcggcaccttgcagctggaacgccatggctaa

SEQ ID NO: 356352 - DNA, 906 bp, Pseudomonas aeruginosa
atgacctggttagttatggcacttatggctccactgctgtggagcctttcaaatatcctggacaagctggcagtgatccatcatgcgaatcactggactacatttatatttctcctgagcattggaaatcttctttattctgcgctgatttttcttctctttacaccatctgactttgacacaacctcagcgcttctgaacctgctgtcaggattatgcatttttggaatgtatttcctatacgcaatgccgctgaagtcggtcgatatctctactgcgattgcgcttcatcagttaactcctttgctggtgcttgtcgtatcgatcctcttgcttggttattcgccaacagggattgagctgctcggcattgccttggtttttgtcggggtttactttgctgtggcaatcggcaaagggagaccaggctcgataagtttatcagcagtattgcttctaataggttcagcagtttttggggcggtggctacgctactatacgatcacctgctcctgagtcacagcctgccctcggttcttatgtttaactatgcaggctacggtcttggcgggactctgatgctgctggttccgaaatggcgccattccatcgcaaaggatgtctccgaaatgccaccaaagggctgggcggtgtatgcgctgagcaatctcttcgacgccggtggatacgcgctttttattggcgcattatctgctggtggaaacgttgcggtggtctcggttttggtcagtcttcacccggtatatgtgctagccttaagtcattggctagcaatagttaacccaaagatactcagcgaaaactttagctcgtcggacgcatataagcgcatgagcgccatagtcgtaatcgttgccggcgtaataatgatgaccaagatctga

SEQ ID NO: 356353 - DNA, 177 bp, Pseudomonas aeruginosa
atgagcgaaaagaacgccaccatcagcgccgccgttcctgcggccgtgaaatccgaagccgccgccgtcgcagtagcgcacggcatgagcctggccgacctggtgcgcgagctggtggcccgcgtagccgcccgtgatgctgcaatactggcctggctcgatgaggcccgccgatga

SEQ ID NO: 356354 - DNA, 345 bp, Pseudomonas aeruginosa
atgaccgacccgaagaacctggaaacctggctgcatgagaaggccggcccggcccatgacgccctgaaagccgacccggcccgcgccgtctcggccgaccgggtgcgctacacactcgatgagctgctggccgaagcatcaggccagtatccattgccaccggaacaacgcgaatgggtggatgccccggccgttggccgtgagctgctgcccgaggacttgcaaaccgccggagccattgccgccttcctggcccacgccgaagccagcgacgatctggactatatcgagcacgcccgcgaaatcgcggcgcaggccaaagccatgcacggcctggaagggtag

SEQ ID NO: 356355 - DNA, 336 bp, Pseudomonas aeruginosa
atgaaacttcgcaattccttcccgctggcggccgtggccgccctgctgatggcttcggccgcccacgccggccagcctgccgacgccgcccgcttttcgatcatggccccggtgcaggccgcctatgacgcctaccaggccacggcaagccggacgcagaacacgatggacagcatcgaggccgagctacgcgaacccgtgacggccgaacgccgcgagctgctggcggtgtcgcttgcagcagcccgcgcccgcgaggcggccgcgctggacaagctacaggcggaatcggcccttgcgcagttgaagatggccgacttcaacgccaccaggtaa

SEQ ID NO: 356356 - DNA, 936 bp, Pseudomonas aeruginosa
atgagccgcgctaaagcctggcggcgtgccgcccttgcaacctacatcgccgccggcgctgcattgaccctggcgggctacaccgtggcgaccacagccgcgaacgccaacaccctgcgcgacacgcgggagcgcatcgaggacttccagcgcgagcaaaccgccattgccgagaactcgataagcgcggccagtgtgcggcgcggcaccctgccccccgacacccggccgcctgtcgcgccggactggcccgccctggccgagcgcgccatgccatccgtggtggccctggcgggcatcgacaagccctatggcaccggccagaacaatcacgcctggcgtattcctggcgttcaacagaacgcggctacggccgccctcacccgcattcgcgcttggcatcgggattggccgaaagaggatgccaagcggcggcagcgcatcatctgcggcggcgtggccgtcgaaggaaacaaggtgctgaccgtggcccattgtgtcgaaggccaggaagcattgcgcgtgcgcaccgctgccggcgagtggcgcgaggcccgcgtgatcggcgcggacatttcccgcgacgtggcgctgatcgagatcgagggcgaccccctgcccccgattccggttgctggcgtcatgccccgccaggggcaggacgtgatggcgatcggttcgccaggcggctacggcttcgccgtgggcgtgggcatcgtggcgtggtatggccgcgatgccgcgatgctttcccccgatgatttcatgctggtgacggcttcaatcatcggcggcaactcgggcggcgttgtcgtgaacaccaggggcgaagccgtttcactggtgagctatggctatggcatctacacgcagaccgtgccgatagaccgcgcccaggcagttgcggccgagatcgagcgccgcgccgtgcggtaa

SEQ ID NO: 356357 - DNA, 219 bp, Pseudomonas aeruginosa; identical to SEQ ID NO: 204714

SEQ ID NO: 356358 - DNA, 264 bp, Pseudomonas aeruginosa
atggacacaccgaacggaaccgaagaatggacagagggccgtttcctggcttttttcgcggatgccgtgggcatcccgcagcaagacatgctgttgcagcttgccagttgggccatgttgcaattcttcgcggatgccaaagcctgcgcggctaccgacacgctggacgacctagccagagaactacgctgcttgtgggatgccgggcattcctacggcgttgatgacggctggaaaacgctttctgactacccaacaaagtga

SEQ ID NO: 356359 - DNA, 903 bp, Pseudomonas aeruginosa
atgacccagcaagccgcccacattcccgcagacgtgcgcgagcgcatcattgccgccgccaccgatcttttcgagcagtcaggccgcgaggcgatgcccaccgtcgatgccgtgcgccgggccgcccgcgtggatatgaacgcagccagtgccgtgatgcgcgaatggcgcaggtcgcagacggcccaggccgcgccggtggccgtcgccgtgccggaatccgtacagcaggccagcagcgcggccgtggccgcgatctggcaacaggcccaggagctggcgaacgaatccctgcgcagcgcacaggctgcatgggaaaccgagcgggccgagctagacgccatgcggcaggagctggccgaggctttcgagcgccaggccgccgagctggaaaccttgcaaacccgcctggcgtccatcgaggccgccgaagcggccgcacgcggcgaagccgacgagctgcgcggccaactggccgccgcccaggagcaggcgcacacggccgaggcccgcgcccaagagatcgagcgccgggccggcgagctgcgcacggagctggacagagcgcaccaggacgccgaccaggcacgcgcccaactcgaccaggtgcgcggcgaactggcgaaggtgcaggcgcgggccgatgccgaccaggaggcgcaccaggaacagcgcaagcaggcggccgccgaggcgcaccgcatggccgaacgcctcaccgccgcccaggccgagcgcgaccaggccatgaaggcggccggccaggcacgcgaggaagccgcccgcatggccgggcagctcgacacgctcaaagaacaatcggccgcgctgctggcccgcatcacgccgccgccggcggccgaggcgaagccgacaaggaagaagcccggcagcggcgagtga

SEQ ID NO: 356360 - DNA, 435 bp, Pseudomonas aeruginosa
ttgctggggccggcgctgcgtcggcaactgcatgaactgccggccctgcgcgacggcctgtcgctgagcgaacggctgaccctggagatcgtccgcgacggcgagcggccgagcgccggccaggtcttcgccgagctgaccgcacggcgcgagccgctgccctatctcggcgacctgatgttccgcgtcctgctccgcgcgctgctggaagagcccggtgcgctgctgcgcacgccggcgccggaactgccctgggaacgccagccgctggcgctgaccgctgcgggccgcgaggtcctggccgggcggcgctaccgcctcgacctcggcgcccccgaacgctgggtcggcggcgtacgcctgcgcgccggcaccgcgcactgggctctggacgagcaggaccggccggtatggcgggaggacccacggcactga

SEQ ID NO: 356361 - DNA, 483 bp, Pseudomonas aeruginosa
atgagcaagaccgattcgaccatgatctcggctgccaccctgttcctcttcatgctgctgcagcccatcgtcggcgccctctccgacaagatcggccggcggccgatcctgatcgccttcggcgtactcggcaccgtcttcacctacccgatcctcagcaccctgcacagcgtcgacagctggtggggagcgttcttcctgatcatggcggcgctggtgatcgtcagcggctacacctcgatcaacgcggtggtgaaggccgaactgttccccaccgagatccgcgccctgggcgtcggcctgccgtatgccctgaccgtgtcgatcttcggcggcaccgccgaatacgttgccttgtggttcaagagcgtcggcctggagagcggcttctactggtacgtcaccgcctgtatcgcctgctcgctgctggtctatgtgttcatgaaggacacccagaagcactcgaagatcacgaccgattga

SEQ ID NO: 356362 - DNA, 825 bp, Pseudomonas aeruginosa; identical to SEQ ID NO: 355845

SEQ ID NO: 356363 - DNA, 555 bp, Pseudomonas aeruginosa
atgagcaaacgtatcgtcgtcaccggcatgggcgcggtcagcccgctgggctgcgaagtcgaacccatatggcaacgcctgctggccgggcaatcgggcatcgccacgctcccggcggagctgatcggcgacctgcccatcagcatcggcggccaggtccccgaccgtgcccaggacccgcaggccggcttcgatcccgacctgctgctggccgccaaggaacaacgcaagatggaccgcttcatcctcttcgccctggccgccgcgcaagaggccctggcccaggccggctgggcgccgcagagcgccgaggcgcaggagcgcacggcgaccgtcatcgcctccggggtgggcggcttccatgccatcgccgaagcggtgcggaccaccgacggcaagggaccgcggcgcctgtcgcccttcaccatcccgtcctttctctgcaacatggcggccgcccatgtgtcgatccgccatggcttcaagggaccgctgggcgccccggtgaccgcctgcgcggcgggcgtgcaggcatcggcgacgcggcgcggatga

SEQ ID NO: 356364 - DNA, 558 bp, Pseudomonas aeruginosa
atgaatgccttcatccgttacatgcttgtcgcaatgctgctcgtcctgtcgcagaaaagcttcgccttgatgtgctggaaatcggacaacaagcaaaccgaagattatgtctacatcgatacgagcatcgctgttccatcggtcctccccaaggacaccgtactctggcggtctccgaactactccatatcgatcacttgcttccaggatcgcgactgggggccagagcaggtctatttctacctgagtccaaccggtcagggcgcgctgggttcggacctggaggtgggcatcaacctgaacggcgaagacctgcgctgctcgacactcgacaagtgccgaaaggagatcggcatgcacttcgatggttgctggacgggacgaggttgcgaaggcagggcgaagaagatgaccgtcaacttcaacttctttctctccaagcgggcaggtcccagtaccggtaaggaaggtcctatcacaggggtaaacgcctacccgattttccagttcgatggcgagagcgctatcaataacatagggggtacaacttccgcatga

SEQ ID NO: 356365 - DNA, 351 bp, Pseudomonas aeruginosa; identical to SEQ ID NO: 230937

SEQ ID NO: 356366 - DNA, 726 bp, Pseudomonas aeruginosa
atgaagaagcgacttgtcgccgccgccattgcggccgttctttgcaccgccactgcccatgcgcaatgggtcgtgatcgaccccacgaacctcgtgcagaacacgttaaccgcgatccgcacgctggagcagatcaacaaccagatccagcagctccagaacgaagcgcagatgttgatgaaccaggcgcgcaacctggccaacctgccgtccagtgtggtgaaccagttgcgcgccaacctggcgacgaccgagcggctgatcgcccaggcccgaggcttggcctacgacgtgacgaatctggatcgggagttcgcgcgcctgtatcccgagcaatacgccgccaccgtgagcggcgaccagatgtaccgcgacgcgcaggagcgttggcgaaacacgctcaacggcttgcagaccacgatgcagatgcaagctcaggtgtcgcagaacctgggcgaagacgaaagcgtgctggccgacctcgtgggcaagagccagtcggccgaaggtgcgttgcaggcaatgcaggccatgaaccagttgctggccttgcaggccaagcagtcgatccagtctcaacggctccaggtcacgcaggatcgtgcggcctcgctggaactggcgcggcaggcggcggccgccgagcgcgcccgcgaggtgcggcgacgtttcatgggcgatggcacgccgtacacgccgcagtccgtcaatttctaccgcgactga

SEQ ID NO: 356367 - DNA, 639 bp, Pseudomonas aeruginosa
atgatcgtcgcgctgctgaaccagaaaggcggcgtcggcaagaccacactcgccacccacatcgccggcgagctggcgatgcgcggtctgcacgtcatcctgctggacgccgacccgcagggttcctcgctggactggacgcagcgcagaagccagcagggcttgccacggctgttcagcgccgtgggcctggcccgcgaaacgctgcaccaggaagcgccagaactcgcccgccgcgcagatcacgtcatcatcgacgggccgccacgcatcgccgccttggcgcgctccgcgctgctggcggccgagcgcgtgctgatcccggtgcagcccagcccttacgacttgtgggccagcgccgagatggtggcgctgatccgcgaggcgcaagtctttcggcctgcgctgcgcgcggccttcgtcatcaaccggcgcgtcagtaccaccatcatcggcagggaagcacggcaatcgctagccgaacagccgctgcctgcgctgcgcagcgaagtgcgccagcgcatcgtcttcgccgacagcgtggccgctggccggctcgcccgcgaaaccgcgcccgacagcgccgccgcacgcgagatcgccgcgctcaccgatgaactgctgcggtggccgacatga

SEQ ID NO: 356368 - DNA, 534 bp, Pseudomonas aeruginosa
atgaccgcatccgcttcgcctgccgctggcgcggctacggctgcgctcgcagtaccttccggccagcctgccagcgcgccgttgacgcgcgtggcactggcctacatcgaaccgcgcttcaaactctacctgcgcttcggcgaacctgcgcgcacgcaccagctcgaccgctggcggcgctgcgcggtgttcctgccgggcgccatgttgtgccgcatccgctggcaggccaacgactacggcacgattcgctggcagctcatggtgatgcaggcttgcacgccgctcgatgcggcgcagcgcattaccggcgtgcagccgggcgcgcgcctgctgctgcacgctgagggcgaaaatcaggtgcgcgccgtgctggagcgcatcgacgccatcgaggcgctgggcatcgcgcctgttggcgcctctcccgtgtactggcacacgctcgccaaccggctcgctgcgcgcctgccgctgcccgaatacaccgccgagcggcacgccgcatggctcatcgggagcgcgctgccatga

SEQ ID NO: 356369 - DNA, 285 bp, Pseudomonas aeruginosa
atgacagcgaagccgccaccaaacagcaaacgcacggtaaagcgcgtcggcatcggcgcgcgtccgcccgcgaatccgcacgccgaggcgtggattcgccaaggcgacgccgatgcgctgggcaagggcgacctctacaccgcccgcctgaccctcgacatcacgcccgccatgcgcgcgcgcatcaaggtgtctgccttcacgcaaggcgtgaccgtggccgacctgctgcgcggcctgttggagcgggagtttccagagcatcgcagggagaacaccccatga

SEQ ID NO: 356370 - DNA, 639 bp, Pseudomonas aeruginosa
atgatcgtcgctctgctcaaccagaaaggcggcgtgggcaagaccacgctcgccacgcacatcgccggcgagctggcgttgcgcggccagcatgtcgttctgctcgatgccgacccgcagggttcatcgctggactggacacagcgcagaagccagcaaggcttgccaaggctgttcagcgccgtgggcctcgcacgcgaaacgctgcaccaagaggcgccagaactcgccaggcgagccgatcacgtcatcatcgacggcccgccacgcatcgcggcactggcgcgctccgcgctgctggcggccgagcgcgtgctgatccccgtgcagcccagcccctacgacctgtgggccagcgccgagatggtggcgctgatccgcgaggcgcaggtgtttcggcctgcgttgcgtgcggccttcgtcatcaatcggcgcatcagtaccaccgtcatcgggcgcgaagcgcgccaggcgctggccgaccaaccgcttcctgcgctgcgctcggaagtgcatcaacgcatcgtgttcgccgacagcgtggccgctggccggctggcacgcgagacggcgccggacagcgccgccacgcgtgaaatcaccgccctggtggacgaactgctgcggtggccgacatga

SEQ ID NO: 356371 - DNA, 390 bp, Pseudomonas aeruginosa
atgtttcgcgcgctgttggactcctcccgttgctaccacaccgcttccgtgttcgatcccatgtcggcgcgcatcgccgccgacctcggcttcgagtgcggcatcctcggcggttcggtggcttccctgcaggtcctggcggcgccggacttcgccctgatcaccctcagcgaattcgtcgagcaggccacccgcatcggccgggtggcgcgcctgccggtgatcgccgacgccgaccacggctacggcaacgcgctgaacgtaatgcgtacggtggtcgaactggagcgcgccggaatcgccgcgctgaccatcgaggacaccctgctgccggcgcagttcgggcgcaagtccaccgacctgatctgcgtcgaggatgagagagggtga

SEQ ID NO: 356372 - DNA, 1062 bp, Pseudomonas aeruginosa
atggccataggagacgatcgcctggttcaccgggaagcgctcggcctggtagccggccagggcatcctccagcgcgcaggcgtcgcgcaaggccaggtcgagggcgtcggccagggcgctggcgtcctcgatggccaggttcatgccctggccggtgatcggatgcacgttgtggatggcgtcgccgagcatcgccacgttgtccgcccagtagcggtccaggttcaggtagccgatggggatgcccttgaagcgcgaagtgccggtgacggcggcgatcgcctcggcgctctcgtcgccgacgaagcgttgcaagcgccggcgcagcgactcgccgcgggtgtcggccatcagctcgcgcgcctcctccctggggaagctcaccaccagtcgcgcgcggtcgaaaccgatcggatagaagtaggccagcccgccctgcgagtccacgtacaggcggttgcgctcggccacgcagggcgccagggcgaaggtgccgaccagcatcggcgacgggtaggggcggcgttccacatcgatatcgagcagccggcggcgcacgtaggaggcgataccgtcggctcccaccaccacccgcggacgcagcacgcggccgtcgttcaggcgcacctggtcgatcgcgtggcgctcgtcgcgctgcaccgcttcgatgcgggtctcgaacagcatctcgacggtcgcttcgccgtcgattttttccagtaccaggcggcgcagcgactcgcagggcatgaggatgaaatagccgcgcgcgtcgacgctggaatagttgaaatagcgaagcagctcgccgtcgtgatagacctccagctcatggcggacccgcccaccgcgacgggtcacctcggccaacaacccggccgcctcgaccacccggatgccggccggcttgagcaggtcggcgccgttgatcgcgcgttcgcgccgtgcctgctccactaccaccacgcggtggccctggcggccgagcaggtaggcgagcatcgccccgccgatgccgcagccgttgatcagtacatcgatatggttgtccgtcatggatga

SEQ ID NO: 356373 - DNA, 525 bp, Pseudomonas aeruginosa
atgaaccgcacgctggcctacaagctcggtgccatcgccctactcatcctgctattgctgattcccctgttgatgatcgacggcctgatccgcgatcgccaggaggttcgtgacggcgtgctgcaggatatcgcccgcagctccagctacagccagcgcctcaccggcccgctgctggtggtgccgtaccgcaggacggtgcgcgagtgggtcaccgaggagaagaccgagaagcgcgtgttgcaggagcgcgagcagcgcggcgagctgtacttcctgcccgaccgctttgccctcgacgggcagatgcgcaccgagctgcgctaccgtggcatctaccaggcgcgcctgtaccacgtcgacaacaaggttgccggctacttccaggtgcctgcgcactatggcatcgaagaagacctggaggactacgccgttcctggcgatgggcatcagcgacatccgcggcatcgagaatgccctgcgcctgtccctcaacggtgccagcgtcgacttcgagccgggtag

SEQ ID NO: 356374 - DNA, 405 bp, Pseudomonas aeruginosa
ttgaccatcattgcccggaccaacgccgaactgatcgacgtcgatgcggtgatccagcgcaccctggcctaccaggaagccggcgccgatggtatctgcctggtcggcgtgcgcgacttcgcccacctcgaggcgatcgccgagcacctgcacatcccgctgatgctggtcacctacggtaatccgcaactgcgcgacgacgcccgcctggcgcggctcggcgtgcgtgtcgtggtcaacggccacgccgcctatttcgccgcgatcaaggcgacctacgactgcctgcgcgaggagcgcggtgcggtggcctcggacctgaccgcctcggagctgtcgaagaagtacaccttccccgaggaataccaggcctgggcccgcgactacatggaagtcaaagagtag

SEQ ID NO: 356375 - DNA, 1401 bp, Pseudomonas aeruginosa
atgagcagatcgctgcgcagttggcagagcaactgcatcactatggcgttggagcacttcaccgtcacgccgcacttcttttgccaggcaacgccgggagccggaaagacgcgtatggctgcagaaatggccagccagttgcttaagcaggacagaatcgatttggtgctgtgctttgcgccatcctgccaggtggtggagggttttcgttcgacctttgcgaaagtcctaggcagacgtctcgatggccagataggtgccgtgggcgcggcctatacctatcaggctatggaataccgtgatgaggggttctggcagcttctggatgactatcgggtactcgtggttttcgatgagatacaccattgtgccggccgcgatcctctattcagcaatgcctgggggcagcagatactacgccggatacaggatcgtgccgcgttcacgctggccctcactggtacaccctggcgctcggacgataagggcattgctctggctcgctactcgtcacccgaggggtatctaatctgcgattaccgttatggcttgaaagacgccattgcagacggtgtgtgccgatcccctcgcattgttctgcttgacaatcagaaggtgaaactcacggaagaacttggcgctgatagctccgtgaagctgtttcccagcatcgccaagcttttgggggagtcacctgtaacctatgaggaactgctgcgccatgatgaattgatcaatccaatcctcgaccttggctgcagaaagctcaacgagttacgccagatcaaacctgatgcagctggtttggtggtggccaccgacattgaacacgcccagcaaattgccctggctctggaagcaatgggtgaggactgccgtatcgtgactaacaaaaccccggatgcgcagcaggtgatcaatgtattccgcagcagcaactaccgatggattgtcgccgtcggaatgatcagcgaaggtaccgacattccccgcctgcaagtgtgctgctatctcagtcgtatccgcaccgaactgcattaccggcaagtgctggggcgggtgctacggcgcacaggtgaatcagatgacctcgcttggctattcatgctggcggaaccgaagcttcagggctttgcggagcgaattgcagatgacctgccggatgaccttgcggttttgagtgatgtgctgatgccaggtctcacttcaggctcagggcctgtgtcgactggtgattttgaccatatcgatggcatcaatggtgctgatctaagcgacgcggtatcgggtattgggccgcaggctgcgaacatcatttcgctaggtggttttgcaactgagcccgcttatcaggtcagcttttcccaacattacaggcagcagttgttagcttgcttttga

SEQ ID NO: 356376 - DNA, 1590 bp, Pseudomonas aeruginosa
  misc_feature (1502)..(1502): n is a, c, g, or t
atgcgccggctggtcaacgactacctgcaaccgcccaaggtgacccgcaaacgtggcaccgaagacattatcaatgacggtataaacgaccacgtgtcagagtcaaatctgtgccgtatcgccctgattggcacgatgctggatcgtgacggtgaaaaggaaaacgtattccgtcgtactctcgaaagcgttcctgaaatcgacgcgaattgtttctcgctcgaaggcgagaatctcacaggtttcatgcgcacgctttccagtgtatcagccgatggaaatgccctgactctcggtagatacacgctggatgaacatgctgtcgcctacctcaacggcaacaaatttttccagcgccacgccttcattggcggcagcaccggttcgggtaaatcttggacgactgccaaaatcatcgagcagatgtcggggctctccaccgctaacgctatcgtctttgaccttcatggtgaatacgcgcctttggtcggcaatggcatccagcatttcaaggtggccggccccgcagacgttgaagctaaacgcaccctcgacgacggtgtgatctaccttccgtactggctgctttcttatgaagcgctcgtttccatgtttgtagatcgcagcgaccagaacgcgcccaaccaggccatgattatggcgcgtgaaatcaaccacgcgaagcgcaaatatctagaagataacggccagcacgacgtgctgaagcacttcactgttgacagtccggttccgtttgacctcgatttcctcatgagcaagctgaacgagatcaacgttgagatggtcgctggagcacgtggtgagaagcagggcgatttcttcgggaagctcgctcgcatgatttcccgacttgagaacaaaatctccgatagacgcctcggatttatgttcaacggtggtggagacgtactgaatttcgcttggcttgagaaatttaccactgccgtactgggtagcactaatgagaatggtagggccggtatcaaaatcattaacttctcagaagtcccatcagacgttctgccgctgatcgtatccctggtcgcacgggtcacgttctccgttcagcaatggacgccttctgaactacgccaccccattgctcttctgtgtgacgaagcgcatctctacatgcctcagcgcaacatcgccgactctgccgatgatatctcgctcgatattttcgagcgtatcgcgaaggagggccgtaaatacggtgtcagtctggtggtgataagtcagcgtccgtccgaagtaaataagacgatgctcagccagtgcagcaacttcgtatccatgaggctgaccaacgccgaggatcagggcgtaatcaagcgtctgcttcccgatagtcttggcggatttagtgacatcctgccgaccctcgatacaggcgaagctctggttgtcggtgatgccagcttgctgccaagccggatcagaatcgaagagcccaaaaacaaaccgaatagcggtacggncaatttttgggatgattggcagaagccaatcaaggataagcgcttgctgattgccgtcgataactggcgcaagcagaatatccaataa

SEQ ID NO: 356377 - DNA, 540 bp, Pseudomonas aeruginosa; identical to SEQ ID NO: 352178

SEQ ID NO: 356378 - DNA, 1260 bp, Pseudomonas aeruginosa
atgcagatcagccaggggcaacgtatcccgttatcgaatcttatgcagggtcagttcctgtccctcgctatccagatcaactccccttacacggtcgatctcgcctgtttcggtctggatgttgcagggaagctgtcggatgatcgttacatgatcttcttcaaccagccaaactccccttgcggcagcttgaagcaagctggcgcggagttcagtctgaacctcgcagggctcccctcttctattgatcgcctggtgttcaccgctgcaatcgacggcgtaggagccatgtgcgacatccagtcttcatccttcaccatcaaggatgcgaccggaatgatcgttgctacctgccccttcgctggcaacacctttgccactgaaaaagccatcatggtggcggacgtctaccgtaaagatggccaatggcgcctggcgtcgaatctccaaggtttcaacgaagggctcagcgccctggtgaagcatttcggtggcgaggttgcagatgacgcacctcccgccgatccacctgaatcggcacccgttcaagccactatctcgttggagaagaaggtggcggccgccgctccgcagttgatcagcctggccaagaaagcccaggtaagtctcgaaaaagcgaagctgacgcatgtgaaggcacgcgtagcgttggtacttgatgcctcgggctccatgaattctcagtatgccaagggccgcgtgcaagaagtggtcaacaggctgcttcccctggctgtccactttgatgacgacggctcgatcgactgctgggctttcgcagcacaaccgcagaagctctccgagattaccctgagtaacttccagaacttcatcaataccgacaactatggttggcgtgactggaatgttggtagcaggatcaacgacgaacccaaggtaatggaacaggtgatcaagcattacctcagcgacggcgaccgctcaccagtctatgtgctcttcatcagcgatggtggcgtccatgaaaacaggaagatcaccaagctcatgaccgatgccgcgcaactgcccctctactggcagttcgtgggccttgggggcagaggctacgggatcctggagaagctcgacgacatgaaaggccgagtagtggacaactgtggcttcttcgcgctggatgacctacaccaggtcactgaggaaaggctctacgaccagctcatggaggaattcccgagctggatcagggaagcttcggcgaaggggatcatcggctag

SEQ ID NO: 356379 - DNA, 363 bp, Pseudomonas aeruginosa
atgggatggcgtaccgactggagtaatcccatactcatgcatggcatcttcggcgctcacccaaggatcaaaaacatcaacctgtatgttgtattccgccaactcacggacaatatcgacgactttggtattgcggaggtctggacaattttccttgaatgtaagccccataagcagaacgcgagcaccgtccacgtggatacgacgcttgagcatagccttgaccagttgcgaaacgacataggcacccataccgtcattcaaacggcggccagccaggatgatctctggatgatagccaatactctgggctttatgagtcagataatatggatcgactccgatgcaatgaccgccgactag

SEQ ID NO: 356380 - DNA, 207 bp, Pseudomonas aeruginosa
atgaaccgggcaccacgccgggacactaccagcagccctgacggcgggagggggaaaaagaaggggggaggggctcagccggtgccggtctggagttccgcctcgaactcgccgaagcgcctgatttcctcgcgcaggttgaggatgaaggcgctgaggtcgctgaagctgctgctcttcaggaagtcgctgttgggcacgatgtag

SEQ ID NO: 356381 - DNA, 1083 bp, Pseudomonas aeruginosa
atgggcgacaagaccgaagcccgccgcagcatgatcgccgccggcgtaccctgcacccccggcaccgaaggcaacgtcgccgatctcgccgaggccctgcgcgaagccgagcggatcggctacccggtgatgctcaaggccacctccggcggcggcggtcgcggcatccgtcgctgcaacagccgcgaggagctggaacaggcgttcccgcgggtgatctccgaggcgaccaaggccttcggcagcgccgaggtattcctcgagaagtgcatcgtcaatcccaagcacatcgaggcgcagatcctcgccgattccttcggcaacaccgtgcacctgttcgagcgcgactgctcgatccagcgccgcaaccagaagctcatcgagatcgccccgagcccgcagctcacccccgagcagcgcgcctatatcggcgacctggcggtgcgcgcggccaaggcggtgggctacgagaacgccggcaccgtggagttcctgctcgccgacggcgaggtgtacttcatggagatgaacacccgggtccaggtggagcacaccatcaccgaggaaatcaccggcatcgacgtggtccgcgagcagatccgcatcgcttccgggctggagctgtcggtcaagcaggacgacatcgtccatcgcggctacgccctgcagttccgcatcaacgccgaggacccgaagaacaacttcctgccctcgttcggcaagatcacccgctactacgcccccggcggccccggcgtgcgtaccgacacggcgatctacaccggctacaccatcccgccgtactacgactcgatgtgcctgaagctgatcgtctgggcgctgacctgggaagaggccctcgatcgcggcctgcgcgccctcgacgacatgcgcgtgcaaggggtcaagaccaccgcgccgtactaccaggaaatcctccgcaacccggaattccgcagcggccagttcaacaccagcttcgtcgaaagccacccggaactgacccagtactcgatcaagcgcaacccgtcgcacctggccatcgccatcgccaccgccatcgcggcccacgccggcctgtaa

SEQ ID NO: 356382 - DNA, 480 bp, Pseudomonas aeruginosa
gtgatcaagaagatcctgatcgccaaccgcggcgagattgctgtccgcatcgtgcgcgcctgcgccgagatgggcatccgctcggtggccgtctactccgaggccgatcgccacgcgctgcacgtcaagcgcgccgacgaagcccacagcatcggcgcggacccgctggccggctacctcaacccgcgcgccctggtgaacctggcggtggaaagtggctgcgacgccctgcaccccggctatggcttcctctcggaaaatgccgagctggcggaaatctgcgccgagcgcggtatcaagttcatcggcccgtcggcgcaagtgatccgccgcatgggcgacaagaccgaagcccgccgcagcatgatcgccgccggcgtaccctgcaccccggctatggcttcctctcggaaaatgccgagctggcggaaatctgcgccgagcgcggtatcaagttcatcggcccgtcggcgcaagtga

SEQ ID NO: 356383 - DNA, 300 bp, Pseudomonas aeruginosa
atgcctttcgacagcgaagaggccctgatcgaagaggccaacgacagctgctacgcgctggccgccggcatctggacacgcgacttccagcgcgcctggcggctcggccgcgccgtgcaggccggcaccgtgtggatcaacacctacaagcagttctccatctccacccccttcggcggctggcgcgacagcggcctgggccgcgaaaagggccgcctggggatactccagtacatggagcagaagagcctctactggggcctgaacgaacagccgctggcctgggccggcagccactga

SEQ ID NO: 356384 - DNA, 288 bp, Pseudomonas aeruginosa
atgcccgagaccgggtggaagatcaggttcttccagagcagcgcgctcaccgtcggcatgatgaagaacggcgagatcagcaacacccgcaccgcgccgcggccgaagaactcgccggcctccagcagcgcggcgatgagcacgccgaacgccacgctgatcgccagcacgctgcccaccagcagcagggtgttcagcgcgccgggcaggaagccggcgtcggtgacgaagaaggtgaagttctccaggccgacgaaggcattctcgccgggatacagcaggttgtag

SEQ ID NO: 356385 - DNA, 1023 bp, Pseudomonas aeruginosa
ttgaacgccccccaggaacttcatcgctttatcctcgagccgttcgacgcccgcagcttcgcgacactttgcgggcagttcgacgagcatctccaccagatcgagaaacgcctcgacatcgagatccgcaaccgcggcaaccagttcgaactggccggcgaaccgcgccggaccaaggttgccgaacgcctgctgcagcgtctctaccgcgaggcgcagaacggcaccgatctcactcccgacaccgtgcacctgtacctgcaggagtccggcctggaagacctcgaggaattgcagagcgcgccgcaggtcaccctgaaatcgcgcaaggcgcacatccgcccgcgcggcgccaaccagcaacgctacgtcaaggcgatcctcgaccacgacatcaacttcggcatcggcccggccggcaccggcaagacctatctcgccgtggcctgcgccgtcgacgccctggagcgcgagcagatccgccgcatcctgctggtgcgcccggcggtcgaggccggcgagaagctcggtttccttcccggcgacctgtcgcagaagatcgacccctacctgcgcccgctctacgacgcgctctacgagatgctcggcttcgaacacgtggccaagctgatcgagcgcaacgtcatcgaggtcgcgccgctggcctacatgcgcgggcgcacgctgaacaacagcttcatcatcctcgacgagagccagaacaccacagtcgagcagatgaagatgttcctcacccggatcggcttcggctccaccgcggtgatcaccggcgacgtcacccaggtcgacctgccccgcggcacccgctccggcctcaagcacgtgatcgaggtcctgcaggacgtccccggcatcagcttcacccacttcaagcccaaggatgtggtccgccacccgctggtgcagcgtatcgtcgaagcctacgagcgtcacgagagccgccagcaaggccaggtgcggccggtcgagggaacgggcaagggcggtcacgatgccgcttga

SEQ ID NO: 356386 - DNA, 936 bp, Pseudomonas aeruginosa
atgcatgctatggcaccatattcgattcgcgtttataacccaaatttgaaaggggtaaggttggaggatcgttacgctctgcttgataaggttgggcagtttgatgcttatgctgttctccgagaccatttgctggctcaaggtgagaaatttaagctgatggaggaggataagcaggtttataggtattttggtattaatgcgaacgaccagaagagagagatcgcgggatggtttgagtttggaacctatggggtgaagaacgatattattgatgtggaaactggagtcgttgattttgaaaagacacagaagaatgcagagatagtacgccactatataaggttatatattccggctggatttaatgaaggtattgctcttcttcatagctttaagggtaatgggataaagacggtgctgtacgagcaattgcgtgcgcactttcataacgtgacgaagcttaatcttcagcttaatccacttgcgtataataaggcatttgaactctggaaggatgctgttgcgaaagagataaaattggttcgtttttccggtatgggtgatataaccgatcaaatcaagaggatgggacatgacgagcacgaacaagagcttattattaaacctccgcgaagaaagagcttaggtaagctggtagatttcttcacgccgggtacaccggaaaatgctaccgttgaagttttaatgcccttgtgcagccaattaaagactactgtgacattaaatgggaaaacgcgcacattcaatatcggtcggccggcaaccgagcaagtatgcgaggtagaagtggacgaggatgatgtggctattattgcgggtaatcctgagccgcagtctctgcatgattggtgtacaaaagtcttgggtgagtttgttcagtccatctatccaggaatgggagtcgtcaagtga

SEQ ID NO: 356387 - DNA, 843 bp, Pseudomonas aeruginosa
atgacccagccctcgaaacggaatgggcaggttccgctggacgacgccctggagcgtcatcgcgacgcgctgaaggacctgttcccgctgccgccctcccggccgaaatcgcgcaaggcaagcaaggcggccggcgtcgcgctattgctggcgctggccatcggcgccctggcctggctggacccggcctacaagcgcgagcgcttcgccaccgccatcggtgagcggcgcgacgtgaccctggccgacggcagccagctcctgctcgacagtggcagccaggtcgaggtcagttggcacccgctcagccgccgggtcgcgttgcgcgcggggcaggtgcttttcgaggtatccccggcgcgctatcggcccttcgtggtgtccgcgggttcgaccgacatccgcgtgctcggcacccggttcaatgtgcgccgcctggacgacgatgtccgcgtgaccctggagcgcggccgggtggaggtcggcacctcggctacggcgcaagcgccagtcgtgctcctgccgggccagcaggtcgatgccattggcgggcaactgacgccgctggccaaggtcgatgccgccacggcgatggcctggaaagacgaccgcctggtcttcgagcgcacgcccctgggcgaagccgtcgcgctgctgcgccattatcgcaaggcgcccattctcctggacgaccccagcctggcctccctccggctgaccggcgtcttcgccgcgcacaacgccgaccggctgctcgacctgctgccgagcatccttcccgtggccgtgtcgcggcaggaggacggcagcgtcgagatccaacgcaaatcgacgcgaaaataa

SEQ ID NO: 356388 - DNA, 2142 bp, Pseudomonas aeruginosa
atgatggagtcgaaggcgcttgagggcttcgaggctgacgacagcattcgtctgatcctaagggatggggagaaggacatcgatgttggcgaaatcgacttggccaaaagcctccgcgatgcggtctacatcccggcctcgagcaagtcacgacgcgtaaaagctgactcggtgctgtatcttcagagtcagcagaacaaaacgtctatggcccgccgcaaaagtgcaatggatcggatcatcaaccgacaatctgtccagccagatctattggactacttcgacgaaaagtgcaagctagtccccaaacagtactcagatgccccaacagaagaagacttcgcagtttatgagcggatcacgtctgacggcactgtcattggcttgaatggcgcacaaaaggaagccttcacgaatctggttactactggacctgtaggcttgctccagggccctccaggtacagggaaaactgagttcatcgccgcgtttgcgcactacctgatcgataaggtcggagtgagaaacatccttctggtgagccagtcgcatgaggcggtaaacactgccgctgagcggatcagagcacactgtcgtcgcttgggtactgctctcgatgtagttcgcttcagcaaccggggccaggtggtctccgaggagctcctcgatgcctactcccgaaacatcgttgaccgccagaggaatagcttcagtgccgaactcaaggaaagggtaggtgccttggcgtcgtcactcggattgggtacggagtttgcccagaccatggtggacgtcaaccaacggatcactcgccagataaagtccctggagagcctcgagaaagacatcatgcgagccacggacgacgaggatcgagccgccctggaagctctccgaaaagctgtgcagaacgatgtaagtctttccgctaaggcttaccttggcgattccgatttgagcgaagttcctccgcaaacgatccttgagcgagtctatgcacgcattcagtcggaccatggggtccgaccgccggagttcaagcactgtcaggatctgatccaactctcgcaggatttcagtgagcgcttgtcgagcaatcgcgctaactacgacgagtttttaatgagatcccgtagtctcgtatgtggaacctgcgtagggattggcctgcagcacctgaatcttgctgcaacccactttgactgggtgatcatcgatgaaggtgcacgatcctcgcccagcgagctagcaatcgccatgcaagtcgggtcccgaatcctcctggtcggtgaccattcacagctgcggccgacgtatgaggatgagcacaagaaagctattgctcaatctcttggcattcctgcgaactcagctgaattccagcgagtcatgcgaagcgattttgagagagtgttcgaatccccttacggtcgtgcagcacgagcaaccctcaaaacgcaataccgcatgcttccgccgatcggtgaccttgtcagcgaaatcttctacgagaacgaactcaagaacggtgagcggccgagccctgaatacttcgcccaaaagaccccaagctgcctgtctcacattgtcacttggctggacaccggaacgcttggcagtaaggcctttgatagcggtggtcaaagcatctcaaacggcgctgaggccgacgcaatcatccagcttttgcaggagatcgaagctgatgaagacttctgcgcgggaatggttagagaaatggcagagtcccaagaacctcctattggcgtcatctgcatgtaccgtgagcaacgcaagctggtccgcaagagattcgcagagaaatcatggtctgaggacttccgcagacttgtcaaaatagaaacagtggacagttaccaaggtaaagagaaccacatcattatcgtgtctttaacacgagccaagtctgaccagcacccaggtttcctatcaattccgaaccgtatcaacgtagcgatttcacgcgctatggagcgccttattattgttgggagtatgaaaatgtggagcggccggaacgcaaaactcccacttggcaaggtggcaggctacattggggccagacaggatgataggaactatcaaattgtgcctgctacaccctcgaagaggattgtctga

SEQ ID NO: 356389 - DNA, 270 bp, Pseudomonas aeruginosa; identical to SEQ ID NO: 355876

SEQ ID NO: 356390 - DNA, 435 bp, Pseudomonas aeruginosa; identical to SEQ ID NO: 355877

SEQ ID NO: 356391 - DNA, 594 bp, Pseudomonas aeruginosa
gtgccgcacggaatgttcagcgagccggccgccagcggttcctggagcagctggatatcaggccagataggcagcgcccaaatgcgcgcgccccagccgaacagcgtcatgtccagcagctgccgctcgcggtccaccgcgtacatgttcgcttcgaactcccggcgcggcgccaggcgcatggctcggcgctgggtcacggctgattcgctttgcaggatatttgtcgaggcgctcaggcgctcgacgatgctgtcgccccagtccggcgcgaacgtccaagcgatgatgcgattgccggtgatgaccaggaccaggtccggctcgccctggagcctccaaacgatcctcgcattgacgacgggcgggccgtccgtgccaatgctgaccgtccaagtgcgttcttccagggcggcaaaacccagcggcggcgacgcctggccggatagcgtgatgccgtctgcatcttcccgctcgatggcggtcagcgtgcgcggactgaaatatgcgttccagactgatgccggtcgtacctgggtgctgacgacgttgcccaactccatggtcgtagggatcagccacaggcggttgtag

SEQ ID NO: 356392 - DNA, 648 bp, Pseudomonas aeruginosa
atgggcatcgcctggtgcattcgcatcctcgcgctgttggtgtgtgtgctcgtcgcaatgttgaaattgaacgctaccttgcgatttgcagtgatggcgctctccaccggcgtggcgctggcgacccttgcgtgggcaggccacggcgcgatggacgacggcgttcgcggctacatccatcttgcgtcggatatcacgcacctctgggcagcgggcgcttgggtgggcgcattggtggcgttcttgatgctggcatcccacaagcaggatgtcgcgcaagacccggtagcggtcctcagtcggacgtcgaatggctttgctcgcataggtacagcgatcgtggctgcactcgtcgtgagtggaattctcaattacctgttgatcgccggaccatcgtttgatccgctcatctcgacgctgtatggccggctgctgatggtaaagctcttgcttttcgcaggcatgctggcgttggctgctgccaatcggtatcggttgagcccgagcctggaggctgctttgaaggcaggcaatcgcgcacaggcagtcatcaagcttagacagagtctgttcacggaggcgaccttggccgttttggttctggcgagcgttgcatggcttggcatcttgtctcccactggaacctag

SEQ ID NO: 356393 - DNA, 645 bp, Pseudomonas aeruginosa; identical to SEQ ID NO: 330051

SEQ ID NO: 356394 - DNA, 375 bp, Pseudomonas aeruginosa
gtgagaaaaggctaccccagcgacatcaagcgcgagcagttcgaggtgatccggccattgctggagagtgcgcgcagaaagactgccccacgcaaagtggagctgtacgaggtgttctgcgccgtgctgtacctgctgcgcacgggctgtcagtggcgggcactgcccagcgactttcccaaatggcgcaccgtgcactcgtactttgccatctggagcgagccacgcgagggtggcagcctgctggagcaggcattaaaaaaatcaggttggcgcggcccgcgagaaactggggcgcaacgcctgcagcacgctcttgatcgtggacgcgcagagcgtgaagaacacggacacggcgggcttgaagggctatga

SEQ ID NO: 356395 - DNA, 603 bp, Pseudomonas aeruginosa
atggcagcgccagccgtagctgcccccgtatcgcagttcttgcgcgcactggtgctctctgcaggcgtgtatgccagcaccccccatgcccaggaggtcccgccaccggcctaccagcttgccgcccagcgcgcgggcatcccttcgacggtgctctacgccgtggccttgcaggagagcggcatccggcgcaacgggcgcatcgtcccatggccgtggtccctcaacgtcgccggccaatcgcgccgcttcgccacgcgcgccgacgcctgcgctggcctgcagcaggcgatgcgcgccacgccgcacacgcgcatcgacgcgggcctgggccagatcaaccttggctaccacaagcaccgcttcaccggcgcgtgcgatctgctggacccgtaccgcaacctcgccgttgccgccgagatcctgaaggagcagcacgcccccggcgaggactggctgctggcgatcggccgctaccaccgccccgctggcggcgagcccgccgtccgctatcggcgcagcgtgtcccgccaccttgcccgcgtgcagggcacgcgcccaaccgccgcggtcttcgccgcgcgccaggagacctccccatga

SEQ ID NO: 356396 - DNA, 312 bp, Pseudomonas aeruginosa
atgcgcgccacgccgcacacgcgcatcgacgcgggcctgggccagatcaaccttggctaccacaagcaccgcttcaccggcgcgtgcgatctgctggacccgtaccgcaacctcgccgttgccgccgagatcctgaaggagcagcacgcccccggcgaggactggctgctggcgatcggccgctaccaccgccccgctggcggcgagcccgccgtccgctatcggcgcagcgtgtcccgccaccttgcccgcgtgcagggcacgcgcccaaccgccgcggtcttcgccgcgcgccaggagacctccccatga

SEQ ID NO: 356397 - DNA, 387 bp, Pseudomonas aeruginosa; identical to SEQ ID NO: 324062

SEQ ID NO: 356398 - DNA, 312 bp, Pseudomonas aeruginosa; identical to SEQ ID NO: 356396

SEQ ID NO: 356399 - DNA, 159 bp, Pseudomonas aeruginosa
atgaagatcaacgccagcgtcgcgggtgccggcgacggcaagaccatggtcatcacgccggcacaggcgctccagcccggtgactatcgcgtcgaatggcgtgccgtctcctcggacacgcatccgatcacgggtaacgtcaccttcaaggtgaagtaa

SEQ ID NO: 356400 - DNA, 312 bp, Pseudomonas aeruginosa
atgcgcgccacgccgcacacgcgcattgatgcgggcctgggccagatcaacctcggctaccacaagcaccgctttaccggcgcgtgcgacctgctggatccgtatcgcaacctggccgttgccgccgagatcctgaaggagcagcacacccccggcgaggactggctgctggcgatcggccgctaccaccgccccgcaggcggcgagcccgccgcccgctatcggcgcagcgtgtcgcgccaccttgcccgcgtgcagggcacgcgaccagccgccgcggtcctcgcggcgcgccaggagacctccccatga

SEQ ID NO: 356401 - DNA, 372 bp, Pseudomonas aeruginosa
atggcagacaagaaagttattttcgttgcattcgctattgaagacgaaaggcaaagggactttttgaaaggtcaatcactccttacgaattcccctttcgaatacatagatatgtcagtcaaggaggcctatgcatcggagtggaaagacaaagtccgtgcccgaattcgtcgatcggatggcgtgatcgccttgattagcaagaactccttggcgtctagcggacagaaatgggagattgcatgcgcacgtgaggaaggaaagaaagtgttgggcgtctgggcctattccgatgatcggactaaagttgaaggcgtaaacactgtcgcatggacatgggatgccataaagaactttatcaacggtctttga

SEQ ID NO: 356402 - DNA, 258 bp, Pseudomonas aeruginosa
atgaaggcgtcccagacctatcagtgcatcgtcaagttcgatggcgccggcttctggaccaataccattcagaagcagcgtgcgacctgcacctggagcgacaaggtggcagcctcccgccttgccgaacggctattcggcgaggacaacgcctacatcacccgtatgccggcacaggcaggcgaccacgaaaagcgcatcgagagtcgctgggaactgtcctgcaaagatcccaaggaggtagcgcgcgatgcctga

SEQ ID NO: 356403 - DNA, 753 bp, Pseudomonas aeruginosa
atgaacatgcagaccagcaccgacaggaacctcaatttcgacttcgtgcgcaggcaagtcgagcaaccgccagcatgggcatcagaggtcctgctgtcgtgggaggaagcctacccccaggaaaagcacgccttccttcaaagccactactggaccgagacgggatcgatcaatgtgttccgcgtcgtgggtaccgaccgcaaagactaccggggaaggtcctggctcgacttcctcactggcggcaagcgaatgcagcgaaacctgcaggccttgctggacaacccgagctactacctgcagccaacggagcgtaggcccgcgatccactacaacacgctcgatggcttgagcttctacgtcggctccgacggcaaccaccgcacctgtattgctcgattcttcctggccgagcagcagaagagccagctccacgacgtgacgctcaaccactaccaggtcaacgacgccttctaccgcctgtacgggcaactccggcaacaggtcctgctacaagggctgcctgtacaagttcatccggagcgcgtgcagttgggccgggaagatactgctggctggaagatggatacctaccagaccactttgaactggctgaacctcaagactcaggaggaaatatctctgaacgaagcccaggcgcgggagcaactcatcgacctcattcggagaaaaccatctgaagagcaaccgcgaggctggaaggcaaggctgaaatgtctcatctcaggctga

SEQ ID NO: 356404 - DNA, 1404 bp, Pseudomonas aeruginosa; identical to SEQ ID NO: 356102

SEQ ID NO: 356405 - DNA, 225 bp, Pseudomonas aeruginosa; identical to SEQ ID NO: 341256

SEQ ID NO: 356406 - DNA, 363 bp, Pseudomonas aeruginosa
atgggatggcttttctcacatcagacgaaggaagacctgctgcgtgagctgctggccccaaccagtactttcgcaggcagcaccaaggtgctggcacacgcagtctccggcaatgaactttggactgtcgtaaaacgaaccttccaccttgccggattctatttcggcaagccggccggtcactcgatcaccatgatcgagctgcacttgctggactgctcggccgggcaatggggctacaagaccattccggagaaagccggcccgttctactacggctgtccgctggagttcctggacctggctcacgatgaggtcaaccaggagtggcgtgaccgtctgacgcaagaacaccaagcctga

SEQ ID NO: 356407 - DNA, 195 bp, Pseudomonas aeruginosa; identical to SEQ ID NO: 344409

SEQ ID NO: 356408 - DNA, 858 bp, Pseudomonas aeruginosa
atgcaagaactaaaacaacgcctggcctccccgcccgccgaactgacgcccgcggagcgcaaggtggtgcgtgccctgctcgatgactacccgcgcctcggcctcggtccgatgacgcgcctggcccggcacgccggagtcagcgacccgacgatcatgcgcctggtgaaaaagctcggcttcgccggctacggcgacttccaggaagcgctgctggccgacgtcgacgaccgcctgcgctcgccgcgcaccctgctcgccgaacgccgcgagcggatgggccgcgacgacacctgggcgcgctacctcgaccaggctggccagagcctgcaacagaccctcggcctgacccgccccgatgacatccagcgcctcgccgactggctgctcgacagccgcctgcgcgtgcactgccacggcggacgcttcagccgtttcctcgccggctacctggtcacccatctgcgcctgctgcgcccgcagtgccgattgctcgacgacggcgccctgctccccgaccagctctacgacctcggccgccaggacctgctggtcctgttcgactatcgccgctaccagagccaggcccagcacgtggcccaggccgccaaggcacgcggcacacggctggtgctgttcaccgacatctacgcctcgccgctgcgcgaacacgccgacctgatcgtcagttcgccagtggaatccgcctcgcccttcgactcgctggtgccggccatggcccaggtcgaggcactggtagcgaccctggtggcacgcatgggcgcgccgctcgacgaacgcctggagggcatcgaccagctccgcaacgcgttcagcagtcatattctggaggaatga

SEQ ID NO: 356409 - DNA, 123 bp, Pseudomonas aeruginosa
atgtgcgaagtgtggcacatgctgcaggtcggtccgacccagggttccctggagccctgcagggctttccagcgcagcttggtgaaggtcaggtcgctgtcgtcgctgcggtcgaccgcgtag

SEQ ID NO: 356410 - DNA, 135 bp, Pseudomonas aeruginosa
atggacaggttgagcaaccagcgcagccagttcgacaggccgctggcctcggccttgatgctgacctggccgaccacgaacggcagcacggtgaacagcatcagccacagcagcatgcgctcggtggagcggtag

SEQ ID NO: 356411 - DNA, 168 bp, Pseudomonas aeruginosa
atgatcgccaactgccacaaggtgcagagcatctccgacaagctgtgcctgtcgccgaagaccgtgaatacctatcgctaccgcatcttcgagaagctctcgatcaccagcgacgtggagctggcgctgctcgccgtccgccacggcatggtcgatgccgccagctag

SEQ ID NO: 356412 - DNA, 1761 bp, Pseudomonas aeruginosa
atgttcgatgcggacgccaagcttctctacgtgggcaaggcgaagagcctgaagaagcgcctggccagctatttccgcaagtccggcctggcgccgaagaccgctgcgctggtggcgcggatcgcccaggtggaaaccaccatcaccgccaatgaaaccgaggcgttgctgctggagcagacgctgatcaaggagtggcggccgccctacaacatcctgctgcgggacgacaagtcctatcccttcgtgttcctctccagcgaggacgagtatccgcggctgtccctgcaccgtggcgcgaagaagcgcaaggggcgttacttcggtccctatccgagcgcgggagcgatccgcgagagcctcaacctgctgcagaaggcgtttctcgtccgccagtgcgaggacagctatttccgcaaccgtacgcggccctgcctgcaataccagatcaagcgctgcaaggggccctgcgtggggctggtcagtcctgaggagtacgccgaggacgtgcgccactcggtgatgttcctcgaaggaaggagcaacgcgctggccgacgagctgaacgtcggcatggagcaggcggcgatgcgcctggacttcgagaaggcggcggagttgcgcgaccaggtggcgatcctgcggcgggtccaggaccagcagagcatggaaggtggcaacggcgacgtcgacatcgtcgccgccatcgtcactcctggcggcgcttgcgtacacctgatcagcgtacgcggcgggcgggtgctgggcagcaagaacttcttcccgcaggtcgcgatcgaggaggaggtgggcgaagtgctgctggcgttccttggccagtactatctcagccaccaggagcgcgacctgccggcggagttgatcgtcaacgtgacgcacgaggatttcccggtgctggtttcggcgatcgccgaagcgcgaggccgcgaactggagatcagctaccgggtgcgtggtacccgcgcccgctggcagcaactggcggtgaccaacgccgaacaggccctgggcgcacgcctggccaaccgccagcatgtggcggcacgcttcgaagcccttgccgaggcgctcgacctggcggagccgccgcaacgcctggagtgcttcgatatcagtcactccagcggcgaggccaccgtggcttcctgcgtggtgttcggcccggaagggccgctgaagtcggactatcgccgctacaacatcgaaggcgtcacggccggcgacgactacgcggcgatgcaccaggcgctgacccgccgcttcagtcgcctgaaggacggcgaggggaagatgcccgacattctcctggtggatggcggcaaggggcaattggccatggcccaggaggtgctccaggaactggcggtcgccggtctgatcctgctcggcgtggccaagggcgtgacccgcaagccggggctggaaaccctctacctgaacgatgcctcccacgagttcaccctgccggccgattcgccggcgctgcacctgatccagcagatacgtgacgaagcgcaccgtttcgccatcaccggccaccgtgcgcggcgcggcaaggcacggcggacgtcgacgctggaggacgtccctggcgtcggcccgaaacgtcggcgcgacctgctcaagcatttcggcgggttgcaggaattgtcgcgggcgagtatcgatgaactggccaaagcccccggtatcagtaaaaagcttgccgagcagatttatgccgtcctgcacagcgagtag

SEQ ID NO: 356413 - DNA, 561 bp, Pseudomonas aeruginosa; identical to SEQ ID NO: 323382

SEQ ID NO: 356414 - DNA, 585 bp, Pseudomonas aeruginosa; identical to SEQ ID NO: 324382

SEQ ID NO: 356415 - DNA, 1332 bp, Pseudomonas aeruginosa
atgagtgttctgcctgacgcggtgtgctggcacgaagggatgcaactgcttccccagcatttccagttgcagggattgcgtgccgaggcgctggcggcgcgcaccggacaggcctgcaacccttggttctggggcgtgaccgccctggaactggacccctcggcgttgtgcgccggccaagtgcgggtcctgcacctcgaagcgatcctgcccgacggcctgccggtgagcgtgcaggctggtgtcgacgcgccgctggagttcgatctggagacagcgctggcggccgccgaagggccgctgctgaacgtccacctggcggtcagtccgctgtggcgggcgggtcagttgctgccgctgaagggccgtctgcaatcgcgggtcggcgcgccgctgccggacctggccagcggcgagcaccccgagccgatcaccgtctggcgagcgtcgctgcggctggtcggcgacgacggcaaggccgactccgtgtgcctgccgttgctgcgcgtggcgaaggagggcggcgcctacgtcagcctgccctacgtcccgccgacgccattgatcctgccggagtcgcccctgggcagacgcgtgcagtcgctctgcgcgcgggcccgggagaaggcgctgttcctcggcgggcgcctgcgcctggcgcagcaggcgggcaaccaggacgacgcggtggaaatccgtcgccagcttgccgcgctctggacccgcctgccggaggtcgaaggcctgctggcaagccgtgcggcctcgccgctggccctgcacggcagcctgctgggcctggccggcgcctgggcggcgctcgatccgctggccggcgtgccggccttcgaagcgctcgacttcctcgacctgcggcgtggctacgagccgctgctggactggctggagcgggccatcgagtcgatccgcgcgggctaccgctgcctgccgttcgagcaggaggagcaggtattttccgtgcgcctgcccgatccggcgccgcgtcagcgcctggtggtcggcctgcggatgcccgccggcgccggcgaacaggcggcggctgactggctggagcgcgccatcgtcgcctccgacccgcacctgccgttgctcgcccggcaacgcatgagcgggctggcgcggcaaccgatgaatcgccaggaacaggtggcctacagcgtcggcgacgacacccgtttgttcgtcgtgcagggcgccggcgactggttcgatgccggccagccgctgcgcatcgtcgcgccggtcagcggggtcgccagcagtccctggcagatcgtgctgttcgtcgccgacggcagcgacaacacctag

SEQ ID NO: 356416 - DNA, 873 bp, Pseudomonas aeruginosa; identical to SEQ ID NO: 355629

SEQ ID NO: 356417 - DNA, 141 bp, Pseudomonas aeruginosa
atgagcaattacttcgaccatcaaaccaacacccgccaactgggtcagccgctccttttcctcttcaatggtgctaatcctcagaactgctcgcgcatgagcatctttgacctcaagaaaggcgtcttttacttcctctaa

SEQ ID NO: 356418 - DNA, 300 bp, Pseudomonas aeruginosa
atgcgcaacctgctgcgcaagctggcacgcctgggccagttgcagcaggtggtgcgcgacctgttctacccggaagccaccctgcgtcaattggccgagatcgccgtgcaggtgcgcgaccccgccgggctgatccgcccggcggaattccgcgaccgcctgggtatcggtcgcaagcgcagcatccagatcctcgagcacttcgaccgcatcggcctgacccgccgcatcggcaacgaccgtcgcctgcgcgagggctcggcgctggccgaacagttgctcggcggcgtctcgccctga

SEQ ID NO: 356419 - DNA, 198 bp, Pseudomonas aeruginosa
gtgggcgagcgtcgccagggttcggtcgagttccgccagcaggcgctggcgggcgctgatctcttcgcgcagggtgtgctggtgtcgttgcaggaaatgccgcaggcgttgcgggtcgtccagcgcgccatcgcgtttcaggcggtcgatggcttccagcggaacgtccagccggcgcagcgcgagtatgcgcgatag

SEQ ID NO: 356420 - DNA, 534 bp, Pseudomonas aeruginosa
atgaaaaccgtccattccgcgtcttacgagatcctccgtcgccacggcttgaccaccgtcttcggcaaccccggctccaacgagctgccgttcctcaaggacttccccgaggatttccgctacatcctcggcctgcacgagggcgcggtggtcggcatggccgatggcttcgccctggccagcggccgcccggccttcgtcaacctgcatgcggcggctggcaccggcaacggtatgggtgccctgaccaacgcctggtactcccatagccccctggtcatcaccgccgggcagcaggtgcgctcgatgatcggggtcgaggcgatgctcgccaacgtcgatgccggacaactgcccaagccgctggtgaaatggagccacgagccgacctgcgcccaggatgtaccgcgcgcgctgagccaggcgatccagaccgccagcctgccgccgcgggcgccggtgtacctgtcgattccctacgacgactgggcgcaacccgcgccggccggcgtcgaacacctggccgcgcgctag

SEQ ID NO: 356421 - DNA, 654 bp, Pseudomonas aeruginosa
atgctgcggtcggcagaaagatcgccccccaccgaccaagccattgccagccagaatcttgcggcccttgaaatcggcagcgaccttttccttcacccagtcctgagtggcgtagatgatgccgttgtcgatcagcagctggacattctccaggccggagagcgcgatgttcacccgaatggtctgggtccgcgcactgccactttccattgcagccttgtagctgggcgggcagttggataccgcgacgaacttgccgtcggcatcctgcaggccgatctcgcggatccagaagccacctacctcaactggcagcaccacctcggcaaccaaggtattggcgttcttgtcggaaacgaacagccgattcagctgagcccgatggcgttggttgatcaggctcttctgcgccgcagaaggcaatggatccggcgtgtcgcccggcgcaccgccggcatcgccgatcagcatatgagtcggctgccatttcttgcctgctgcactggccgcagccagcgcagcggcacctatgtcggtgagcaggccaccgtatttcggagtattggtcgtcatgtcactgtttccaggggaagatttccagggtgtcgccgtcggtcacggccagtccgtgacgggaccggattaccggggtaa

SEQ ID NO: 356422 - DNA, 378 bp, Pseudomonas aeruginosa
atgcctcgggcaaacccggacatgccgggccgcgcgaggggctcaggcgagcagcaggacgcagagcttgcccaggaccagggcgatgccgcaggaaaccagcaggtaggaggcgccatcgagacgccggcggtacaactgggcgaaggaacccacgtgatgctgcaggacgaacattcccagtgccaccaggatcgccgggatcaggaagacgaattgccagaagtgttcgaccgccagcgtcgcttcgccgtcgtccgcgagcagcagggcgcccccagcaactggcccagcaacagcagccccccgacgccaatacaggcacgtccccagccgatcatcagtccctcccagagcgtttccgagggaccagcatag

SEQ ID NO: 356423 - DNA, 228 bp, Pseudomonas aeruginosa
atgatcctcgcccatattgcgatcaagagcttcgacctggtggcggcgatgaccgccggcggcccgggttattcctccgacctgccggcgatgttcatgtatgcgcataccttcacccgtggccagatggggctcggcgcggcgagcgcgatgctgatgctcggcgctgtactggcgatcgtggtgccttacctgtattccgaactgcgaggcaagcgccatgcgtga

SEQ ID NO: 356424 - DNA, 570 bp, Pseudomonas aeruginosa
atggcgctggggctggcgatgccgctgctggcgctgggcctgccgttgagcctgagcggagcgccggccaacctgctggcggtgccttggatcgaactgctggtagtgcccccggccctggcggggagcctgctgctgtgggtgcccgggctgggcgaggggttgcttcgcgccgctggcgtttcgctggacctgctgtttcgtgcgcttggcctgctggcgggcctggccgaggcctggcagccacccgccgcagcggcctggagcgtagcgctgggcatgctcggcgcgctctgctggctggcgccggctggcttgccgttgcgtgccctcggtgccgcgttgctactgccggcattgttgccgtcatcgccgcctgtcgaatgggggcgggcggaagtgcgggtgctggacgtcggccaggggctggccgtgctggtgcgtacccgggagcatgccttgctctatgacagcggtgcgcggcagggggggcgttcgacatgggcgagcgggtggtggtgccggtgctgcgcagcctggacctgcggcgcctggacggcctgttgctga

SEQ ID NO: 356425 - DNA, 714 bp, Pseudomonas aeruginosa
atgccggatgcgtaccacgagctcgctaacgtcgtagaggtcaaggacgccagcgaactaacgatcccccgtgcgaaagcgctgtttggcgcggtccagcgtcagcgcgactattcgcttgtccagattctccgccatcccgttgacggcgatccgacgctcgaatgtctcgtcgtggaggtcgagtgtgacgacgtaccgccgaagaatccggtcggcatccggtaccgtgagcgcttggcgctgtgtgtccccaatgaccccaagaggctgatcgaggtgttggcgctgcgtcaggacttcccgatcctgatgcatcagaaccaaggcgtacccggcacccctgcgagcctatgcctgtatttcgagccagccggagcggtaatgcgcacctggacgcccgaagcattccttcgtcgcatccagtggtggctggagaagagcgcccgaggcgagctacacgcggcggaccagccggttgagcatctcttctttgccagcaagtacgaactcgttctgccgtggaatctgaccgaactccgcaaagatcccgctctgcgtttcgccatcgttctccggcatgaacgccctgacggcggtttcacttgctttctggaacccattgcgaagaccgccccgcgtgtcaagacgaccaagcacattgaactggcgctgcccccatcgtgcacggcctcgtcgagcgtgatcctgtaa

SEQ ID NO: 356426 - DNA, 420 bp, Pseudomonas aeruginosa
gtgagcgacctgagccatatccgcaatttctccatcattgcccatatcgaccatggcaagtcgacgctggccgatcgcttcatccagatgtgcggcggcctctccgatcgcgaaatggaggcccaggtcctggactccatggacctggagcgcgagcgcgggatcaccatcaaggcccacagcgtgaccctgcactacaaggcgcaggacggtaagacctaccagctcaacttcatcgatacccccggccacgtcgacttcacctacgaagtcagccgctcgctggccgcctgcgagggcgcgctgctggtagtggacgccggccagggcgtcgaggcgcagtccgtcgccaactgctacaccgccatcgagcaggggctggaagtgatgcccgtgctgaacaagatggacctgccctag

SEQ ID NO: 356427 - DNA, 201 bp, Pseudomonas aeruginosa
atgttcatcaataggtgtaggaaccgtcacaatgaaaacattgcacttttgcaagtcctgaagattgaaagtaaagctcagttcggacgcttctttcaactcagccgcatctacttcaagagtagagtcaatgccttgccgcagttcagcggttcgttttttaccaaattcaacagcaagcggaagaccaacatagcctag

SEQ ID NO: 356428 - DNA, 513 bp, Pseudomonas aeruginosa
atgagtgatctgccaagtccgaagaaacacaagacctcgaactggtcggcgatctgggtgctgccgctggtggccctggccatcggtgcctggctggcgtggcgtgccttcgaccaggctggcgtggacatccaggttcgcttcgagagcggcgacgggatccaggccaacaagaccgaggtgctgtacaagggcatctcggtgggcaaggtgaccgacctgcatgtcagcaaggacatcaagggcgtggtcgcgaccatcgagatcaagaaggaagcccaggagtacctgagcaaggacacccgcttctggctggtcaagccgcgtgtttccctggctggcgtcaccggcctggagaccctggtctccggcgtctacatcgcggtcgatccggtgaagggcgagaaggaagaacgctacttcaccgcgttgaaggagccgccacccctttccgacaagctgcccggcctgcacctgaccctcaaggccgatcgcctgggctccctggagtag

SEQ ID NO: 356429 - DNA, 492 bp, Pseudomonas aeruginosa
gtggacaatgccggcatctcgcccaagggcgaagacggcgcgcgcctcggtgtgctggaaaccgactacgccacctggctgcgggtgttcaacgtcaacctgttctccaccgcgctgctggcgcgcggcctgttcgccgagctgaaggcggcgcagggaacggtgatcaacgtgacctccatcgccggctcgaaggtgcatccattcgccggggtggcctacgccacttccaaggcggcgttgtccgcgctgacccgcgagatggcccacgacttcggcccgcatggggtgcgggtgaacgccatcgcgccgggggagatcgacacctcgatcctgtcgccgggcaccgaggagatcgtcgagcgcagcatcccgctgcaccgcctcggccggccggaggagatcgcttcgctgatctacttcctctgcaccagcggcgcatcctacgtgaatggcgcggaaatccacgtcaacggcgggcagcacgtctag

SEQ ID NO: 356430 - DNA, 1134 bp, Pseudomonas aeruginosa
  misc_feature (225)..(234): n is a, c, g, or t
atgcatcgcgatgatgtgcgacgcaaaatctttcttctgcaagaattcaaacttattagaaaagtcgaatatagtgattcgactttttacgcatgcgatgatgagtctttccatactcttcgcttcgctctcaaatcaggcggtgctgttgatgtattaaggattaggttcgaatgtattgattattacaaggcgacaccttccgagcgaaaccggaatagagcnnnnnnnnnncacgatgttgtccggctgctacttagagctccatatacctataagcgttatacgatccccaagaagaatggcggggtaaggcatatcgctcagcctgcgaaagaaacaaaaataattcagcggtttatgatgggtgaatggttttctaaactgccagtccatgagtgcgcagctgcgtataaagatggcgccagcattaaagacaatgctgagcggcatagtgggtctatatatatatcaaaatttgattttgttaattttttcggatctataactgaaggggatattaagagaatactgtctcggacgtttggggggcagttgtcagaaataagcatcgctgacatggcaagaatgagttgcatccgagacagagcaactggtcaattggtgctgagcataggtgcaccatcttcacctatactgtccaatgctgtgatgtttaattttgattcggtcgtgaatcagtggtgctcagaacgcgatataacatattcgcgttatgcggatgatctgacgttctcttccaacaagaagggaaatacgttttgtgtggaagagtttattaagggggcattgaaggaactatctgagccatcactatcgctaaattcggacaaaaccatacatgcgtcgaaaaaaaatcagcgccggatcaccggcctagttctgagcaatgatggcaaggtgactatcggacgtgatagaaaacgactaattagtgctatggttcatcgatttgcacacggtgagcttgatgataagtgtgttgcccatttacaaggcctgcttggctttgcacagggcgttgagcctttgtttatttccaggcttcgaagcaagtacacttcaaaagttattactgaccttatgaggttccgaagcaagaagctagattga

SEQ ID NO: 356431 - DNA, 531 bp, Pseudomonas aeruginosa
atgaaaatcatcctgatcggcgccagcggcacccttggcaagggtatcgacaaagaactcggcgagcgccacgagatcgtccgggtaggccacagcagcggcgatttccaggtcgacatcagcgactcagactccattcgcgccctgttcgagaaaaccggtcgcttcgacgcgctggtcgccgcggtcggcaaggtgcacttcggcgccctggaggaaatgggcgaggcgcaataccagctcggcctgcgcgacaagctgatgggccaggtcaacctggtgctgctcggccgcgagtacgccaacgacgggggctccttcaccctcaccagcggcgtgctcgccgaactgccgaagcggatcggcagttcggcgagcatggtcaactgcgcgaccgtggtcagcgaggcgctgcccggctacgcgccctacttccgtggcttcaagccggttccggcggcggacgccgcgctgggttacgcacgcagcgtggaaggcgcgcagaccggccaggtgtaccgcatctggtaa

SEQ ID NO: 356432 - DNA, 510 bp, Pseudomonas aeruginosa
atgctctggggcgagccgctggccgcggtcgacgggcatatccgccgagtgcgcgccgccgccaaggcccagggacgcgatccgcgcttctcggtgtcattccggccgatcgtcgcggataccgaggaggccgcctggaagcgtgccgccgaggtgctcgaacaggtccgcgagaaccgtgcgcgcctcggtctgccgctgcgcgaccaccagccgcagaatgtcggttcgcagcgcctgctggccgccgccgagcagggcgaggtgctcgacagccgtttgtggaccggcgtggcccggctgaccggggcgcgctggaactccaccgccctggtaggcacccccgagcaggttgccgctgcgcttggcgagtactaccggctgggcgtctcgaccttcctgattcgaggcttcgatccgctcggcgacgccgtgcgctacggccagggcctgattcccgccatacatgaccatatcgcccgcctgccgctgttgcggcacgccggttga

SEQ ID NO: 356433 - DNA, 825 bp, Pseudomonas aeruginosa; identical to SEQ ID NO: 355845

SEQ ID NO: 356434 - DNA, 576 bp, Pseudomonas aeruginosa; identical to SEQ ID NO: 341314

SEQ ID NO: 356435 - DNA, 249 bp, Pseudomonas aeruginosa
atgcacaccctcaacctgaccgcgctgttcctggacggcgaggatggccagcgcctggccgaggtcaacggcctcccccgcctcggcgctctgctctcctcctctcaactgcgccagctcgcacgccaactcaacgagatcgcaaacgacgctgaccagggcgccagcggtgagcactgctacacggcaccgccctacggagcctgcccatcatgccattcgacgaaagccccgcagtccgccgcataa

SEQ ID NO: 356436 - DNA, 489 bp, Pseudomonas aeruginosa
atgagcgccatcatcagcgaatgcggccagtaccgttaccttctgactcgccctggcgactgcctggccgacaaaggcacagcggttttcctaatgctcaatccgagcaccgctgatgccgcgctcgacgatccaacgatccggcgctgccgcaacttcgcctcggcctggggctgcaacgggatcgccgtcgtcaatctgtacgccttgcgcgcgacgaacccggccgacctctggcagcacagcgacccagtaggcccagacaacgactggcgcctgcgcgcgaccgcccgagagtacaccgacatcgtgtgcgcctggggcgccaatgcgaagcccgagcgagtagaagccgtaaccagcatcctgaccgccgccggcgggcgcctctggtgtcttggcacgacgaaggatggccacccgcgccaccctctttacgtgcctggaaatcaagcactcctgccttgggcgccgagggtaacgccatga

SEQ ID NO: 356437 - DNA, 579 bp, Pseudomonas aeruginosa
atgcgcgtcaccacccacgctaccctggccgcggccctgctgctcagcgccgcctccgcgttcgccttcaatctcggggatgccgccaaggcggtcgccggggcatcccagggcgactccgcccaggtagccaccaccccgcagaccagcggtctgctcggcgcactcaccggccagctcggggtcagccaggagcaggcggtcggcggtaccggcgccctgctcggcctggccaagaaccagttggccggcaacgattattcacaactggttaagaccatccccggcctcgacaagctggccggcaacaacgccctggccggtctcggcgggctcggcaacgtgctcggcaagagcggcggcgacagcaagggcctcggttcgctgctcggcaatgcggacagcatgggcgacgtgaacaaggccttcggcaccctgggcatggatagcgggatgaccgagaagttcgcccaggtgctggtcgactacttcggcaagcagggcgccaacagcgagctgctgggcagcctgagcaatctctggggagtgagcaaggcgggcggctcgtcgctgctctga

SEQ ID NO: 356438 - DNA, 315 bp, Pseudomonas aeruginosa
atgagccggctggcctggctgcggctgccatggctgttcaaccgccgcgtcggcgtggcgctgctgtggactttgctggtggtggccgccgcggtagcagtgaacatcgccggcatccacgtggtcggcggcgtcgagggctggcagcactggctgcaggcgcacgccggccacttcttcgtgtggcggctgtgcctctacggagcgacggcctacggctggtggtggatgcgtcggcgcctgttgcggcgggagccgtcggccgtgatcgccgtggtcgcgctggaagccagccaattgttgcggcacggctga

SEQ ID NO: 356439 - DNA, 300 bp, Pseudomonas aeruginosa
atggatctccgccgccttcgccgccagcgtgcgcagcgggcgcaggccgtggcgcaggaccagccagccgagcagggcggtgccgaggaacgccagcagcacggcggcgatgacccggtcgcggtactgggcgagcatccgcgtctcgcccagcagcaggtgcgcggcggtgatctgcaacggctcgcggccgccgaccaggacctcggcggcgagcacgcgcatcgggatgccgtcgtgggtcagcgcggcgtgcacgacggacggattcaacgcctggccggcggcgaccacccgtag

SEQ ID NO: 356440 - DNA, 888 bp, Pseudomonas aeruginosa
atggatctcagacagcttcgctacttcatcgcggtcgccgaggaactgcatttcgggcgcgccgcggctcgcctgttcatctcccagccggcgctgagcttcgacatcaagaagctggaggaacagctcggaacccaattgctgctgcgcaacaacaagtcggtgaagctcaccggcgccggccaggtcctgctggtggaagcgcgcaacctgctgctgcaggcagagaaggtgaaacgcctgacccagctatccgccgagggcgacgtcggccagctgcgcgtcggcttcgtcaactccatgctctaccgcggcctgcccagggccatgtcccgcttcgaacgggagcacccgaacatggaggtggtgctcggcgaaatgaacagcgcggagcaggcccaggcgttgcagcgcgggcagatcgacctgggcttcgtgcactggggcaggctgccggcggaaatcgtctccgaacccttgatcagcgacccgttcctctgctgcctgcccgccgggcaccgcctggcaggccaggcgcgtctggacctcgccgaactgcgcgacgaagacttcatcctcttcccgcgccatgtctccccgcactaccacgacctgatcatcgcccgctgcgtggacgccggcttcagcccgcgcatccgccacgaggcgcgcctgtggcagaccgtcgccgccatggtcggtctcggcatgggcgtcgcgctgatcccggagaccctctgcctggcctggcggaacgaggtgcgctacctggagatcgagccggccggcgcgcgttcggagatccacgcgatccttccggccagcgaaccttcccgggcggcgcaggcgttcctggcgacgctgaagagcggcctggacgacgcctga

SEQ ID NO: 356441 - DNA, 471 bp, Pseudomonas aeruginosa
atgcatgccgctgacattgagcatgtcgccatgtcgcgccttgccgttgtcgcgccaggcgcgcaggcgccgttccagttcgtcgaggccgacctgttcgttgcccatgtccgcgccggccagctccaggccgccgaacaccgcgtgcgaatgggtgtcgatcaggccgggcatcaggcgcttgccgccgagatcgacgacctggctgtcgccatcggccagggcgcgcagcccggcctcgtcgccgaccgcgaggatccgcccgtcctccaccgccagggcctcggcgaagggttgctgcggattggcggtgaagatcctggcgttgaccaccagcaggtcggcggcgccgagggcgtgcagagggatggccaggcaggcgccggcgaggagggtgggaatccgttgcttcatggtggtttcctttgcttcttggtcttgtgtagcgtggcccgggcaaggcgagactag

SEQ ID NO: 356442 - DNA, 384 bp, Pseudomonas aeruginosa; identical to SEQ ID NO: 323114

SEQ ID NO: 356443 - DNA, 192 bp, Pseudomonas aeruginosa; identical to SEQ ID NO: 356066

SEQ ID NO: 356444 - DNA, 687 bp, Pseudomonas aeruginosa; identical to SEQ ID NO: 333145

SEQ ID NO: 356445 - DNA, 2760 bp, Pseudomonas aeruginosa
atgaatgcagtagaaattgagtccgccatttcggacctggccctagagccctttgacgcggcggagttcccgttcaccttcctggccgcattcggcaacaaggaaaccgcgctcaagcgcctgcgcgctggcaacaacaacgcctcggatgtacctggcggcgtactactgcgcagcaacattcatatcgccgcatgcgagcctggcaccgtgggcgaaacgctcaaggccttgcgcgccagcccggccaccataaaagctaaagccaagttcatcctctccaccgacgggcaaacgctggaggccgaagaactgatcacgggtgaaaccatcacctgcgactaccctgactttcccaaccacttcggcttcctgctgccgctggccggcatctccaccatcaaggagatcaaagacaaccccatcgacgtgcgtgccaccagccgcctgaacaagctgtacgtcgaactgctgaacgagaatccggactgggccaagaccgaacgccgccatgacatgaaccattttatgtctcggttagtgttctgcttttttgctgaagacacagatatcttcactggcgacggactgtttaccacgacggttgagcactacagcgagcgcgacggctccaacaccgcccaggtgctgtcggaaatcttccgcgctatgaacctcaagttggccgagcgtgccggtgcagaaccgcgcttgcctggctgggccaacaaattcccgtatgtgaatggcggcttgttctctggaagcactgaagtaccgcgctttacgcgcatggcgcgtacttacctgctgcacgccggcaacctgaactggcaaaaaatcaacccagacattttcggcagcatgattcaggccgtggccgatgatgaagagcgcggcgcactgggcatgcactacaccagcgtgcccaacatcctgaaagtattaaacccactatttctggatgatctgtgtgctcagctggaggcagcgggcgacaacaaggccaagctgcttaacctgcgcaagcgtatggcgcgcatccgcgtatttgacccagcatgcggttccggcaatttcctggtcattgcctacaagcagatgcgcgatatcgaggcggagatcaatcgtcgccggggcgaagctcacaataagtccgaaataccgctgaccaatttccgcggcatcgagctacgcgactttccggcagaaattgcccgactggcccttatcattgctgagtttcagtgcgatgtgttgtatcgcgggcagcaggatgctttagctgaatttctaccgttagactcacagaattggattgtctgcggcaatgcgctgcggctggattggttggcggtgtgcccgccgacggggactagcgtgaagctggcagcgaacgatttgttcgacgtgccattggaccaatctgaaatcgccttcgaaaacgaaggaggcgagacgtacatctgcggtaacccgccgtatattggcgacaaatatcaatcgaaagagcagaagagcgacataaaaagccttaccaaaaaagacgtgcgcgctgtcgattacatcactgggtggctttggaaagcatcagactacattcgcagcggaggccgattcgccttcgtttctacgaactctatctgccaaggtgttcaggttccgctggtgtggccgagaatagtcatggcggggcaagagattttctttggccacaaagcttttctctggggtaacaacgctgctaggaacgcgcaagtcacctgcataattgttggcgtggccaatttaggcgtcaaacagaaatacatcttcgacggtgaagagcgaaaagaagttgaaagcatcaacttatatctcgcgcccggcaaaaatatcatcgtcgagcgggcgaatgatcccatctctggtgtatcgaccatgtttggcgggaacatcccgagagatcagggaaatctgttgctcacgcccgatgaggcaagggatttgctggactcttatcctgaggcagcgcctctaataaagccgatccttggctccaaagagttcatcaatggcctagaacggtactgtctctggataactgacgaacaagcgcagatcgccttttcaattccgcccatcaaggcgaggcttgaccgcatacgagaatatcgtctgcatggcagtgaacgtggccgtgccggcctcgacacaccctacaagtttgaacggactatcatcggaaacgaccacaccatcatcattccaagcgtctcgtcggagcgccgcgcttatctcccttgcggtttgctgacgagtgacgtgcgcgtctcaaatcttgcacttgccctctacgacgccccactttggaacatggccctcatcgcctcccgcctgcacctcgtttggattggcaccgtctgcggaaaaatgaaaacggacttccgctactccaacacacttggctggaacaccttcccagtgccgaggctcacagagcaaaacaaggtcgacctgacccgctgcgctgaagatattctgctggcccgcgaagcacacttccccgccaccatcgccgacctgtatgacccagacaccatgcctgagaaccttcgccgtgcccacgagcacaacgatgaagtgctggagcgtatctatatcggtcgtcgcttcaagaacgacaccgaacgactggagaagctgtttgatctctacaccaagatgacagcagacacagcaaaggccacgccgaagaagctacgagggaaaatggcatga

SEQ ID NO: 356446 - DNA, 795 bp, Pseudomonas aeruginosa
atgtttgagctgctgattgacgagttggataaggaagttgcctttcctgcagtgagtttcagcatgcttgaggagccggtatccggtatcaacaagatcgagcaagttgctgaaaaatttcgccgtgagcaaggcctggggattggccccctgtctagtgtgaccaagctggccgaaaaagttggtgtgctggtggtgaatctggccgaagccgatgacaaggtcgatgcgttctcgctgtccaacaaacgaccgttgatcgtgaggaacaccgcaaaggtgaatccatgccggcaacgtttcgaccttgctcatgaaatgggccatttggtgatgcaccaaggcattgagaccggttgccgccttactgaggatcaggctaaccagtttgccagcgctttgttgatgccccgggcaagtttcgcatcagagtttccccctatgcgaggcaagtacctgaactggccggcactcaaggaaatgaagcttcgttggaaggtaagcttcaaggcgctcattttcagggctcacacccttgatctgcttactgccgagcaagctaaatcgggcttcacgtacctcaatcgaaagggtttcacgaagcacgaggagtttgacgagttgatccctatggagtcgcctatgctggtacagagggcgatcaatctcctggattacagtacctggaagcgggtgttgacagctgccgggcttacggcagagatggtgaccaggcagtacatgctggatgtaccgtcatctcctttgcgactggtcgaggctaacgtaggttaa

SEQ ID NO: 356447 - DNA, 621 bp, Pseudomonas aeruginosa
atgcccccgatccaacacccgagtgagctggaaccgaagctgaagccggaacacgtcgagctgatctgcaataacgctctggatgcggcttaccgtgcgttggaagtcacctctactgatgacgataccaactggactatgggaacacttccgtatggccgcgtccacggccggttcaaacgcctgcacggcgatccggcccttccgtggctgctgctcactaaccgcaccatggacttcactctgagtgtgaatggcgtgctgatgcaggtggtaatggacgatcccgaggtcagaaagaaagggtatcgactgcaatccaaccgagttgagctttaccaggctagcctgctggggcctgcgatcgacaagaacattacctggcgtttgtatgtcgatactgacggcaactttgacgggccgacgctgactgcttcgattctgggcttcgataccaaccggaacctcgtatgtaagtgggtgcatgactacgtgcctctgtttgctcctcgtaccaccgagcttccacaagaggtggcaatcgatgatccattagtcgctcgtcgggacaaagatgcagaccagaacgcaacacgagatgctgatccagtaaatgaatga

SEQ ID NO: 356448 - DNA, 459 bp, Pseudomonas aeruginosa
atgagtggtaagtcagcagataggccggagttggggcactgtctcaaggctctgcgcagtggcgacactctggtcgtatggcgactggatcgccttggccgctccttgcctgacttggttgggatcgtcagtcggctggagcaggaaggggtggggttcgagtcgatcaacgagcgaatcgaaaccaccagcgccgccggcaagctgatctttcatgtgttcgcagccctggccgagttcgagcgcaacctgattcgagagcgtacccgcgcagggctggcggcggctcgcgctcgaggacgtaaaggtggtcgtaaacctgcgctggaagaggctcaagtccgcgaaataaaggctttgctcaaagatccacagattcaggttggcaccgtagccaagcgatacggggtatcgagaacaacgctgtatcgatacgtcggtaagaccgggccgagataa

SEQ ID NO: 356449 - DNA, 741 bp, Pseudomonas aeruginosa
gtgaacgatgctgatctggtagttgaaatccagcaacaggtcagcgaacttcccagctacggctaccgccgcgtctggggattgctgcgtcgcgcccgtgaaacccagtcgctaccggcgatcaatgtgaagcgggtttaccgggtcatgcgtgatcacaacttgctgcttgagcgccgcatcaaacagcccggtgtgccgcgtcggcacgaaggccgtattgcggtggaagccagcgatacgcgttggtgctcggacggctttgagttccgttgcaaggacggcgccaaactgagcgtgaccttcgccctggattgctgtgatcgcgaagccatcggctgggtcgcgagcccgaccgggtacagcggcgatgatatccgcgatttgatgctggaaagcgtggagaagcgctttggtgatcaactgcccgccacgccggtgcaatggctaagcgacaacggctcggcgtacaccgccgaacagacacgcctgtttgctcgacagatcggcttgcagccggtgaccaccccagttcgcagcccgcaaagcaacggcatggctgagagcttcgtgaagacgatcaagcgtgactacgtggcgcacatgcccaaaccggatcgagaaacggcgctgcgcaacctggcaattgccttcgagcattacaacgagcagcatccgcacagcgctttgaaataccgctcgccgagggagttcaggcgcttggcagcagcatcaatttaa

SEQ ID NO: 356450 - DNA, 1242 bp, Pseudomonas aeruginosa
ttgttccgcgagcggctgcacgaggcggcccagcgggcgcgccaggaggagggcgggctggccctgctgctgatcgacctggaccgcttcaagctgctcaacgacagcctcggccacgaggtcgccgaccagttgctcagggagatggcccagcgcctgcggcgcaccgcgccggaagccaacaccctggcgcgtctggccggcgacgagttcgccatcctcctcgatggcggcaccggcaccgcggccctgtcgcgcctggccgaacgcctgctggtccagttgcgccagccggtgagcgtgctcggccacgagttgatcctcggcgcctcgctggggatcagcctgttttccgagcaggcacgggaaatctccgtgctgatgagccaggcgaacctggcgatgcaacatgccaagcaactcggcggcaataccttccagttcttccgcgacaacctgcaggacagcaccctcgaacgcctgcgcctggaaacccggttgcgcaaggcggtcgaggagggccagctggacgtgcattaccagcccaagctgtgcctggccagcggctgcgcggactcggtcgaggcgctggtgcgctggcaccatccggaggagggcatgatcccgccgtcgaccttcatcggcctcgccgaggagtgcgggttgatcggcgagatcggtgaattcgtcctgcgccgggcctgcctgcaggccgccgagtggagccagcggggcctgaacctgcgggtctcggtgaacctctcggtccaccagttgcgccagggcgacctgctcgacgtagtgcgctcggcgctggccgacagcggcctgccggcggcgcaactggagctggagttgaccgaaagccagtggctggacgccctcgatagtgtcctggcgaccttccgccagttgcgcgagatgggggtgaagctatcggtcgacgacttcggcaccggctattcctcgctcagctacctgaagcgcctgccgctggactacctgaagatcgaccagtcgttcgtccgcgacctgacccagaacagcgaggatgcggcgatcatccgggcgatcatcgccatggcccacagcctcgacctgaaggtggtcgccgaaggcgtggaaaccatcgaacagcgggacttcctggtggcccagcgttgcgacgagctgcagggctacctgatcggccggccgttgccggcccatgccctggaggaaggtttgcgccaggctcgttga

SEQ ID NO: 356451 - DNA, 1050 bp, Pseudomonas aeruginosa
gtgccgggccgcgcgccgttcgacctgtaccatcgcgaagcgccgcggggcctgaagctgtacgtacagcgcgtgttcatcatggaccaggccgacgagttcctgccgctgtacctgcgcttcatcaagggtgtggtcgactccaacgacctgtcgctgaacgtctcccgggaaatcctgcagaaggatccggtgatcgactcgatgaagtcggcgttgaccaagcgcgtgctggacatgctggagaagctggcgaagaacgagccggagcagtacaagaccttctggaagaacttcggccaggtcctcaaggaaggcccggcggaagacttcggcaacaaggataagatcgccggcctgctgcgcttcgcctccaccggcgacgattcgggcgagcagagcgtagcgctggccgactacatcggtcggatgaaggaaggccaggacaagatctactacctcaccggcgagagctactcgcaggtgaagaacagcccgcacctggaagtcttccgcaagaagggcatcgaggtgctgctgctcaccgatcgcatcgacgagtggctgatgagctacctgccggagttcgacggcaagcagttcgtcgatgtcgcccgcggcgacctggacctaggcagcctggactcggaagaggacaagaaggcccaggaagaagtcgccaagagcaaggaaggcctgatcgagcgcctgaagaaggtgctcgacgagcaggtcagcgaagtccgcgtttcccaccgcctgaccgattcgccggcgatcctcgccatcggcgaacaggaccttggcctgcagatgcgccagatcctcgaggccagcgggcagaaagtgccggactcgaagccgatcttcgagatcaacccgcagcatccgctgatcgagaagctggatgcggagccggacgaggaccgcttcggcgagctgtcgcatattctcttcgaccaggccgccctggccgcgggggacagcctcaaggatccgggcgcctacgtacgccgactgaacaagctgctggtggagctgtccgcttaa

SEQ ID NO: 356452 - DNA, 786 bp, Pseudomonas aeruginosa
atgagcgtggaaacccaaaaagagacactgggctttcagactgaagtgaagcaactgcttcacctgatgattcattctctctattcgaacaaggaaatcttcctccgcgaactgatttccaacgcctcggacgccgccgacaagctgcgtttcgaagccctggccaatcccgagctgctcgagggcggcgccgagctgaagatccgcgtcagcttcgacaaggaagccaacaccgtcaccctggaagacaacggcatcggcatgagccgcgaggatgtggtgactcacctgggcaccatcgccaagtccgggaccgccgacttcctgaagaacttgtctggcgaccagaagaaggattcgcacctgatcggccagttcggcgtcggtttctacagcgccttcatcgtcgccgacaaggtcgatgtctactcccgtcgcgccggccagccggccagcgaaggggtgcactggtcgtcgaagggcgagggcgagttcgacgtcgctaccatcgacaagcccgagcgcggtacccgcatcgtcctccacctgaaaaagggcgaggaggagttcgccgatggctggcgcctgcgcaacgtgatcaagaaatactccgatcacatcgctttgccgatcgagctgcccaaggagttccacggcgaagaggccgacaagccggccgagccggaatgggaaacggtcaaccgcgccagcgcgctgtggacccgtccgcgcgccgaggtgaaggacgaggaataccaggagttctacaagcacgtcgccccatga

SEQ ID NO: 356453 - DNA, 366 bp, Pseudomonas aeruginosa
atgtgggggaacctctatccgcgcagcggattcctgcaccagaccgacgactacaagacggcagccgtcatcgcccagcgcgccggcgatatcaccacgcgaatcggccaactccacgtctacctccccatgcgcgcagcccccaaggacggctactggccggcgggcgagctgaaagagggcgatgcctcgaccgggaaatggcaggagctgaccccgtccctgagcctcaactgcgcggtgtttcccaactcagggccgaagacgcaagccgtcgacggcgattacgcctgggcgctctggcgtccctactcctgctgccagcgcaaggggcagatcttcctcggcagtaccgacttccaataa

SEQ ID NO: 356454 - DNA, 201 bp, Pseudomonas aeruginosa; identical to SEQ ID NO: 320107

SEQ ID NO: 356455 - DNA, 414 bp, Pseudomonas aeruginosa
atgcacctgctttacccctccgcccccgaccgcagcaacgcggtcgatgaactcttcgccgaggaatatgacgcggcccgttcggcaggcttggcctgttcgctgttctgcgacgaggaactggaaagtggacgcttccgcgcccgcccggagtttccggcaaacacccaggtgctgtatcgcggctggatgctcacaccggaaaactacgctcgcctgcacggcgcgatcctcgtcgctggcggacggcccctgaccagtccacagcaatatcggcactgccattacttgccggagtggtatccgctctgtgaggacctcacgccggcgaccctgttcctgtcaggaacgccgacttcgaggcagtgttggcgcaaagcccgtggcgcgcctggttcgtcaaggaccatgtga

SEQ ID NO: 356456 - DNA, 366 bp, Pseudomonas aeruginosa
atgccgatcctggccaaccgcgacggcgccatactgctctaccggcggccttccagcggactctggggcgggctctggagcctccccgaactggacgacctcgacggcctcgaaccgctcgccgcgcgccattccctggccctcggcgagcgccgcgaactgagcggcctgacccataccttcagtcatttccagctcgccatcgagccctggctggtggcggtggaaagcgctccgcgcgccgtggccgagggcgactggctctggtataacctcgccaccccgccgcgcctgggcctcgccgctccggtgaagaagctgctcaagcgcgcagaacaggaactcggacgcggcacggccgcgtga

SEQ ID NO: 356457 - DNA, 249 bp, Pseudomonas aeruginosa
atgtcaaaagggcattcgctacaagccctttacctcaataccctgcggaaagaacgcgtcccggtttccatctatctggtcaacggcatcaagctgcaaggccagatcgagtccttcgaccagtttgtcatcctgctgaagaacaccgtcagccagatggtttacaagcacgcgatctccaccgtggtaccgagccgtccggtgcgtctgccgagcggtgaccagccggccgagccgggcaacgcttga

SEQ ID NO: 356458 - DNA, 2337 bp, Pseudomonas aeruginosa
  misc_feature (1850)..(1850): n is a, c, g, or t
atgcgtttccatcctccaagaggctttatcgaggcacgccaggagatcgcacgctacatacggggcagtgacgaccagtcgggactcctcgaatccgcgtcgctaggcgcctggctgtcgggcgatactgggttccgctcccttgtcgaaggctatctagattcattcatggcatgggtgagtacagacccatccactgcctgttgggtggataccatcgtcgtgtgctcgctggaagctgatggccgcacgctggacaggatcccggacgccatcattctttcccccctgcatccgttgcgccttgcatggcactgccttgcccagaaagtattgcgggacgaggttgaaggtgactccgcctgtccgtgccctgcagccagtatccttgaccccgattgtgtccccgacctgcttaccatgttcctgcaagcccccgatggggaggacagcctggacttcctctcggtcgaatgcagctccgactactggtccgtgctttggaacggatcacgtctaggccagattcccgaccgtgcccgccgggcgcccttcgacagcagttttggccttacggtcggcgggatatcgagtggcttcagtccggcccaggtctcgcgcgcactcgatgacgtcacggacttgctggcggccaagtccattgtcagcctggtggtgtccagcgcgggcggaaccaccgatgcgtgcaatgagggcctagccaactggtgtacaaagcgattcggcaacggggatcaggacatccctcgacacagtgtcggcgcgaggatactagaggtgttcgataccaggcaggccggaaggcccgaccaggcgacgatcgccaacctgtccgaagacaccgataaccatgtgcgctggtacgacaagcaaccagccggggccaagcccgacctgggcatcatcgcgcagttggactcggcacaacccgagtccaaggaagttggcatgctttcgccaatgggagccggcgggttgatcaggcaccgagtcaggcgccagctccaggcttcgttcctgagcgagtccaggcaaggcctccaaatgcccccgtccggagaacgattcgccgacaaggtatccgcatgcatgctcatgctagaaaagctgagggacggcaaggtcggcttgcagttttccccgaatgtccatgcggtctccagcgtgcttgaggaaaacagcgccgggttcgttgcagtctcctcctcggcaatcgaccccgcttgcttcctgggaggctggattcatgggacctacctatgggactacgatctgccctcctactcccaccgcgcaggcgatactagtggctactacctcttgtcgcaggtcaagcaggctgatcgcgatgcgctccgacgggtcctgaagctccttccagactgtgaagatcttgacgatgctcaggtcgagcagatcctcctcgaagttgcaagaagggggatccccaccgtgcgcggcctttccggggacgacactggggccacaggcgaccttggcctgttcctcgcagtccggctcctccaagaccagttccgcttggcaggtaacctgaacagtctgctccctgtccttgccggtacgcctgatgactcaacgatagccatcatcattcccgtagaccctttccggggatacctttcggaccttgcccgctcccttggcaaggagcgcaaggaaacatccctatcgcgccccgacctacttgtcgtcggagtacgcgcatgcgacgacaaggtccacctgcaccttacccccatagaggttaagtgccggcaaggaatagtctttagtgctagcgactcagccgaggcgctctcccaggccanggccctgtcggtactgcttcacgccatcgaggagcgtgcaggcaactccctggcatggcgacttgccttccagcacttgctactttccatgatcggctttggtctgcgtgtctacagccagcaccaagcagtagaagggcaagccgggcggtgggccagctatcacgagcgtatcgcggcagccatcctcagccccaccccatcgatcagcatcgatgcgagggggcgactgatcgtggtcgatgcatcaaccaagagcggcccgcacgaccgtgatggcgacaaatacgcagagaccatcgtcatctccagccaagatgcaggccgcatcatcgccggaaatgacgcacagtcgttctacgattccgtgcgcgcgaaggtcgacgactggggactgctgccctcccgggcagaggcagtcggcaccccactcgcacagaccgaaagcccccctcggacgacggcaaaatgggcgagccagcaatag

SEQ ID NO: 356459 - DNA, 1917 bp, Pseudomonas aeruginosa
atgaataaacttgcacattggctcgcgacaattgtccatgagaaggttctgggggcgacgcaagggtacggcagtaccaacctcgagtaccggctgatcttccgtggcccgcctctcgagatcctcgagctggcctacgaggaattggcacgggatggaggaatccacgttcagggcagcttggacggtagcatggcaaccctgccggtactgctccagtatccggctaaccagttgcagggacccaagccccggatcgggcagtctggcaagtgtgacaacgaccacctgctggatgtccgcaacgaccccgttaatcccagcttcgtcgccttggtcccaccagggctgcacaacaatttgtcgatcgagtccacgaccgacgagttcggactggggaccgctacgagtacgggccatgcctcctttgagcaatggtgggaggacggttttgtccagcaagccgtcaacgaggcattgcttgtagcaggtatagatccatcgcagcgggaagatgccaaggcattgatccgtgccgccgccggttcggtcgacgaggtggacccagacaaaggtggtcatcgcgccgcctggcgcttgctgtcgcgtctctattcgattgcgaacatggctcacggactttctgcaggacaagcactctccctggcatgcggccttcccccaacggaggacggcaggatctcgtcaaagacgcagacctacatactagggaggatatccgaggagctcgcagatggtttcaagactggcatcgagcgcatggcacaaagtgccccgcaagatgtaacacaggccctgcgcgacttccttgtccacctccaatcgaattgcgacatacccactgccttcgagcgcgcaaccgaggccttctacctccccggcgcggatgcagaattgactcccccaccctcctggtggacaaccctcacagccgaatgctggactgaactgcttgccgacgaagccgacgagaccgttggtgaaataactatccagtgcaccaatggcattgttcccatgggaaagggaatgcctacggtggtacgagacaaggtcgagctggctatctcgactagcgaaggctgcgaaccgcaagagtaccaattgacgggaggctcttatggcaaggcggctacgccattgctagcaaacggtagcggccccactcttcaatccgacctgtttccaccctcccacagggccccgatggcatacaaggtcatcgccgatggctgcaagccagcaagcgtccgggtgatttccctcatgaactggcggcctggaatactcattacctgccggctcgcgacgaagctttcaccgccgaagagacctcgcaagaagtccacgaacctagactgggagactgccctgtcgctaccaggatccggtcgctatgaactgcgaatccacctgtcgcctggagcatgcattgggaaggtagaagggctaccagacgacgccaccgagctcgaggcacagagacaggagatcgaggcgaggccagttggagaagatgagtatctgctggaagtcgaagccgacggaaagtaccagctggacatcgccttcacgctcgctggcgagaaaggtgccacggcttgcagggtctacctggcttgcgaggaggcaaaggaagaaggctgccgtagcgagttcgagcggcttatcaaactaaatcgccgacatctcgagaaattcgacaccaagactgtggtccatctcgaccggaactcccgcgcatccagtttgcagtcatggatgctggaggaacaaaatgcggcgaactctttcaggccgctggtgatcgcggacgactacgcgtcccggtgggcaccacccgagtgggacgcccccccacggccccatactctcgcaaggccgcttcctgcatga

SEQ ID NO: 356460 - DNA, 267 bp, Pseudomonas aeruginosa
atggagagctcccaacacgaaggcgcacgctaccctgccgcactggtcgactgggccggccatcactcagggggagtgaagcgactactcgacaagaacagcggccagccgaacaaacaactgctacgtacaaacctcctctcgcgactccaagcctggaccaacgagctccccaccggtaatcccagcactccaaaaatcatcctactggtgggggccccggaaacggaaagaccgaggccatcgagtccactatccgctggctag

SEQ ID NO: 356461 - DNA, 738 bp, Pseudomonas aeruginosa
atgtcaagtaggcgagttgttcgtcaggggcagcttattagcccatttggggtaggcgccattatcgacatcggttcggagtcttttgtgatggctgatatcagtcgttggtctccggatggaatgcgtcagattacggatagtaatttagaagtaaagcttaagagaccaataaaggcgcctatcgcaaaagacggtgtgaggtcggttgccattcatcggttccctcgttggtatttttgccctcgatgccggttgatgcgttttgttacgggtgccgatgatgtcagtaatgattataagacccctacctgcgcagatcgaaagtgtggtggtgagttaacgccgatggggttcgtggcagcgtgcaagcatgggcacatgtcggaagttgactggcattggtgggcccattcatctagatctgcagatgaagggaaatgcagtcgacaaggtgcaaggatgtggtttgaaacaactgggcaggccggaggagactggtctgccgtttctgttcgatgtgggtgcggggcgagaagagattttaccggtctggttcaggtggaggccccgcatggtatgcgatgcggagggggcagccttggcaattcgatcctctgcaatgtagtcagccgttgtgggttaataggcgtgcggccagtaatcttcacttcccgcgcacaatatcagcgctggacttgctgcatgctaatagcactgaaagagatcttgggctga

SEQ ID NO: 356462 - DNA, 1050 bp, Pseudomonas aeruginosa
ttgagctggtctgggatcaagacattgtcttcggccggggttccagtttccttgatacttcagagtgctgagtcgaccgttgcctcgattgctgataagtatggttgtgatttggcggtggttcgagaagctttggtggcggctctggcggttgatgagcttgaaacagaggtagaagatgatagtttggctgatgtacaggccgaaattcttgacgaagaatggcaaactttatcgggagtccatgatgtagagacggactccttaataattaagcgtacaaaaataccgtctgaatggcctagtgagctgttgagaacaatacggtctgtatcgttggtcaggcgtctgcgcgaagtgcgtgcgatattgggatttaggagaatatctccggacgaagaaagccctatgatccccgtagatcttggccagcgcccctccggttggtatccaggagtggaggcatggggggagggggtctttattcagttggatgcagacacggtaaagtcctgggagcaacgagtttccaagacccattcgcagcgacttaaggtgctggcagataaggccgcgggctttgggtggcaagcagcaatggctagtcctcgtttcttgctattgcattcatttgcccatgcagtattgcgaaggctttcatttgatgcaggatactctgtgtcttcgatacgagaacggatctatgcaggtcccaccggctcgacgacttgtgggattctgctgtacaccgcagatggggactctgaaggatcgctcggcggattagtccggatgggagagcctgagaggctgggagctctcctgcaggcggcgcttctggatattgcatggtgctccgctgatcctgtttgcaaagaaagcgaacaccaagggctgggagggatgagcgctgcatcttgccatgcgtgtatgcttgtttcggaaacaagttgtgcatttaataactgcttgctagacaggagaacattggtcgatctggggggcgttgaaccattctttaggctcgatgattttatggaagggacttag

SEQ ID NO: 356463 - DNA, 237 bp, Pseudomonas aeruginosa
atgcagttcttcctgcgctacgcctacgcgcccctcttctggtccggcttcatcggcctggcgacctggcaggtcggctatcgccaggcttcccacgcctggctggtcgccctgttcctggggcgctcggcctgtcctttctcgccgaacgacgactgccctaccagccacgctggaaccggccgcacgccgaccgcctgcgcgatgtcctgcacgcgtcggtcaacgaaagcctga

SEQ ID NO: 356464 - DNA, 441 bp, Pseudomonas aeruginosa
gtgtccgagctgcgcctgctgaaattgtcggaagccgactatcgacgcctgctgccgttcgtcagcgccttgcccgaagatgcgccgctgaacgtgaacactgccagcgtgccggtgctggccgccatgttcgagatcgatccgggacaggcggaaaacatcgtggacgcccgcggtcgggaaggtttccagagcaaggacgatttcaccaagcatctgacccagttgggttcgaagaccggaaacgtcagttatgccgtcggcacccgctacttccaggtgatcagcgaggtcagcctgggcgaccgccggcaggtgctggtgagtaccttgcagcggggcaaggacggcaagatacgcgtgatggcccgcgacatggggcagggcggcctgcccatcccgtcgacgggcggcgacgattggaagaaggacgagcgatga

SEQ ID NO: 356465 - DNA, 660 bp, Pseudomonas aeruginosa
  misc_feature (643)..(652): n is a, c, g, or t
atgacacctctgcacaacgccaaggagccaaccatgggcaaggcatttctttctcatagcagcaaagataaaatctatgtaaagaaagttgccgatgaattaggcagcgcgctttgccactacgacgaaagaacatttgagccttcaggagagtctgccggggaaatactagaagccctggacaactcaagtgtttttgttctttttctgtcaaaaaatgctcttgactcaccgtgggtagagaaagaaatattctacgccaagcatttgtttttcagtggacagataaaagaggtctcaatattcccactagatgaaacagcgcgagacagactagactcttggctgcgcccttttgttgtccagactcttcgctcaccatctcttgctgcacttagaatcagatcccaaattgatagtgagcagcacagtcatcctgccagattcattgggagagacacaccactcagcgagctcaaagatcggctaactgagaactctcccaacaaaacatctgccatcctactttctggcgtaaacgggattggaaaacgccgtctagcaaaacgcgcctatgaagacttgttcccatttctaccaaagcactggattgagatagaactaggaaactatgaaggtgagnnnnnnnnnngaaggtga

SEQ ID NO: 356466 - DNA, 429 bp, Pseudomonas aeruginosa
gtgccgatcgccagcggcgacgaatgccacgtctgcggcatgctcatcgaggaaatgcccggtcccaagggcgaggcggtgcttcccggcgcggtgcgcaagttctgctccaccgccgaactgttcggctggtggctgcaaccggaaaaccgccagggccaggcgcgcctgtatgtccacgacatgagccaggccgactggcggcaccccgacgatgcccgcctgatcgacgccacccgcgcctactacgtggtcggcatccagcggccgggcggcatgggcgccaccctcgcctcgttcgccgacgaagaggccgcgacgcgcctggcggccgaggaaggcggccgggtactgcgcttcgacgagatcgaccaggcggtactgcaaggcgtgggcggcgaccacccgcaccggcacccggcgcactga

SEQ ID NO: 356467 - DNA, 924 bp, Pseudomonas aeruginosa
gtggcagggcgctcggcgaggttcagcagcgggctgagcagggcgtcgccgttctgcaggcgttgcaggggggctttcgccggtagccagggcgcgcgcggagaaaccgccccagcagagcatctgcatgacttcctcgagcgccgccggcgccaggtaggcgcgatagtcgccggggcgcaactggcgcagcggcttgcccaggtggccgagctgctcccgggcctgttcgaagcgccgggcgaaggcttcgtcgtcccagcgctggccggcgtagtcggccttcaccgcctggccgttgccatggaacaggctccagtcgaagttgaagctgctgccggcatgccagccgaaggcgccccaggagttggcgaagccacggaacagcggtccggcggcatagatgccgaccaggtcgaggtcgcgcgcccggcgttcgaggctggccagcagcgcgccgctgtcgggcgctgcgccgaggtcctggttctctcgctgccaggccgaggtgtcgagcagcagatagggatcggcgggaatccaggccaggctctggcgcagttgccgaaggccttcggccagacgctggcggtcttcttccggcgcgccggagagcgtcaggtcgaggctcgcctggcgttcgtcgcggatcagccggagcagcgcgctggcctggcgcacccggccggcctggcgcacccgcgcccggctgaagcggatgaactcggagtcctcggcgctgtaccagagggtgaagtcctcgccctcggccagatgccggcgcaggtcctcggcgagggcttcgaaatgctgtctctggtgcatcaggtatctcccccgaatacgtccacatcgctgaatacgcaggccggcgaggcgtggccgacacggatcacctggttcggctcgcccttgccgcagtag

SEQ ID NO: 356468 - DNA, 210 bp, Pseudomonas aeruginosa
gtggcggatgtagagaaacggcgcgatacgctcctgcaggaggccacgctgcgcattgcaccgctgcaggatgccattgacctcgacgaagcgacccaggcagaagtggcagagctcaaggcctggaagcaataccggatcgcgctgaaccgggtagatcagcaagcgggctacccctccctggtcgaatggcctgtctcccccgcatga

SEQ ID NO: 356469 - DNA, 276 bp, Pseudomonas aeruginosa
atgagcgtccaggacctgcagcaactgctgctgacctacagcctgctgctgccgcggatcatcagttgcttcgtggtcctaccggtgctggccaagcaaaccctgggcggcggcctggtgcgcaacggcgtggcctgctcgctggcgctgttcgcctacccgatcgtcgccggcagcctgccgccggccctcgacgcgctggacatcgccctgctgatcggcaaggaagtgctgctcggcctgctcatcggcttcgtcgccaccattcccttctga

SEQ ID NO: 356470 - DNA, 1158 bp, Pseudomonas aeruginosa
atgcaggcgttgcgcagtggtgggggacgggtcctggtgggcgtgctggcggcgggcctggtcgccttcggcggttgggcatggctcggcggcgacgccggggcgaaggcggcgcccgcgccggccagggtcccggtgaacgtggcgcgggtggagcggcgcgacgtcgagcaacaggtcagcggcatcggcacggtgacttcgttgcacaacgtggtgatccgcacccagatcgacggccagttgacccgcctgctggtgagcgaagggcagatggtcgaggcgggcgagttgctggcgaccatcgatgaccgcgccgtcgtcgccgcgctggagcaggcgcaggcctccagggcgagtaaccaggcccagctgaaatccgccgagcaggacctgcaacgctaccgcagcctgtatgccgagcgtgcggtgtcacgccaactgctggaccagcagcaggcgacggtcgaccagttgcgcgcgaccctgaaggccaacgatgccaccatcaacgccgagcgggtgcgcctgtcctacacccggatcacctcgccggtatccggcaaggtcggtatccgcaacgtcgatgtcggcaacctggtgcgggtcggcgacagtctcggcctgttcagcgtgacccagatcgcaccgatctccgtagtcttctccctgcaacaggaacagttgccccagttgcaggcgctgctcggcggcgaggcggcggtgcgcgcctacagccgcgacggcgggagcgcgctgggcgagggccggttgctgaccatcgacaaccagatcgacagttccaccggcaccatccgcgtgcgcgcctccttcgataaccgccaggcccggctctggcccgggcagttcgtcgcggtgagcctgcacaccggggtccggcgcgaccagttggtgctgtcgagcaaggcggtgcgccgcggcctggagggcaatttcgtctaccgggtcgccgccgaccgggtcgaggcggtgccagtgcgggtgctccaggacatcgacggcctcagtgtggtggaaggcctggccagcggtgaccaggtggtggtggacggccactcgcggctgatgccaggcgccctggtcgatatccaggagccgcgcccgagcctggcccaggccacggagcggcggccgtga

SEQ ID NO: 356471 - DNA, 267 bp, Pseudomonas aeruginosa
ttgaagtgctttcccgattgggagtggtacaacataaatatattcggaaccgacgaccccaatcatttctgggtcgaatgcgacggtcacggcaagattcttttccccggatatcccgaaggttattacgaaaaccacttcctgcattccttcgaacttgaagacggcaagatcaagcgcaaccgcgaattcatgaacgtcttccagcaattgcgcgccctgagcattccggtcccgcagatcaaacgcgaaggcattcccacctga

SEQ ID NO: 356472 - DNA, 534 bp, Pseudomonas aeruginosa
atgtccgacgaggaggggcgttcgccattctgggaaagcctcggccggcacttcttcaagatggaattctcccaggccgactacctcaccggggtcggcaacaaggccttcatcgccgagctgatgccgaagttcccgctctacacctgcttcctctccgaggaggcgcgcggggtgatcggccgcgtccatccgaacaccgagccggcgctggctatgctcaaggccgagggcttcagctaccagggctacgtcgacatcttcgacgccggcccggcgatcgaggccgagaccgacaagatccgcgccatcgccgagagccagaacctggtgctggcggtgggcactcccggcgacgacgccgagccctacctgatccacaaccgcaagcgcgaagactgtcgcatcaccgccgcgccggcgcgggccgccgccggcaccctggtggtcgatccgctgactgccaagcgcctgcgcctgtcggccggcgcctcggtacgcgcggtgccgctgtcggcgcagaagcgcggttga

SEQ ID NO: 356473 - DNA, 1449 bp, Pseudomonas aeruginosa; identical to SEQ ID NO: 319991

SEQ ID NO: 356474 - DNA, 951 bp, Pseudomonas aeruginosa
atggcccgcccttcccctcccatgcccctgctcgccgccgccctgctggtcgcaggcgcgattcccctcggtttcatctggatcctcaccagcgccaagttcgagataggcggcgccagccccggcgagagcaccgtcggcaaggtcgagaacatcgaccagcgcgccatggagcaattctgcaccggcgtgcgggcgacgcccgccggcacctggctggtaggccggcgcgaggtcggccgcgacgagcaggctctgcccgagggcgtcatcgacctggacctggtggcggccgcccagcccagggaaaaagagtccgacccccacctcttcaacttcctcaacggcatgctgctatccggcggcgatccggaaaccacctatgtctcgcgcctgggcgcggacggcgtgttccacgaagtggcgcggctcggcgagaccgcctgcctggaagtcacgccggacggttccagcgtcttcctgctcaccggcctgcggcgcccgggcaaggacaacggtcagcgcgagcagacagtggtgctgcgcagcgacgaccagggcaagagctggcggcggctcgaggaaggcttcatggccgaggcgaatcgactgggctgggctctcgcaccgcgcttccacggcaaggatgaagtctgggtctggggtgatttcgaatacggcggtgccgatggcggccgggaacccggccagccgagcgggctgttctattcgcccgaccgcggcgccagtgtcgagtcgatcgccacctccgcgccgctgctggtcgacctcgcctacgcccgcgagttggcgccgaacggcgtcagctggggcgactacaacggcaagcacgggcagatcaaggcacacgtcgctcaactggacgcggagcgtgccgcgatctgggtaagccagaccttccgctatgcccccccgaggggcgctacctga

SEQ ID NO: 356475 - DNA, 1182 bp, Pseudomonas aeruginosa
gtgttcggagtacttggccggggcgacgatccaggacacctgcggcaggctgttggccagcacgtcgcgcttcagcgcatcgagcttccaggtgctcaggccgttgacgatcagcggcgagtcaggcgccgcggcgcggtactggcggaagccgatcagcgggttgtcggagaagttgtcggccatgtcctggtagacccgccaggtgatgccggcagcctgcaggcgctcgggataggtggtccaggtgtagccctgctccaccgggccgttgctgtcgtggtcgttggtggttaccggaccaccgtgctggccgagcgggtcgttggtgccggtccagaggaacagccggttggggttggtgccgccctggaacgagcagtgataggcgtcgcagatggtgaaggcgttggccatcgcgaactggaaggcgatgtcctgctccttgtagtagcccagggaacgctcggtcttggccggcaaccacttgtccatgcgcccttcgttccaggcctgctgggcgtccggccaggtgtgcggggtgccgtcgacgcgctgggcgctggtggtgctggtgtcgaagtggtagggcaggatctcgcccttgctgcccttctggtgccagacccgctggccatcgggcagcgggatcgccatgcggtcgccgaagccgcggacgcccttgagggtgccgaaatagtggtcgaaggagcggttctcctgcatcaggatcaccacgtgctcgacgtccttgaggttgccatgccggcggtgcgcgggaatcgccagggccgcctggatgctcgacggcagcatgctggtggcgacggtggcgccgaccgtaccggcggccaggcggatgaagcttcttctgcttttcgaaatcatcaggggactcaccaggtcagggtgtggcacagggctgccgagcgcatccatgacgcccgcaggctcactcggcagcaagctgttcgaaccccgacgacgctagtgagggaaaaagacgctttggtttcaacacgctttgcaacaactattcatgccaacttcgtcacaatttcagatcaagattttggtctaggccagattccacttgacagccttcgccggcactctcctcacactcttccccgccattgcaggagcaatacccccgccaccaccagcgccaggccgagatag

SEQ ID NO: 356476 - DNA, 657 bp, Pseudomonas aeruginosa
atgggtattgagtcgataagggattcccgcgcagggtttgtcagctatatgcggtcgagacttattggtccagccgatggagactgcgaagagttcgatggctcccctctcttgagatacatgatgggaatgttgttccctcgtgagggggagttagatttggcagatgatggtactgaagatgttggtctgtctacagacgacgagtctgaccagactgttggtgcaagtcatcgtgcaatgccttcatctgttgggttgagttttctcgtcgcgaaaggtggaacccttaagtgcaatgtttccgcttctatatatgagcgactagaaaacgagcgagggtcacggtcccgaagacgtggtgaaatgaagtggcgacggattgccgttccttccgcgggtacggagaccgtggacgtcaacttggaacaaaatgtcaggccacttccggtgctgggggggcgggccgaggtgcacattaagtcgagaccttggcttgatggtgcaaatttattgactgtgacgctagtcaactcaatggaaaagggggggggcaggggtttgacccagaaaaggttctcttccaggtcgccttgtccgtcgatgtggttgacggcgagttcctgccttatccgaggccacgctcagctgcggtaa

SEQ ID NO: 356477 - DNA, 315 bp, Pseudomonas aeruginosa
gtgcgcctcgactatccgacgcgggtggcaaggcccttgctggtggatagccggatgcccagcggcgagcccctgccgttcgccgcggaagtgctcgatgcccacagcgggcagtcggtgggcgccgtcggccagggcagtcgcctggtgctgcgggtcgagcaggatcgcggctcggttcgggtgcgctggggcaacgagccgcagcagcagtgcctggtcgactatgcgctgggcccgcgcgagacgacgcctcccgtcctgcaactggcatgtcgcccggcgtcggccgccgaccgggagcgcacgctgtga

SEQ ID NO: 356478 - DNA, 942 bp, Pseudomonas aeruginosa
atgaatcccccggtgttctacggtgcggcgatcctgatcctgctgttcgccgcagtggtcatcggcttcccccagcgcgccggcgaatggctgctggccgcgcagacctgggcctcgcagaccgtcggttggtactacctgctggcgatgacgctgtacctgatcttcgtggtggtcaccgcgctttccggctacggcaagatcaagctcggtgccgaccacgacgagccggaattcagctacctgtcctgggccggcatgctgttcgccgccggcatcagcatcaccctgttcttcttctgcgtatccgagccgttgacccacttcctccagccgccgcaaggcgaggccggtacccaggaagccgcgcggcaggccatggaactgctgttcctgcactggggcctgcacggctggggcgtattcgccctggtggcgatggcgctggcctacttcgcctaccgccacaacctgccgctggccctgcgctcggcgctctacccgttgatcggcaagcgcatcaacgggccgatcggctacacggtggactgcttcggcatcatcgccacggtgttcggcctcggcgccgacatgggcttcggcgtgctccagctcaactccgggctggactacctgtacgccatcccgcatacccacccggtgcagatggcgctcatcgtgttgatgatgggcgcggcgatctcggtggcggtctccggggtcgacaagggcatccgcatcctctccgacatcaacatgctgctggcctgcagcctgctgctgttcgtgctgttcgccggtccgacccagcacctgctcaacaccctggtgcagaacgtcggcgactacctcggccacctgccgggcaagagcttcgacctctacgcctacggcggccccagcgactggctgggctcgtggacggtgttctactgggcctga

SEQ ID NO: 356479 - DNA, 1017 bp, Pseudomonas aeruginosa
atgggcttggtcggggtcgataccagcctggggaccatcgaacagttgttgaataccaacgtcggcttgcagcaggtactcgccgccagcgtgaacgtcctggcgaagaacggcgtagcctcggtcgaggccctgagaacgcaattggtgggggtaaagtcggccacgttgaaactgggagacttgctggggctgagcgccggcgaggtgaacagcatgtcgcagctggatacggcgatcaatgcgctggatctcatcatggcggttgcccaggtcgccaacaagaattccgcggtcgccgtgaacctgggcatccccggattggccaatgcacggctcacggtcgtagagccgaagaggatcgtctccgggccgccagggcaggatgagagcggcgcctggcgcacggaggtgcgccagtcccaggtacgacttacggcggacatcgattccgggttcctgtccattctcgccaccacgaaactgcaactggccatcgaaggcgcgtcgggagccgtctggctgaaaagcatggcctgtacccgcccggataccgcgttggacttcggttggagaagcagcggagcgacgataaagatcggcagtccggccaacatcgatcaggtcggctcgattctggtgcttggcggcttggtgcgattggatctcaagctcgatacctcgatcgccggcagctcgggcgatacgcgattcaacgtgaaagccgacggttccgatctcgtccagagccgcaggttgccggaaagcggctttctcgccagtaccctgaaaaccagcatcaacgtcaatcccgtggtgctcggactgtgcttgcctttgctgtgcggctcgacggcgctcaccgacctcatcgtgaattccgtggtggcacctctggtcgatgggctgctgacgccgatcctgaatctggtcctgcccttgctgggggtacaacttggatacatcgacgcggagattctgaaggtcgatgtcggcagggcggaactgctgatctag

SEQ ID NO: 356480 - DNA, 648 bp, Pseudomonas aeruginosa
atgcgtgtgattctgctcggggcacccggtgccggcaaaggcacccaggcacggttcatcaccgagaagttcggcattccgcagatctccaccggcgacatgctgcgcgccgcagtcaaggccggcagcccgctcggccagcaggtgaaaggcgtgatggacagcggcggcctggtatccgacgacatcatcatcgccctgatcaaggaacgcatcaccgaggccgattgcgccaagggcttcctgttcgacggcttcccgcggaccatcccgcaggccgaagcgctgaaggacgccggcgtgaccatcgaccacgtggtcgagatcgccgtcgacgacgaggagatcgtgtcgcgtatcgccggtcgtcgcgtgcacccggcctccggccgcgtgtaccacaccgagcacaacccgccgaaggtcgccggcaaggacgacgttaccggcgaagagctgatccagcgcgaggacgacaaggaagagaccgtgcgtcaccgcctgtcggtctaccattcgcagaccaagccgctggtcgacttctaccagaagctgtcggccgccgaaggcaccccgagataccacagcatcgccggcgtcggctcggtcgaacagatcaccgcgaaagtgctttcggccctgagctga

SEQ ID NO: 356481 - DNA, 597 bp, Pseudomonas aeruginosa
atgttctctgcataccttgcaccaactgagtacgatcaacctaagcccattgacggcgagtatcccgcaacagtgtttgaaacttatgctgagtttcaatacttggggcgcaaggtcctagccagaatttccgcccaaggctccatgaacgcggatggaaaccctggaagagtcattgtgaaaggggatgacgtggaaatcacatggaatggaagtgccccttataaaccctttgagtacgctcgtagtgatgagcgagaaattcgttacgacctctctttgatcgcctcgttagtgcccgaagaatttgatcagccacatccacttactgacaatccatatggcttcaaatgtcgaactagaagtatcgacatagagtttggggtgcttgaaaaatatcgcgccagattggacggttacatacagttccctgttatggatgccccatgcgtagtcaaacctctagaaggcgaacctctaaaatgcttggtggtttttgatgaagagaccattttcctagccaagaggtatggtcggggggtacatgatcggttagtggcgaaggcagttaacgaactgcaagctctcctcccctaa

SEQ ID NO: 356482 - DNA, 1200 bp, Pseudomonas aeruginosa
gtgagtcagccggctctggtgatcgaacaacagccagttagaccctcgccgcggatcggcgccgcgctggccggcctggccctcggcgccttcgccgccggcccgctggccgaccgtttcggacgcaagagcgtgctcctgctctcggtgctgttcttcggcggctggagcctcgcctcggcctacgccggttcggtggaaaccctggccctgctgcgctttctcaccggcctcggcctgggcggggcgatgcccaacgcgatcaccctgacctccgaatactgcccgcgccgacaccgcgcgctgatggtcaccgcaatgttctgcggtttcaccctcggctcggcgctgggcggcctgctcgccgcgcggatggtcccggcgctgggctgggaaagcgtgctgctgctcggcggcggcctgcccctggcgagcctgccgctgctctgggcatgcctgccggagtcggtgcgcttcctcgcccgccgcgcaccggacgcggcgcgcctgcggcgcatcctcgaacgcctggggcgcctgcccgacggctgggccgggcgcctcgaactgcccgccgacgagtccgacggcacctcgcccctgcggcagatcctcggcgccgagctgcgcggcggcaccctgctgctctgggccacctttttcatgggcctgctgatcatctacctgctgaccaactggctgccgacgctgatcggcggcaccggcttcagtctcggcgaggcggcgacgatcagcgccatgttccagctcggcggcaccctcggcgcactcctcctgggcagcgccatggatcgcttcgacgcgcaccgggtgctgagcctggcctacgtcggcggcgccctgttcatcctcggcatcgccagcctctaccacagcttcgccctgctggcgctgtgcgtcgccggcgtcggtttctgcatcagcggctcgcaggtcggcgccaacgccctggccgccgatttctatccgacccgcagccgcgccaccggggtcagctgggccctcggcctgggccgcatcggctcgatcgtcggctccctcagcggcggcgccctgctcggcctgggcctgggcttcagcggcatcctcgccctgctggtgatcccggcgctgctcgccgccgtggccgtgcatcgcctgggccggcgccgggccaggccttcttccgtcactctctga

SEQ ID NO: 356483 - DNA, 135 bp, Pseudomonas aeruginosa
atgcgtgatgctgccctaggtcctgtgaacctgtatattcgcataatgaccacggcgttacgttacctgtggcggccgcaggccgaatgcgaagcccggaaaatcgccccgcgccgggcgagcatttacacgtaa

SEQ ID NO: 356484 - DNA, 1503 bp, Pseudomonas aeruginosa
ttgagcgattcaagcatcaccctcagccagctggagagccatctctgggagtccgccaacatcctgcgtggcccggtggacgcggcggacttcaagacctacatcttcccgctgctcttcttcaagcgcatctgtgatgtctgggacgaggaatacgccgagatcgtcgaggagagcggcgacgccgagctggcactgttccccgagtcacaccgcttccagatccccgagttctgccattgggaggacgtccgggagaagtcgatcaacgtcggctcggccctgcagtgggccatgcgctccatcgagcgcgccaaccccgacaccctctacggtgtgttcggcgacgcccagtggaccaacaaggagcgcctctcggatgcgctgctcaaagacctgatcgagcacttctcgcgtctgcccctgggcaaccgcaatgtggcatccgatgtgctgggggatgcctacgagtacctgatcaagaagttcgccgacgccaccaacaagaaggctggcgagttctataccccgcgcagcgtggtgcgcctgatgatcgagatgctcgatccgaaagaaggcgaaaccatctacgaccctgcctgcggtacgggcggcatgctgctggccgctgtccagcacgtgaaggagcagcacggcgacgtcaaacgcctgtggggcaagctctacggccaggaaaagaacctgaccacctccgccatcgcgcgaatgaacctgttcctgcatggcatcgaggacttccagatcgttcgcggcgacaccctgcgcaacccggcattctatgatgtcgaccgcctggctaccttcgactgcgtgattgccaacccgccgttctcgctggagaagtggggcgaagagctgtgggcgaacgatcccttcgggcgcaacttcgccggtgtgcctccgtccggttccggcgacttcgcttgggtccagcacatggtcaagtcgatggccaaaggcaacgggcgcatggctgtggtgctgccgcagggggcgctgttccgcaagggagtggaagggggcatccgccagaagttgctggaaatggatctgatcgagggcgtcatcggcctggcaccgaacctcttctacggcaccggcctggccgcctgcatcctgctgctgcgcctgcgcaaacccgaggccaagaagcgcaaggtgatgattgccgatgcctcgcgcctgttccgccgcggccgggcacaaaatttcctggagctcgagcacgccaagcagatccagggctggtacgagcagttcgtcgatgtgcaggacgccgtgcggatcgtcgatctcgacgagatcaaggccgaagactggacgctgaacatctcgcgctatgtgctgccgccgctgcaggaggacatcccgccactacctgaagcgatttcagccttcaaggatgccttgcaacgctgtcgtgaggcggaggagcggctggctgccgtcatgctcgaaggcggctggctcaaaggagagtaa

SEQ ID NO: 356485 - DNA, 1029 bp, Pseudomonas aeruginosa
atgctgtacgaactgaatctcggcgcactatcggacagccgccgcgtagccatcgagcggccggacgcactgcacatcagcgagaagcacatcgaagacttcctcgcttcacatcttgtggagctcatcccggaggagcagctcatgctgctggctcaggagcgtcagttccatgaggaggcagatatcctcgcactggatcgccgcggaacgctgttcatcttcgagctgaagcgctggaggtccagctccgagaacctgctgcaggtcatgcgctacggacagaaattcggccgctacacctatcagcaactggaagagatggtgcgccgtcagcaacgactggatggctccttgaaagaccgccactgcgagtatttcggactggaccagccgctcaaggaagaagagttcaaccaggatcagcgctttgtcgtggtcaccaacggcgtcgacagagacaccttggaggctatccagtactgggcgcgcaagggcgtccacatcgacagcctgacctacaagctctatcgggtctcgggcaagcccttcatccagtttgacacctataaccctgagctggatctgctgctggagtccaatcccggcattttcgtcgtcaacaccaaccggacctacatgggagacgcatggagggacatgctgggcgacggcaagaaaggcaaggctgctgcctactatgaccgcaagaacgccgttcaacgcataggcaaaggctcaaccgtattcctgtaccacaccggcgtcggtgtcatcgcctgtggtaaggcatccggtggcgtgcaagtgacggattattgtggcgatcccgatgaggagttttacgtgcctctgcagttcgactgggcactgttagacccaaccacctgggcatcaagagctcccaaggctcacgaaatcaacaccctcaccggggccagcaatcgcttcaggcaaactgtcttcaacgcttcggaagacatgcgcgatgcgatccagcgggtctggatggagcgcaacccgtcatga

SEQ ID NO: 356486 - DNA, 1500 bp, Pseudomonas aeruginosa
atgacacaacgcatcacccaacaggaactggaaagctacctctggggcgccgcagtcctgctgcgtggcctcatcgatgccggcgactacaagcagttcatcttcccgctgctgttcttcaagcgcgtctccgacgtgtgggacgaggagtatcagtccgccctgcaggagtcggatggcgatctgtcctatgccgagttcgccgagaaccatcgcttccagattccggccggcgcgcactggcgtgatgtccgccaggtgccgatgaacgtcggcatggctatccagaaagccatgcgcgatatcgaggcggccaacccggagctgctcgacggcatcttcggcgatgccgcctggacgaaccgcgaacgccttcccgacgagaccctcaaggacttgatcgagcacttctcgactcagatcctctcggtggccaacgtgcccgaggacgaactgggaaacgcctatgagtatctgatcaagaagtttgccgacgactccggccacaccgctgccgagttctacaccaatcgcaccgtcgtgcacctgatgacccagctgctcaagccccaggccggcgagtcgatctacgatcccacctgcggcactggcggcatgctgatctccgcgctcgacgaggtgaaacgctccgggggcgagtaccgcaccctcaagctctacggtcaggagcgcaacctgatcacctcgtccatcgcccggatgaacctgttcctgcacggcgtcgaggacttccagattatccgtggtgacaccctcgccgagcccaagcacattgccggcgaccgcctgcgcaagttcgacgtgatcctggccaacccgccgtactcgatcaagcaatggaatcgcacgacctgggagcaggatgcctgggggcgcaacttcctcggcacgccaccgcagggccgagcggactacgccttccagcagcacattctcgccagcctcagcgagaagggccgcagcgcggcgctgtggccgcatggcgtgctattccgcaatgaagaacaatcgatgcgcgctaggatggtcgagcaggactgggtcgaaggcgtcatcggcctggggccgaacctgttctacaactcgccgatggagtcctgcatcctgatctgcaaccggcacaagccagctgagcgcaagggcaaggtgctgttcatcgatgccgtcaacgaggttacccgcgagcgggcgcagagcttcctcaagcccgagcagcagaagcgcattctcgatgcctggcaggcgtttgtcgacgagcccggctttgcccgcgtggccactctagacgacctcgccggcaacggcttcaacctgtccatcccgctctacgtgaagcgtcagagcagcaacgcctcgacggggcagcagacgcagagcctgcaggaagcctgggcaggctggcaggacagcggccgggcgttctggctgcagatggacgagctggtggaaacgctggacgggctggtcgagcagaactga

SEQ ID NO: 356487 - DNA, 330 bp, Pseudomonas aeruginosa
ttggagatccacttcaaggacaagaaaatccgggagctgtgcgaaaagcaggcggttgcccagaagagactgggggcggattgcgcccgcaagcttcggattcgcctgactgcgcttgaggcagcagccagggtcaccgacctcgtggcgggcaacccgcacccgctcaagggcgaccgtgacgggcagtttgctctcgacctagcagggggatggcgtctggtgttcgctcccgaccatgatccttgccccactcatgccgatggcggcatcgactgggcgcgggtcaccatcgtctgcattgaatacattggggattaccatgactga

SEQ ID NO: 356488 - DNA, 1119 bp, Pseudomonas aeruginosa
atgactgagctgagtgctcccttcgctccagactgggtctccccgcctggagaatccatcctcgatctgatcgaggaacgtaactggacgcaggcggaactggcccagcgcctgggctttaccgaaaaacatatcagccagctgatcaacggcaaggtgccgctcagcgtggatgccgcgctacgtctggagcgtgtgctgggcagtacggctgacttctggatgaacctggagtccaactatcagcgacacaaggcccgcctggaagccgccgaaactcatgcacgctgggcaccttggctggatgaactgccggtcaaggagctgatgagcactgctgccattcccaaggtccgtctggacgccaagaacaagcctggcgtagtggaggcctgtctgcgcttcttcggcgtggcatcgcctgaagaatggcgcagccactacggcggcatgcagatggcctttcgccgcagccgggccgagcagagcgatgtcggtgccatctcggcctggctgcgactgggcgagcgtgaagccgagaagctggacggcccgaagtacgacaaggcccgtttcgagcaggcactgaagaccattcgcggcctcacctgcgaggcgcccgaggtgttcgagccgcaattgcgtcggctgctgcatgaggccggcgtcctgctggtactggttccggccatcccgcgcgcccatgtcagcggcgtggcgcgttggctgagcgcctcgcgcccgatgatccagctctcgctgtacggcaagaccaacgacaagttctggttcaccttcttccatgaggcggcgcatatcctgctgcatgccaacaccaaggaagaacggaagtccgtcttcctcgacgaccccaatgccagccatgccgacgacccgcaagagcatgaggccaaccaatgggccggcgactggttggtcccgccgcagtacaaggctcagctcgccagcctgcgcagcaaggcggcggttatcgcgttcgcacagcagatcggcatccatcccgggatcgtcgttggtcgtttgcagcacgacaacctgatcgagccctcatggatgaatgacctcaaggcgggctttcgctttgcggatgctgcatag

SEQ ID NO: 356489 - DNA, 936 bp, Pseudomonas aeruginosa
atgacaaccgacatggacgcccgcgaatacctggccagcggtgataactggaccagccagattgcccgcctggccttgcccatcgtgctctgggtagccaagcagggctggacgatcacctacaagcagcttgccgaagagctgcatgccaggcatggcgaggagatcaagcggcgtatgactgtctatggctggcccgctggcaaagtcggccatgcgttagccaggctagccgatgagtgggaagaagcggtgcccccggccaatgcactgatcgtcaatgccatgaccgggctccccggccatggcgtaaacgagttcgtccgcaaattcctcaaccgtcaggcgcgacgccgccggatgaccgacaacaaccgcaaccagctggcggaagaggtcatgcagagcgtctgggattacccggactgggatgaggtcgccagccatttcggcttcgataatctgccgccagtgtctgtactggtcaccagcaagcaggacgacgaccccatccagttgccgcccatgaccaagcaggcgggcggccagggcgaaagcgcgcagcatcgcagcctcaagttgtgggcagccagccacccgaaattcttcgcgcgcttcggcaagtttccgcagggccataacgagtacctgctgcgctccggcgacagcctggacgcctatctgcagaacaaggacacctgcctggccatcgaggccaaggccagcaatgcgcctgacagcgagatcttcagaggcatcttccagtgcgtgaagtaccgcgccaccctgcgcgccacgcaactggcggccggcgagccgaccaatgctcaggccgtgctgctgactactgcccaaccctcatccgaggcactgcgcctggccaagcggctgcgcgtggtgatcctgattgcgccaccggaggctgaacgtggctga

SEQ ID NO: 356490 - DNA, 1194 bp, Pseudomonas aeruginosa
gtggctgatagcaagaatttgaagcccggctggcgtcgggtgaagtttggcgatgtggtgcgtcaagtaaaggacaaggtcgatccagaaacctccggcctggagcgttatgtggccggcgagcacatggataccgatgacctccgcattcggcgctggggtgagatcgggtcaggctatcttgggccggcgttccacatgcgcttcaagacaggtcaagtgctgtatggctcgcggcggacctacctgcgcaaggttgccgtcgctgactttgaggggatttgcgccaataccacattcgtcttggaaccaaaaaaaccggaagaatttcttccagagttcttgccgcatctgatgcagacagatgaattcaatgacttctcgacaaagaactcgaaagggtctgtaaatccatacataaatttctcagacttggctgaatttgaattcttgctaccaccgacagtggcgcaacagtcggccatcgctttgctgagggctgcgaaagaccagtgctatgccattgaagaggtggttgtcgctgctcgtcgaatgctacaagcgttcaaggactctctgcttgaaagctatcgaccggaagagataaagccctacctgcttggcgatttgttactgggctcaccagagagtggctgtagcgctccaccgaaggaggcaggcactagttatttcgtgctcgggttggcagcattgtcccgtgatgggtacgtttccggggactttaagcccgtagagccaacgaccaagatgcttgcagcaaagctctcgaaaggagacatgctgatatctcgctccaacacagtggaccgagttggatatgttggaatatttagcgatgagcgtgacgacgtatcctttccagacacaatgatgaggctcagaccaaacccatcattggtatttcccggctatctggaagccttattgcagacgacttctgcccgtgaatttctgatgcgaattgcagcaggcaccagcgcgagcatgaagaagatcaatcgcgccaacctgcttcaaatgcccttagaaataccgagtcttgatgctcaagcatcagcactcaacagactgcaggcgctcaacagcacaatagttgcacagcagtctcggtgggatgacgcccggcagttagcgaagctaattgctatcaaggaaattgggggggctgcataa

SEQ ID NO: 356491 - DNA, 219 bp, Pseudomonas aeruginosa
atgacaatgccgagtgagcgcacccgcgcaatcattcaaacccgggagtttctggtcgacttgtcccgtgaccaggcaatgcctgaggcggtgcgcactgaggcgcgtcgcctgttgcgtcattacccgaccgccgatgaggtgctgcttgccgggaaggtagaggaacagcgcgaagatggcctgccgtgggttctcctgagctccaggatcgactag

SEQ ID NO: 356492 - DNA, 1392 bp, Pseudomonas aeruginosa
atgacatcatcactgcgagactggcagcgccgctgcatcgatacggcgctggagcacttcctttcctcgccacactttttctgccaggcaactccgggcgccggcaagacgcgcatggctgcagaactggcccgctgcctgctggaacaagggaagatcgatctggtgctgtgcttcgcaccgtcgtgccaggtcgtcgacggcttccgctcgaccttcgcggcggtgctcggcaagcgcctagatggactgctcggtgctgtgggggccgcgtacacttaccaggcaatggattaccgtgacgaggcgttctggcggctcctcgacgactaccgcgtattcgccgtcttcgacgagattcatcattgcgccgggcatgatccgctgctgagcaacgcctggggacagcagatcctgcaacggatacaggatcgcgccgctttcaccatggcgttgtccggcacgccatggcgctcggacgaccgagccattgccctggcccgctactcgtcccccgagggacacctgatctgcgactaccgctatggcctgagggaggccattgccgacggggtgtgccgcgcgccccgcatcgtccttctcgataaccagaaggtgaagctaactgaagaactggagaccgagagcaccgtcaggctgttccccagcatcgccaagctgcttggtgaatcccccgtcaccttcgaagagctgttgcgccatgacgaggtgatcgaccaactgctcggcctgggatgcgccaagctggatgagcttcgccagatcaagccggatgcagccggcctggtggtcgccaccgatattgagcacgcccagcagattgtccaggctctggaagccagcggggaaggttgccgcgtagtgaccaaccggactccgaatgcccaacaggtgatcaatgcgttcaggcacagtgattgccgctggatcgtcgctgttgggatgatcagcgagggtacggatatcccccgcctgcaggtgtgctgctacctcagccgcatccgtactgagctgcactaccggcaagtcctggggcgcgtgctgcggcggatgggcgagtccgatgatcaggcttggctgttcatgctggcggagccaacattgcggcgctttgcggagcgcattgcggatgatctgccggatgacctggcagtgctgagccgggtgaagatgcccgctgcctcttctggttcgatggctggtgggatgggggctacctgcgatatcgatggctgcggtggaggcgaggccgggcaaagtcttggtgcaggtttggcgggtgcctactcgctgggggattttgctgctgagccgagctatcaggtcagtttttcaaagcactaccggcagctgttgttggcctgtttctga

SEQ ID NO: 356493 - DNA, 531 bp, Pseudomonas aeruginosa
atgaaagccatcgacatgtttgctaacgtcgtcgggcaggtgatggaggacggtcacgttcagaaatacggtgccatattgctaacccgtggcgttgcagggctggccaagctcaatcccacagtcgtttgggtggatgctgcagtggcggtcatcgaggccgctggatcctacttccgctactgcgctgcccgtgaagtcaccgaacagctgcgcgaatacaaccgcatgctggaagccactctggcccaggagctgcaactgggggagctagagatcaaagcaataggcaaggagcgaaaggggcggctggcacacattgagcgcaccctaggggtcacccgttgccagattctgctcagtcaaaagaaagttcgcaagcaactctctctattgaaacgcatgcatgccctgttgcaacaagagcgccttcagtcggggagcttccaggagctgattggtctgcaagtctgcctcgacagctgcattgatgccaccctagcactgctgcttagtcccactggagaatag

SEQ ID NO: 356494 - DNA, 831 bp, Pseudomonas aeruginosa
atgaggcagaaccggactctcgacaagccccgcctgctcggcctggtatggcccttcatcgtcgtggtgctgttgcaggccatgctggcgggcggcagtctctacgtcctctccgcggtgcgcagctatgtcggcggcgaaagcctctggtcgaagggccagaaggatgccatctactatctcaccctctatgccgactcacgcgccgacgaagacttccgccgctacgaggaggccatcgcgatccccctcggcgaccgcgagatgcgccttgccctggaccagcccgacccggacatcgaggcggcccgccagggcatcctcaagggcggcaaccatgccgacgacgttaccgcgatcatctggctgtaccgcaacttccacgacttcagttacttcgagcgcgccatcgagctgtggctggtgggcgacaagtacgtcatggaactgatcgacgtcgccggcaagatgcgcgcgggcatcggcaccgggcaggccagtgccgagcaggtgcaacagtggaagaccgagatccacgcgatcaacgagaaggtcacgccggcggccaaggccttcagcgacgccctcggcgagggctcgcgggccttgctcaggctgctgctggtggccaacctgaccaccgccagcgtgctcatcctcctggcgttcctgcgtacccggcaacaactgatgcagcgccaggaagtggagaacgccctcgatgccgagcgcgaacgggcccagatcaccctggcctcgatcggcgacggagtgatcaccgccgacacccagggggcatttcctacctcaacccggccgccgagcagatga

SEQ ID NO: 356495 - DNA, 342 bp, Pseudomonas aeruginosa
atgtgcagaaggctcagcctcgaggccgaccagttgagcgtgactctcagcgatcatgacggactgctcgcgatcccaccgcgcggcgccatgctgcacctctggctgggctggagtaacagcggactggtcgacaagggcccctacactatcgacgaaactggtggcgactacacaggcaccatcgcctactaccgcgacgagaagagcgggacgaagaagaccatcactgcgggggatcagagcaagccacaccgcctgcgctatctgtacagcatcaagtccagcgcgaagcgggtagtggatcgggagtggaagcggctgcaagacataggcggttga

SEQ ID NO: 356496 - DNA, 951 bp, Pseudomonas aeruginosa
ttggatcgtcttactctcgaacgccgccaagtatgggtctatctggcggccatcattgccggcttgctggtcggcagcgcgtggcccggcgtcaaccccactttcgaggccctgctgtggccggccctggtgctgctgctctacgcgacctttgtgcaagtgcctctgctgcatttgcgcgaagcgttccgcgatcatcggttcgttgcctcggtactgatcggaaacttcatcgtcgtgccggcgctgacttggggcttggtgcaatggctgcccgctgatccggccgtgcgattgggcgtgctgctggtcctgctggtgccctgcacggactggttcatcacgttcagccaattgggcggcggcaatgtgccccgcgccatcgccgtcaccccgatcaacctgctgttgcagttgctgctattgccgacctacctgtggctcatgctcggggccgatctgtcatcggccctgagctttggcgacgtgtggcctgcattgctggtcgtcatcatcccgctggtcgccgctgccttgtcggaacgctggatcgaagcccgagcggagcgcgcggccgtgcgcgagcgtctggcatggtggccggtgccgatgttggggctcgtcgtcttcatgatcgccggtgcgcaagtcaatgcggtctggggagccgtgggactgttcccttcgatcgttccgctgttcctagtctttctgggggccgctgcgctgattgccaaagggctggcctggctgatggcgctgccgaccgatcaaggacgaacgctcgccttcagcctgggcacgcgcaattccttcgtggtgttgcccttcgccttgtcgctgcccgccgggtgggaaatcgccgctgtggtgatcgtggtgcagtcgctggtcgagcttttcggcatggtgttctacctgtggtggataccgcgtcgcctgttcagataa

SEQ ID NO: 356497 - DNA, 495 bp, Pseudomonas aeruginosa
atgactgttcgattcaagggcgccgatctgcggcccgtgctggccgaagcgctggccaaccagtgccgcgtcatcctggtcaaggaccagggcgtctatttcatggccgagcgcggcgagcgtcggcccgatgggcgacgcaagaccatcgcctacgccgttgactgcgacccggacgccgatccgttcgacaactggtgggaactggcgcgcgccgagttcggcggcgacgacttcggcgagttcttcgatctgcaagaacctgtgttcgcccgcatccagcacagcgaggacgacctcgaagtgtcggccacgcgacgcacctgtcgttgcagcccgtgctcgcgtcactcgccggccactgaccctcctgcctcccagccccccgcatgggggtttctcttttttcaggacgaccagcgtcaggactccatattttcaattccaggcccgctccgttatctgaacaggcgacgcggtatccaccacaggtag

SEQ ID NO: 356498 - DNA, 465 bp, Pseudomonas aeruginosa
atgtccccaggcttttccatcggtctgctcgtgaccaacgacgacatcgatgcggtcatcctcgaaggctggccggacggtgtgcccaagccgcgcatggtggtgttcgactacgccggcaacgacgtgctcgatgaatacgtgctgcgcgtcagcaccggagccccggacgccggattgaccggccgcgaggtgttcgcggtcgagtacggccccgattgccgctacccgtcgcccgccgaaatcctctcggtactcgatgcacgcaagccggccgacgaaccttcggcgctgagcatcgcccgcggcgtgcaccagagcatcctcgaattggatgcgcggcttgatcgcctggagcaggcgccgaccggcgatgactacaaccgcctgtaccagcttgccaatggcggcctgctcgacctgttgaagacgctgggcgacccgtcctctaccgctgccgactga

SEQ ID NO: 356499 - DNA, 342 bp, Pseudomonas aeruginosa
atgccggcgcccgggcttgggctgctggcgcggggtcgtgagtgcgtctcgcaaggtcatgccggcggcgagacccaggctgaacttatggccctggactgggccgtggtggcggtggtgctgctctacgaacgcattcgcctcggccagggtgagggggcagatctccagcttgctcacgccgccaccgcctgttgcggcgtcggccgtagccgccgcttccatgggtcgttcgcccgggcgtatgcggccatcgtgttcgggctcacgctgttgccgcacatgtggacctgctgggatagagtgaaccgctgcccgttgtggccccgctcgatgatgtag

SEQ ID NO: 356500 - DNA, 657 bp, Pseudomonas aeruginosa
atggcgcgaaaaaccatcactggcctctacgagagaaacggaatctggcatgtcgacaaggtcgtcaaaggtcagcgacttcaagaaagcactggaacaagcaaccgggaggaagcagaacagtacctgatacaccggctcgagaagctccgacaggagaaggtctacggtattcgccgagtcaggagctggcgcgaagccgcgacccgctatctgatggagtataaggacatgccgtcgatcggcctggccgccatctacctcgaacagttggacccctacatcggcgacctaccgctcacgcacgtcgatgacgagtcgctttccccgtacatcaaggacaaactgaagccgagcagggcatcgaccggcaaggtgaagcctagtgtaaccccaaggacggtgaacatcgccttggagaaggtcatccgcattctcaacctatgcgcccggaaatggcgtgacgaagagaaacggccctggctggacacggtaccgatgatcaacaagctggacgagaagcggtcgaggcgcccccctacccgctttcgtgggaagagcaatcgctgctgttctcagaactgccggaccacctgcgccgaatggcgctctacaaggtcaactgcggctctcgggagcaagaagtggtcaagctga

SEQ ID NO: 356501 - DNA, 132 bp, Pseudomonas aeruginosa
gtgcgcaccgcccgcagcatcttcccgctgctggacaaggtcagcgacgaacccaccgccgacctgctcacccaacgcatgcaggtacatgaaaagaccgcctggatgttgcgcagccttctcgccagctga

SEQ ID NO: 356502 - DNA, 174 bp, Pseudomonas aeruginosa
atgtcaaatcaacaggccagactgtcatcgggcggcgtgccgccggagcgcgcgccgggcgcctcccgttcgcggtcgcgcgacggcgcgcgggtccccgacacgccttcccgttcgcctgccggccccgccgcgggcggcgcgctggcgcggacccatcccggcaattggtaa

SEQ ID NO: 356503 - DNA, 675 bp, Pseudomonas aeruginosa
atgagcatccgcgattggcccgaagccgaacggcctcgggagaagcttctggagcagggcgcggcggccctttccgatgccgagctgttggcgatcttcctgcgcacgggagtgaccggttgcagtgcggtcgagctgtcgcggcggctgttgagcgagttcggcgggctgcgtgccctgctcgaggcggacctcgcctcgttctgcggccatctcgggctcggcgtggccaagtatgcgcaattgcaggccgtgctggagatgggccggcgccacctggccgagcgcctgcgtcgcgattcgatactggagagcccgcaggcggtgcgcgactatctcaaggcgcgcctgcgccacgagcagcacgaggtgttcgcctgcctgttcctcgacacgaggcaccgggtcctggcgttcgaggtgctgttccagggcagcatcgacggcgccagcgtctacccgcgccaggtggtcaagcgcaccctggcgcacaacgcggcggcgctgatcctgacccataaccacccttccggcgacgcccgtccgagtctcgccgaccgccagctcaccgcgcgcctcaaggaagccctggcgctcatcgatgtgcgggtgctcgaccacttcatcatcggcgacggcgagcctctgtcgctggccgaatacggttggctgtga

SEQ ID NO: 356504 - DNA, 138 bp, Pseudomonas aeruginosa
atgaactttgcccgctttttcgtggacaggccgatttttgcggccgtgctgtccatcatcattttcgtggttgggttgatcgcgatcccgctcttgcccgtcagcgagtacccggaagtcgtgccacccaccgtatag

SEQ ID NO: 356505 - DNA, 201 bp, Pseudomonas aeruginosa
atgcgcatgctgatactccaaagtggccgccgctgcggccgctcgaaaagcctgcagccattgcttcagtacgccctggccaacggttggagggttggactgaccaacggcgggcatctgcgcttcaccaaggcagagcggccagttatccacaccagcagcacgtcagtggctggcacggacagagtggataggtggtga

SEQ ID NO: 356506 - DNA, 1854 bp, Pseudomonas aeruginosa
atggcactttccgacctggccgttcgacgcgccaaagccaccggcaaggactacaccctccccgacacgttgggcctctccctcgctgttgcagcgacgggaggtaagacttggcacttccgctactactggctcaaggagcccaagcggatgtcgttcggcacctatcccgaggtatcgctgctcgaagcccgcgcgctgcgcgacgaggcgcgcgccttggtcgccaagggcatcaatccccgtgttcaccgcaagcagaagcgcgccgcggtcaagctcgccggcgagcacaccttcgaggtcatctacaggaagtggtttgcccatcgcgcgctcagcctcaagaagggccggcagaccacgcactccatcctcccgcgcgtcttcgacaaggatgtactgccctacctgggcaagcgctcgatctacgagatcaagcgctccgacctcttggacgtgatcgccaagatcgagaagcgcaaggcgctctccgttgccgagaaggtcaggacgtggttgaaccacttgttccgctacgcgctggtgatcgtgccggggctggagcaaaacccggcgtccgacctcgatgtggtcgccgtgccgttgccgcccgtgaaccacaacccgttcctgcgcatggaggatctgccgaagctgttgcagcggctgcgcaagtaccgcggcaggctgcgcacccagcttggattgcggctgctgtgcctgaccggcgtgcgcacgggcgagttgcggctggcgacgcccgatcagttcgacctcgacaaggggttgtggatcatcccgcccgacgtcgtgaagcagttgcaggtggacatgcgcaggaagcgccagcggccgcaggacattccaccgtacatcgtgccgctgtcggtgcaggccatcgagatcgtccggcacatgctggaggagttcaagccggcccagcgctatctgctccggcacgacaacgacctgaagaagcgcatgagcgagaacacgctcaacggcgcgctcaagcgcatgggctaccgtgacctgctgacggggcacggcatccgggccacgatgtccaccgcgctcaacgagttcggctatccgaaagcctgggtggacgcgcaactctcccacgtcgatcccaacaaggtcagcagcacgtacaaccacgccgagtacgtggagcagcgccgccgcatgatgcaggattgggccgaccgcctcgacctctttgagcagaacatggtcgaagcggcgagcatgccgctcaccattcacctggaaggcgtgcccgccatcgggggcgatcccgctgacagcgcaccgcccagggcggcgacgacgccgatcctgctcgtgaccaagcctggcgatgcgatgccgctggtgtcagccgcggcgcagcggctgccggcggtcacggcgccgcgctcggtgatggagcagccactgtccgacgttcaacgcaagcggatggaactcgtcgatgttttcgagtcgccgcacaaccttccggtcgtcgagttcgccaagatggcgggcaagtcgcgccggtggatcagctacgagatcaaggcgggcaacctgctggcactgaacctgggcaaccgcggccagcgggtgccggactggcacctcgacccgctcaaacacgagctggtccagtccgtcatgaagctgagccggggcgcggacccttggcagatttaccacgcgctgctgcagccgcgtgcgatgctgcgcggccgctcggccctggagggcgccaccgccaacaatctcgacaagatcatcatggccgtggtcacgagcgtgaaggccagcgagtgggatcaggagaaggtggtggggttcgcatag

SEQ ID NO: 356507 - DNA, 387 bp, Pseudomonas aeruginosa
atggaaaccttccgcagtcctgcgcatgtccggcgccacgccatcgccgcgctattggccgcgctcctgctcgccgctgcggggcttcagccggccgtcgccgccgatgcagccgacaacgccgcagagcgcgagatgcttgccgcggtgacgcgccagctcgaactgctggatcgcctggccgaacgcggagcggccaccgcgccgcaggaacggtcccgctaccacttcgactacgcccggctgcgcgccgacctgcaacgcatgcgcgcaggcgtgcgggactacctcgttccccagcgcgcgcagccgcgcgatcccgtgccgctggccggcgactacacgcgcagcggcacggcccccgacaaggaggcgccgtcgccatga

SEQ ID NO: 356508 - DNA, 555 bp, Pseudomonas aeruginosa
  misc_feature (130)..(130): n is a, c, g, or t
atgaatcgcatcctccttgccgccgccgcggcgatgttcgccgccgtggcccacgcgcaggaccgcagcgccgcaaacaaggccgtctccccgccgctgatcgtggtcgaagacaagggcggcgcctccncgctgccgtactaccgggccttgaacccgcaggatgcgcagccaggtcaaccgacgatgccgcagccggcgccgcgcatcggtggccctgcggacgctgaggcggccatgctgccggtgcgctcggcgcggctgtcgcccggcgacgagccgcgccgcgtgatccgcgcgccgggcctgacgccgcagttcttggtcggtgacgacgaccgctcgcgcgcctggctcaagcagcggcgcgtggagctgcaggcacagcgcgccgtgggcctggtggtcaatgtcgcgacgcccgaggcactggccgcgctgcgccgcctcgcgccgggtctggtgctgtccccggcctcgggcgacgacctggcacaccgcctgggcatcaagcactacccggtgctgatcaccgccaccggcatcgagccctga

SEQ ID NO: 356509 - DNA, 585 bp, Pseudomonas aeruginosa
atggcagcggcagtagcgctccgtgccagcagtgtcgcactggccctcgggctctgcgcctgtgcgagcttcgccctggcccaagaagtgccgcctcccgcctatcagcttgccgcgcagcaggcgggcgtgccgtcgccggtgctgtatgcggtcgcgctgcaggagagcggcgcccggttgcgcggtcgcctgatcccctggccgtggacgctcaacgtcgccgggcgggccgaacgctacgccacgcgggtcgatgcctgcgcaggcatccgccgggcgctcgcccgggcgccggccaaccgcatcgacgccggcctcggccaggtcaacctcggctaccacgcgcagcgttacgaccacccctgcgacctgctcgacccgtaccgcaacctcgccatcgccgcggaaatcctgcaggagcagcacatgccgggcgaggactggctggtcgccatcggccgctaccaccgtcctgcgggtggcgcgcccgccgcccgctaccgccgcaacgtccaccagcacctgacccgcgtgctggggccgggcgcctccattccctcagcccggagccccatgccatga

SEQ ID NO: 356510 - DNA, 645 bp, Pseudomonas aeruginosa
atgaacatcccgcaacttcccgccgaaggcgccgaccgcgcgcgctggctgaagatcgcagcggccgcctgcctgctgctcgtgagcgtgctggccgtggtcaacagcgtgggcctgtcgcgcctggccgagcaaagccaggccagtgcccaggatgcccacgtgcaggcgctcaacacgcgcgtcgcggaactcgaacagcagtccgcaacctcgaagaaccagcccaagcccgtcgcccaaccggacttcgaggccgcccgcaaggcgctcgacgaacggctgtcgcaagtggagcaggcccaagccgcggacagccgtgccggcgacctgcaggcgctgcaggcccgcgtgggcgacatcgaggcccgcctgaagaaagccgctgcgcctgccgcgtcgccccggcgcatcgccgaggcggtcaagcccaaggcgccggagccgccgttcagcgtcgcaggcctggaactgcgcggcggcgagcgcttcctgtcgatcgcggggccgggcgtggccgccgtgcgcgaattgcgactgctgcgcgaaggcgatgccatcggcgcctggcaattgcaagtcatcgaggcgcacgccgccgtgttccgcgtggacggccagacgcagcgcatcgcgctgccgtag

SEQ ID NO: 356511 - DNA, 597 bp, Pseudomonas aeruginosa
atgcaatcactcacctgcgtcgcccatcgcctggttgtgcccgccttgctcaccggctgcgtgctcatcaccggctgcgcctccacgggcgtggcgaatgccccgacggccaccgccatgccaccggagccggtcttgtcggccagggtcatctacccggaacccgagccgaccctgatcccggtcgcccgctacgggcgctacacgctggtcgagctggtgccggaacccgcgcagcgcgacctgacgcgacaggtgattgaggtttcgattccgccgaccttcgatgcgaacgtcggcgatgccctgcggcacgtgctgctgcgcaccggctaccggctctgcgacacgacggaggccgcggcgctgtacgcgctgccgctgccggcggcgcatctgcggctcgggccgctgtcgctgcgcgatgccttgctggcactcgccggcccggcctgggagctgtccgtcgatgacgcagcgcgcgcggtgtgcttcacgcgcgtgacggcagcgcgctccgctggccgcgtcgccgccgtccccgcacccggcacgacggaagccgaacccgcgcaaccccaggaggcccagccatga

SEQ ID NO: 356512 - DNA, 384 bp, Pseudomonas aeruginosa
atgagcaagttgcgctttaccaccgaccacgaatggctgcgccaggacgacgacgggctgctgaccgtcggcatcaccgcctacgcccaggacgccctcggtgacgtggtattcgtgcagttgccggagctcggcgaacacgccgccggcagtgaagtggcggtgctggagtcggtcaaggccgccagcaacatcctgatgccgctggacggcgaggtggtggcgatcaacgacgcgctgccggacgccccggagctggtcaaccaggatccgctcggcgaggcctggttcttccgcttccgtccggccgacgccggcgcctgggaaaagctgctcgaccaggccgcctacgaccgcctgctgaacgccaacgccgacgcctga

SEQ ID NO: 356513 - DNA, 216 bp, Pseudomonas aeruginosa
atggtgcacctgctggaccgctactcgatcgaagggccgcgtaccaccgactggctggccagcggcgtggtcaagcgtcaccgcacgctgggcagcctgctcaacctgttgatcgggttcgggctttcgtctcgaacgggtggaggagtggagccccggcgacgagcaagtggccgctcgcctagcagcctgtcggacttttcccctcgccggtag

SEQ ID NO: 356514 - DNA, 603 bp, Pseudomonas aeruginosa
atgtacaaggtctacggtgattaccgttcgggcaactgctacaagatcaagctggccatgtcgctgctcggcatccactaccagtgggtaccggtggacattctcaagggtgagacccagaccccggagttcctggcgaagaaccccaacggcaagataccggtgctggagctggaggacggcagttgcctgtgggagtccaacgccatcctcaacttcctcgccgacggcagcgccctgttgcccagcgaaccgcgcctgcgcacccaggtgctgcaatggcaattcttcgagcaatacagccatgagccctatgtggccgtggcgcgcttcatcaagctctacctcggcctcccggaagcccgccgcgccgagttcgaagagaagaagatcggcggctacaaggccctcgacgtcatggagaaacagctgtcgcgcacgccattcctggtcggcgaacagttctccatcgccgatatcaccctctacgcctacacccatgtcgcccatgaaggcggcttcgacctgacggcctacccggcgatccgcgcgtggatcaagcgagtgggggaggtgccggggtatgtggggatgctggattga

SEQ ID NO: 356515 - DNA, 951 bp, Pseudomonas aeruginosa
atgaatccgacccacccccgcaggcccctgcgcctggccgcctgcgtcaccctcgccttcagctgctgcacccacgccagcgaaggcggcgtggacaacataggtccaggaaccgacggtttcttcaccctgccactggacgtcgacaacctcccggaccacatgttcgccttcaacgtctactacaaccactacgaagccaggaagctgaacatcagctccttcggcggcaaggtgtccgacgtgaagatcagctcggatgcgatcatccctcgcctggactacctgagcccgctgcggatcttcggcgggcgcctgggcggctacatcgcccagccctatatccgccaacgggtggccgcgttcggcctgagcgacgaacgggaaagcatgggtgacaccaccttcgcgccgatcatcctctgggacatgggcaaggacctgaccctggccgccgccgtggaggtcaccgtgcccaccggcaagtacgatgccgagcggctggccaacaccagcaacaacttctacacctacaagccgctgttctccttcacctggctgcccaccgaacgcaccgagctgtcgctgaaggccacctacagcttcaacatggaaaaccacgacaccgactatcgctcggggcagatcttccatttcgactattccgccagctaccgggtgaccgacaacctgcgcctcggcctgaacggctactacctcaagcagaccaccgacgacaaacagaacggcgagaccgtacgggtgttcggtttcggcgaggaagtcgacgatggcgtacgcggccaggtcttcgccatcggcccggccgtgcacctgaccttcctcaagtacgccagcgcggagatccgctgggccaaggaattcgacgtggagaaccgccccgaaggcgacatgctctgggccaagctgaccattccgttcgaactctga

SEQ ID NO: 356516 - DNA, 270 bp, Pseudomonas aeruginosa
atgaccaagcaggtcgtcgcgatcacgccagcccgcctgcactgcaatatcggtgcaaaagccccccattgctttggcaaaagccttggccaaactggtcttaccggtaccactgataccctggaagacatgcagctggctcatggccaagccccccagcaacacgcggatatcctcgatcggatagaacagttctacgtgcttttcagctttagcaatccgatgctgcaactgggtggcgaatgtctcgagatcaggcacttcatctag

SEQ ID NO: 356517 - DNA, 489 bp, Pseudomonas aeruginosa
atgtctattgtgatcctcggcgttgatctgggcaagaactcttgcagtgtggtcggcgtgaatgcggccggtgcagtagtcgtgcgtcgaacaatgcgtcggcagacgctgatcgactatgtgacgaagctaccggcctgcgtggtggcgatggaagcgtgctgcggtgcccatcatttgggtcgcctgttcgcggcgcaagggcacgagatccggctgatgtcgcctgagtatgttcgcccctatatcaaagcccagaaaaacgatgatcgcgatgccgaggggatcgccgaggccgcgtcgcggccgacgatgcgttttattgaactcaagagccaggagcagttggacatccagacgctgcaccgggtgcgttcgcgcctggttgccgagcgaaccagtctcatcaatcaactgggggttgtaagccggaaacccagaaatttccgtcagccgatcaacatggcttgtctcgcgcttggtcgatga

SEQ ID NO: 356518 - DNA, 543 bp, Pseudomonas aeruginosa
atgataatctggatcaacggacctttcggggccggaaagacgacgctcgctgagcggctgcgcgatcggcgttccaaatcgctaatctttgaccccgaggaaatcgggttcgtggtgaaagaaacggtccccatgccagcgagcggagactatcaggatctccccttgtggaggggacttacgatcgcggcggtcagggagattcgaaggaattactcgcaggacatcatcatcccaatgacgctcgtgcacccggactatctgactgagatactcgacggggtaaggcggatcggcgatcagctgctgcacatctttctgacgctcaacgaggacctattgcgtcaccggatcgcgaaccagaccatgcatcctgacccgaatcgaaatgcggagattcgagagtggcgattagcgaatgtcgcccgatgcttggccgcaagggaacggcttccatgcacaacccgtgttctcgatagtggtgcacacaccagcgatgaactcgcagcgatggtgctcgacagactcgatgggcgcacctga

SEQ ID NO: 356519 - DNA, 861 bp, Pseudomonas aeruginosa
atgcatacgcggaaggcaataacggaggcgcttcaaaaactcggagtccagaccggtgacctattgatggtgcatgcctcacttaaagcgattggtccggtcgaaggaggagcggagacggtcgttgccgcgttacgctccgcggttgggccgactggcactgtgatgggatacgcatcgtgggaccgatcaccctacgaggagactctgaatggcgctcggttggatgacaaaacccgccgtacctggccgccgttcgatcccgcaacggccgggacttaccgtgggttcggcctgctgaatcagtttctggttcaagcccccggcgcgcggcgcagcgcgcaccccgatgcatcgatggtcgcggttggtccgctggctgaaacgctgacggagcctcacgaactcggtcacgccttgggggaagggtcgcccatcgagcggttcgtccgccttggcgggaaggccctgctgttgggtgcgccgctaaactccgttaccgcattgcactacgccgaggcggttgccgatatccccaacaaacggtgggtgacgtatgagatgccgatgcttggaagagacggtgaagtcgcctggaaaacggcatcggattacgattcaaacggcattctcgattgctttgctatcgaaggaaagccggatgcggtcgaaactatagcaaatgcttacgtgaagctcggtcgccatcgagaaggtgtcgtgggctttgctcagtgctacctgttcgacgcgcaggacatcgtgacgttcggcgtcacctatcttgagaagcatttcggaaccactccgatcgtgcctgcgcacgaagccatcgagcgctcttgcgagccttcaggttag

SEQ ID NO: 356520 - DNA, 750 bp, Pseudomonas aeruginosa; identical to SEQ ID NO: 324401

SEQ ID NO: 356521 - DNA, 288 bp, Pseudomonas aeruginosa; identical to SEQ ID NO: 349083

SEQ ID NO: 356522 - DNA, 375 bp, Pseudomonas aeruginosa
atggcgcgcaagtcccgcgagctggacgaaaccgtccacgaactggaaaagaccaagcggcgcatccaaaccatgaaggcggatgaggccgagaaagagcttcgccaggaggcaacggcgatcgctttcgaagccgaggccgacatcagcggcaagctgcgcgaagccttctccgtcatgctcgaccacgccgaaaagaccggtaccgatccccgcaccttccaggccggtctggtgcgccacctcgaaaaactgctcctgcagattcgcgaagagttccagttgcccgacggcgaagcccccgatgacatcagcgaattcggctggatcgagcaaatgggcaagtcccagcctgcaggcgtggctgaggactga

SEQ ID NO: 356523 - DNA, 342 bp, Pseudomonas aeruginosa
atgacccgcgccgccgttgtacgacagcccggcgccctggcatttctcgaacagttcaaccgctacggcatggccgcgctggccggctgggcaaaccctgtccgtcacgcaaccggcgggcagatcggcactcccgcccccaacctgccggcccccgtccgtgctggcgcgaacctgcccgaaccatccaagaacttcagtacctcggtcgccaactcgatctacctgcacgccgttcaggacacggatcagatggcggccgaaatgtgggccggcaaaggcggcgaacacttcttggtctggctgaacaagaaccgccaggccgtcaagcagattatctag

SEQ ID NO: 356524 - DNA, 216 bp, Pseudomonas aeruginosa
gtgcgccgggacctgcgcaagttcggcgctggccgggagtccagctacctctaccacaaggcgcgcggcagcatcattccgctgacggtcgtcccttggaccctctacctggcgatccccatcagcatcaatcccctgctcattctactgccctgcgccgcgctgctcggcgtagcggtatgcatcacagcatccactttcaaaaagtacctgtag

SEQ ID NO: 356525 - DNA, 138 bp, Pseudomonas aeruginosa; identical to SEQ ID NO: 356504

SEQ ID NO: 356526 - DNA, 342 bp, Pseudomonas aeruginosa; identical to SEQ ID NO: 356495

SEQ ID NO: 356527 - DNA, 648 bp, Pseudomonas aeruginosa; identical to SEQ ID NO: 356480

SEQ ID NO: 356528 - DNA, 990 bp, Pseudomonas aeruginosa
atgacgcccttcgcctatgccaagccggccgacatcgagcaggcgctgggcctcgccggcccggagtcgcgctacatcgccggcggcaccaacctgctcgacctgatgaaggaaaacgttgccaggccccggcgactcatcgacatcaccggcctcccgctgcgcgacatccgccggacgcccaccggcggcctgctggtcggagccctggtcagcaacgccgaactggcctggaatcccgccgtggaggcggactatcccttgctagcccaggcgatcctcgccggcgcctcgccgcagttgcgcaacatggccagcaccggcggcaacctgttgcagcgtacccgctgcccgtatttctacgacaccggcacgccatgcaacaagcgcgagccgggcagcggatgccccgcgcgcagcgggctgaaccgcaaccatgcgatcctcggcgccagcgaacactgcgtggcggtacatccatccgacctgtgcgtggcgctggcggcgctggaggctcaggtactggtgcgcggccgcgctggcgagcggcgggtcgctttcgccgacttccatcgcctgccggcggacacgcccgagcgcgacaactgcctggccgtcgacgaactggtcaccgccatcgagctgccagcgccgcgcttcgcgcggcattgccactacctgaaggtgcgcgaccgggcctcctacgccttcgccctggtctcggtggcggcggccctggaaccggacggcgagcgcattggcgaactgcgcctggcgctcggcggcgtggcccacaagccatggcgcgtcgcagagctggaggaacgtttcaggggccacccggcgaaccgggacagctatgtccgcttcgccgaagcgctgctgcgtgacgccaggccgctggcccacaacgccttcaagatcggattggcgcgcaacgccatcgttcgcgcactggaagaagcccactcgggagggatcggccaatga

SEQ ID NO: 356529 - DNA, 1788 bp, Pseudomonas aeruginosa
gtgtccttcaatcattactaccagagcgaactcaccgcactgcgccagctggggcgccgtttcgccgagcgtagcccggccctggccccgtttctcggacaggtcggacgcgatccggatgtcgagcgcctgctcgagggctttgccttcctgaccgggcggttgcggcagaagctggacgacgagttgccggaactcagccactcgatgatgcacctgctgtggccgaactatatgcgcccgctgccggctttcagcattctccagttcgaccccctgacccgcccgggcggggcgctgcgcgtggagcgcgatacgccggtcgagagccggccggtgggcgaggtcgcctgtcgcttccgtacctgctacgccaccgaggtcctgccgctggtgctggaggcgctcaactattcggtgaccggcgagggagcgctgctcggcctgcgcctggcgatgaactgcgacgggcacctcggcgagctgggcctgagtcggctgcgcctgcacctggccggcgagcgctacatcagccagatgctctacctgtgcctgctgcgcaacctggagagcatccagctgattccgctggacgcccatgggcggccgctggatggcgtggccggcaagctgatgtcgttccgcctgacgggcgagcgggtgcagccggtggggttcgccgaagacgaggcgttgattccctatccgctgaataccttccgtggctatcgctacctgcaggaatacttcgcgttccaggacaagttcctgttcgtcgacgtggatggccttgacctgctcggcgctctgcccgaggaaaccctcaagcaggtccgcggcctcgagttgcgcttcgatatccgcaagagcggcatccagcgcctgcacccgacgctggagaacgtcaagctgtactgtacgccggtggccaacctgttccgccacgatgcgctgccgatccgcctagacggcaagcaggacgaatacctgctgatgccggccgaatacagcctggaggactgcggggtgttctcggtagagggcgtcaccggctggcggccgggcgggctcggctaccaggcctacgtgccgttcgagtccttcgagcacgatcccagcttcgacgttcccgaagcacggccccactacagcgtccggcaacgtacctcgttgctgcacgatggcctggacacctacctgagctttggcatccgccatcccgagcagatcgagacgctgtcggtggaactgacctgcaccaaccagaacctgccccaacggctgcgcctgggcgatatctgcgtcgcctgcgaaggcacgccggagttcctcggtttccgcaatatcaccccggcgacgccgagctacgcgccgccgctgaaccgcgatttcctctggaaactgatcagcaacatgtcgctcaactacctgtcgctggccaacgtcgacgcgctcaaggtgatcctcgaaacctacgacctgccgcgctactacgaccagcatgcggcgaaggtcagcaagcgcctgctgggcgggctcaaggcggtccgccacgagcatgtcgaccgcctgcatcggggcctgccgctgcgcggcttgcgtaccgagctgacgatcgatccggaaggctacatcggcgagggcgacctgttcgtgttcgcttcggttctgaacgaatttttcgcgctttacgccagcatcaactcctaccacgagttgcgggtgaggagcacacagggagacgtgtaccaatggaaaccgcgcatgggtttgcagcccctactgtaa

SEQ ID NO: 356530 - DNA, 243 bp, Pseudomonas aeruginosa
atggtcgaccaggaacagcgcctgccggtgatcgtccagggccatcaccacggcgcggccgccgctgtcgtcgcctatggccaggtagccggggcagtagagagaggtttcgaaggcccggttgcgttccagcaactcgtcggcggcgtagagcagcaggcccggctcgacgaggcggccgccgtgcagctccagagcggcgacgaaggcagccggcagcggttgtccgagccaggcctctag

SEQ ID NO: 356531 - DNA, 924 bp, Pseudomonas aeruginosa
atggcgtatttcaccggtactgcgaacaacccttccgatctgctcggaaagctgcgcacccacgctgaaaccctcggctgggtcaccgaccgcgcctcggcatcggaatggctttgtcacaacgccgacggctactggtcattcaacgccggttccaatcaatggcagctcgccggcaatacggggttcgacaacgctttggcgtggaacgcgcagccaggcaattccgtacagaacaatccctactcgtcgaaacaaccaaccgttgcccagctcagcggcgggccgttcacccgctaccacttgttcgctaccgctgcttatctgcacctgcacgtcgaaatcgcagctgggcagttccgtccggtgatgatcggctccctgaacaaacgtggcgtcggctatacgggcggtcagtatgtctgcggctcggtcatctatgcccctggccaggcgctgacaaacaactggtcgtcgcatccgttcgatggctaccacattcaatacagcgacggcggaagcgtgttgcggctggatagtctcgatgatgggccgtccccggagtggctgccgttcgactacagaaccaacatccctcggcgcgtcgtcggacccggtcgcggaaactacagcagtcagtaccatcccgatgtagggctgatcgacgcgagcgcaaacgagctgaacagctcgaccacccctgtcccatgcgccatctatgcgttcggcgctcagcagcgctcgcggtacgtgggtgaggtgccggacttcgggctgtgcaacatggccttcctcgcgcctggtgatccgcttgtcgtcggtagcgacacttggcgcgtctatccgttgctccagcgcggaaccgctaccgacttcggcgccacaagcgcctgggtcggctattgcttccgggtggtcgagtga

SEQ ID NO: 356532 - DNA, 405 bp, Pseudomonas aeruginosa
gtggactacaagagcaacctgttccgctacgccgcctacctgacgccttcctgcaaagtcttcctggagaaggacttcgagtttcgtcgtaacgccggcgagctcagggggcgagagcgcaccacctcggaaatccccggtcggggcattggcgagagcgatggccgcgtgatccaacactcgatcaatgactggaccgtcaacctggacatggacagcacggagtattacgccggcgaaaagatcaagcgcgcgctggcccgctacccgttgcacgtcatccgcgccgacgtcgacccggagaccaatcccttcggcctgcagtgggactgctactccgatacgcctcaacgtatcgagcttgaggagccggccgcccccaccaagcgggagggaggtctatga

SEQ ID NO: 356533 - DNA, 648 bp, Pseudomonas aeruginosa; identical to SEQ ID NO: 356480

SEQ ID NO: 356534 - DNA, 342 bp, Pseudomonas aeruginosa; identical to SEQ ID NO: 356495

SEQ ID NO: 356535 - DNA, 180 bp, Pseudomonas aeruginosa; identical to SEQ ID NO: 336161

SEQ ID NO: 356536 - DNA, 924 bp, Pseudomonas aeruginosa; identical to SEQ ID NO: 356531

SEQ ID NO: 356537 - DNA, 300 bp, Pseudomonas aeruginosa
atgctggtcacgccaggaatcttcaagcgttatgtccaggagcatccggagctcgaaaagctggcccaggccaaggagacgaccggctggaagctggtgcagcgcgcgttcgagaaacaagggcttcaccggaagaccagtaagagcctgaacatctggaccatcaaagtctcaggccctcgtaaaacgaaagagctcaaggcttacctgctccaggatcccaaactgctgttccctgaacagcctctggacaacccaagcctcacggtcattaccgacgccgaagggggtgtcgaatga

SEQ ID NO: 356538 - DNA, 342 bp, Pseudomonas aeruginosa; identical to SEQ ID NO: 356495

SEQ ID NO: 356539 - DNA, 192 bp, Pseudomonas aeruginosa
gtggtcgccacccgcttcgggcgaatcgcggtgatggtctgctacgacctggagtttcccgaatgggtgcgcctgccggcgctgtccggcgcacaactgctctgcgcaccggtgaactggccggcggcaccgcgtcccgagggcgagcggccgggcgcggccgggcgcggccgggcgcggctgggcgaatga

SEQ ID NO: 356540 - DNA, 291 bp, Pseudomonas aeruginosa
atgcctggtaacagcatgcgtgctgatcatccaagggacgcctattcggtcgtcgtaccgaatgcatccgaagatcacgacaggttctccgcgactaaccagaacaaacgcctcttcgctctgatccagggcgtagcgcaattcctgctctacatcggcgccacgaatagcctcgaattcaagtcgatccgcctcgcggacattggcaacaacgtgagcaataatctgctcgtcgacagccctaagctcagcccccggcctggacattcggaagaactcccaagatcgtaa

SEQ ID NO: 356541 - DNA, 294 bp, Pseudomonas aeruginosa
atgaccgctgaactccagggcgtcctgatctttacctcagctttcgcccaggtcttcctcctcgggctgaacagcaagctccttcgtgacgacaagatcgccgccggcttcgtagtgtcctggatgatcacgctagcccagttcggctacatctgggccgtcgcgcactcgcgcatcgataccgtccctttcctggtgatctctggcttcggaggttccatcggtatcacctccgcgcagtacttctaccgctggtacgacaagacttttcatcgcaaaggggagagcgcatga

SEQ ID NO: 356542 - DNA, 195 bp, Pseudomonas aeruginosa
atgaacaagctctacatcatatgcgccaagtgcgggagcaaccgcatcaacatccgcatccctcgcgaagtctgtccagacaatccccaagctgtcgcccacttcatctgtgaagactgcggcgaactgacaggcgtgaacgaatgggccgagcacaacgaccgacgcctgatcgatatgaggactcacgcatga

SEQ ID NO: 356543 - DNA, 237 bp, Pseudomonas aeruginosa
atgagcgacggaatcggaatcaccactacaaccaacgttttcctgtctgtagacaagatcgtcaaggaaatggattcagaggacatcgcttcgttttgcagtgctgtagcgctgcggctcgatcaggatttctctggtcgtgctgaagccgcaaacagcttcgcaagcgggttgagcgagattggatgccgctttctggctgaggctgtgacgagcttctacatgcggcagaagtag

SEQ ID NO: 356544 - DNA, 162 bp, Pseudomonas aeruginosa
atggctgaaaacgaacaggcaaccgaactggaatatctccagttcttctatgccgaggctgactttggcccagctgatggcgacgtgcgttatcacctcgccgagcggttcaaagagcagaccggaaaagatcttcccgaaggctatgaggagtgcttctga

SEQ ID NO: 356545 - DNA, 651 bp, Pseudomonas aeruginosa
atgagcaatgaagactggaatgaactggacgaatcctaccgttcagctttatctggagcgctggaaactgcacatcctgcggtagagcaggcaggcggggatgagcgcgcggcgtgcaatcgttggattgctgaacagcagctatgccaaggcagcgatatttctctgttcaagctggaacgcaatggcgcgcttgtgtctttgcatgagcttctgcgcgacgcataccaggctgggcaagcccgcgccgccctggcgcaaccctccctggaccatgccgtacaggcacatgacatcccgatgcttattgcttcggaacatgccaatccagactacgcgatgggctggaatgattgtcgggcaaaaatcattggggcgagttccgcggtgcaggccgaggcggagcggccggaggtagtggctcgcgtcgtgcattcgaatcctatcgtcctcggtcagtgcggtccgctcaatgcaaacgatgaactgatgactgtcgcgcagcatgcagccagcgtcgcccgttgggcagaaatgttcaatcgcgtggagcaacagcgcgacgccgccctggccagggtcgcggagctgaaaaccatggcagacaactattgcgcgctgctgatggacgccaacgccaaactagcgtaa

SEQ ID NO: 356546 - DNA, 276 bp, Pseudomonas aeruginosa
gtgcctgacatgagagaagagtttgaagcttggcatcacgctgagttcggctacgtaatcgcagtggaagatgatccggaacaagacggtcagtgcgccaaacgatggaaagcctggcaagccagccgcgcgactctgagggtggagttgccggagcgtgctgttctacctgaatacaccgagcacaggcttctctactgcgagcgcacaggcttcaacgactgccttgagcgcgtgaaagaagccctccagcaagccggaatcgaggtgaagtga

SEQ ID NO: 356547 - DNA, 225 bp, Pseudomonas aeruginosa
atgagcgccgctgaaaaaatcgattatggcgagcagttcctaaccagagagcaggtttgcacaaagctcggattcaagagccttacctcgctctacaaaatgatcgagaagtatcccgacttcccgaaggctcgcaagaccggagtcacgcgccagtcagcaactcgctacgtcagaagcgaagtcgacaagtggatgatcgctcacggcgcatccaacgattaa

SEQ ID NO: 356548 - DNA, 1278 bp, Pseudomonas aeruginosa
atgtgtatgttggctcgttcccgaacctgccacatacaagccatgaagcgatcagacatcaagcgtaggccactgagtgatactgtcctttcatccctagagccagaagctaaggagtatagggaaaaatacggtgtagacaggatctaccttgtcgtatcgccaaacggccgcaaacgctgggaaatgcgccacaagaagcctgatgggaaatggtcgtggctaggccttggtggataccctgacgttagcgctaagcgtgccagagagaaagcgttagagattctagggatggtgtcagatggcgttgatcccttcgagagaaagtctcgccgtgtcgacctgttccgtgatgtggctgaagaatggtatcagcgcaaggctgatcagggcagggctgagcttacgcttcgaaagatgcggatgtacctggacaaggacattcttcctgccattggaggcaagcccattgcatcgatatcccgcgctgattgcaaggcattgcaacagagcgtcgaagcgcgaggggccgaagttgcagcgaagaagatcagaggctggctgaatgagattttcgactacgccattgcccacgatctgatcgaagacaatccggcgatcaacctgcgggctattgccaaggtggctccaaaggaaaagcagttcccccatctactcgaggaagagcttccagatttcttgcgtgctatgcgtaatgctcctgcgcggatcaaggttagaaccgctgtatggatgctgcttctaaccgctagcaggcctcatatggtccgttccgctcgctggaacgacatcgatctagatgaagcgacctggcgcatacccgcggatgtcatgaagatggaccgcgagcatgtcacgccattgccacggcaagttgttgcgatgctgagggaggttagggaggtaactggccggagccagtgggtgtttccgggtgatggtgcgaagagcgcgtaccttagccatatcgccatcaaccgaacggttcatgccattggttacaagggacggatgacgggacacggaagccgccacacggccagcacgttactacgtgaacacggctggccgcgtgactacgtggagacgcagcttgcgcacaaagagaagggagttgccggggtgtacaacaaggccatgtacctgccacagcgcgccgtcatgatgcagtggtacgctgattacctggaggcactagaggccggaatgacaccagagatgcgggaagcgttggacgctcgggtagtgcggttttaa

SEQ ID NO: 356549 - DNA, 324 bp, Pseudomonas aeruginosa
gtgacccagcgcatctacctcgcaggccccatgactggcctgcccgaacacaacttccccgcgttccacgccgaagccgcgcgcctgcgaggcctcgggtaccaggtcgagaaccccgccgagcacggcgagattccgggcttcgagtgggccgactacctgcggctcgacctgcagaagctgctcacctgccaggcaatcgctctgctgcccggctggatggactcgaagggcgccaggctggagttcaccgtagccaccaatctgggaatgcgcgctctgcacgcggagcacatcaccggtcctgcggaggatgcgcgatga

SEQ ID NO: 356550 - DNA, 645 bp, Pseudomonas aeruginosa
atggcaggccgcgccgtgcacctcgcagcgcatggccagcttgcccttgtggccgagcaccggcttcagctcggtgggctcgccgatgatgcacagcaacggcttgtgcggacgccgctccagcgccgcgagcagcgaacggacgcccaggcagccgacttcctcgtcgtaggagaacgccaggtgcaccggcaggcgcaacggcgcggcgaggaacgccgggacggccgccagcacgcaggccaggtagcccttcatgtccgccgtgccacgcccgtagaggcggccatcgcgctcgctgagccggaacggcggcacgctccaggcctggccgtccgccggcaccacgtcggtatgcccggaaaggcagacgccgccacggtcgctggggccgatggtggcatagagattggccttgcggccgtcggcgtcgaagaacagttcgctgtcgacgccgaaacccgccaggtagtcgcggacgtagtcgatcagcgccaggttggactcgcggctgacggtgtcgaaggccaccaggtcggcgaggatgtcgcggctgccgggcatgtcgggctccagggcgcaggtctcgcgctgcgccgtcgaggaagggaacgacccgctcactcgtcgccgggcacgccgtag

SEQ ID NO: 356551 - DNA, 813 bp, Pseudomonas aeruginosa
atgctgggtcgagatgaggtggttaacaaacttgtagacactgagattccaatttcatcacaaagtagcgaggacgacagtagagcactttcgctcttcatcatccaaaatacagatattgatatttctaactacaccaagctcattgcatgctctccttatacttataatgatttcccttctgggaatccgcaggatagaaatttggctctcgctagacttggaaaggtcagtcttaatgaggagtcatttgcaagcacagcctcatcaagcgagcttagagccgcactggtacaaagacacataggcgaatatctacctcaagcagaaaaatatccgttagacatcgcggaaaagttgatcctgctcaagtcccttactggcagcgctgagaaggccagcatatccagaatgattaagctcgatgaactacagagcagcgaaaatatcgttccccaagtttctcgacaccttgctacacgtagcctcgacacagaaaactacaacagggatcttgtggcttactgcctagcaaactgctccttatccgaacttgtaatagagatgctttataacttcatagacttgttgagcgaccaggaaatcactagcgcattaagagcatcgcccgaaccttactgtcaattcataaaggccaatacgcgccagaaattggatcgcacagatagaaatatggattttgtaaggaagctagatcgccgaaatattgtctcgtccatcagtgaggaaaacgatactatccgggttaacgcataccgtaagggagtgttgaaaattctgtttggagagtga

SEQ ID NO: 356552 - DNA, 810 bp, Pseudomonas aeruginosa
  misc_feature (794)..(803): n is a, c, g, or t
atgtgtggtatcgctggcttctggaatattacgggaactctcctaggggataatgcacgtgtggcccggcagatggctgccgccatacatcatcgtggaccggatgagtcggggatttggtacgaggctccgcgcgccccgatacttgtccatgcgcgtcttgcggttctggagctttcccccgcaggcagccagcccatgcactccgactgtggtcggtatgtgctgatttacaatggcgagatatacaaccatctggctcttagggctcgcctgagcgaggcaggtgtaacacattcctggcgtggcggatcggacaccgaaaccttattggcatgctttgcccaatggggcgtggagagtaccctcaagctcaccgtgggtatgttcgctctggccttgtgggatcgacaggagaaaacaattactctggctcgtgatcgaatgggcgaaaagcctctctattggggctggcagaatggcgtgcttttttttgcatccgaactgaaggccctgaaagaacatccgctttttaggggggatattgatagagatgccttggccctatttctacgatatggatatgtcccggctccctatagtatttataaaggtatcgggaagctaagggcagggagctatttggtcctatcggaacgttcattgaacgagacctgcgaacctgctgcctattggagtgcgaacgccgcgatagaagaggctctctccaatccattccagggaacggatgccgaggcagttgatcttctggaaagccagttgagaactagcannnnnnnnnngaactag

SEQ ID NO: 356553 - DNA, 957 bp, Pseudomonas aeruginosa
atgtctttagaaatcaaatctccggaagatttttttgatcggcctgactatcgagaggttttggattttggtgaaaaatccggcagagagcttttagagattcttggtgcatacatatttccggataccaagtctgtgaagtgtgggattcggaactgccgtactccgcatcggcgcggctatctgattagcaccacagatggtctggaaacgaacataggaaatgtctgtggaaaaaaacacttaggagcaatattcaccgagaagacgagccagtatagaaagaagcaggcctatcaacggaatttagaacagtttcatattgttaaatctcgcgttcaggagttgtggggagagctggatgaactaaagcttgcggctgagcgagtgtcaaagttaaaaataattctaaataagtgccatcctaatgtcgttcgtgctcttattaatcgcagtaaggtcaatgatgcggttctaggtgctagtattcccatgactcgggaagaggcagagcgtctgtatgtccatgaggcgaaggaaagcgtagatgggaaggtgcagacttttgaggcgtggctggcaaagggatggcccaagaaaaaggtagtggctggccaaatcgctggtctaaagttctggaccaatgatctccataaagcactcaggcaagagatattatccccggctgaggagttgcgtaatatggatgtgaatagcgttgatcagttaagccttaggaggctggccgagttttcacgttggtcacagcagttggatgcaaatatggaaagagccagaatcataatttcagatggtgaggcgttttttgaattgcaaaatattaaaatgctaaggctgttgggggatgagcttgatgaagcgtccagtctactgttagagccagctctgcatgggttcagaacacaggcagcgtggttctatggggtaggcgggtaa

SEQ ID NO: 356554 - DNA, 726 bp, Pseudomonas aeruginosa
atgcgtgatggcgcagtgatgtcgttggggctagagttgggtggcccggcatggggccggatcaaggaggtatggatgggcaggcttgttccagagcggatgattcacttcacgctctgggccatgtggtggctgattattggttcggccggaatgtgggttttagtgggatcagtcgcgttttgggtgaaagaaggttggttacctcccgactccgcaggttgggctcaggctattggtgcattcgttgcggtagttgttgccttagcccttccttactatcagaacagaagacagaacaatgatcggagagaagacgaactgcgtaagaggttggaggcgataaatgcagtttatgctttgatggatcatgttcgtgaattatttattcgtctatctaaagctagaagttatgatgtgggttatttagaggctgtgcgtgatggagttaaggactcacttggtcatgaactagttcaggcagccgctatgattcgggaagtgccgataatttcaatgtcaaacgagatggtttacttcgttgttcacctaagagaggtggcaacctatggcgagtatgcaggaaaagttttagaaaatttgcttatccgagattccgagctgccagtgctgcgcggaaggggcttggctaatgcagtgttgattaaaaggtggatggacgaacttgataagttaagtggcaatattagaaatggaattagttag

SEQ ID NO: 356555 - DNA, 855 bp, Pseudomonas aeruginosa
gtgcggcatggccagcacggtttccagcgccttctcctcgctggccagcgggcaacccgtgcagccggttcgggcgttgatctcttcggcctcatcgccgccgtaggcgtcggcgatcattgcggtggaccagtcgccgaactcagcgagtggagcccagtgcttcagccactcccagacgtggcagacgcgccagtgcaggagaggggcgagggtggcgagccggcctttcaggccctttgcctcggggaggaccttctggtaccagccctgtccgcactcggcaccgtccttaccgcaggacatctcgatccgcttgtcgcggatggcgctttcgccctggcgcacgccagtgatcatcagcacgttcccgtcgagcgcggccaggcgctgctcgagggcggcctgcatcgggtcgatcttgatctggcgggtgcaccagcgcagcgtgttgttgttcggcgggggcacgccgcggcccaggatgtagaccatgaagcgcttgtcgagcggtgcgcataccacctcgacgtggatgccgcggtcccgcaactcgtccatgatctggtgcgccgcgatggccagcggcggcagttcctggcgcgtgtccgcgtagaacacggtcagcgtcttcggcgccttgacccggccggtgtcgatcaaccagatcagcagcgtcagcgtggtggtgctgtccttgccgccagaccaggccacagcccagtgctcatggtcggcgccgtaggcctgcatgctctggatggtcagttcgatgctctcggtcatctgcaggcgctgggcgccggcggcgaagatgtcgctttggcggctcatgggatggatccctcctattga

SEQ ID NO: 356556 - DNA, 948 bp, Pseudomonas aeruginosa; identical to SEQ ID NO: 241753

SEQ ID NO: 356557 - DNA, 528 bp, Pseudomonas aeruginosa; identical to SEQ ID NO: 241795

SEQ ID NO: 356558 - DNA, 774 bp, Pseudomonas aeruginosa; identical to SEQ ID NO: 241796

SEQ ID NO: 356559 - DNA, 213 bp, Pseudomonas aeruginosa; identical to SEQ ID NO: 241802

SEQ ID NO: 356560 - DNA, 450 bp, Pseudomonas aeruginosa
atggtggcagtaccagcgcggcatccactgctggcccacaagcgtattccgttggaggaactgctgcgctatccgctggttctatgcgatccgcaagtgtgcgaaggccatgccaaatacgtcgatcgggtgctgcgccgggtcgacatggagccgctgatcgcggaacgggtcgctacgtgtgatctgatgatggcgctggtatcggccggcctcgcgcttgggtttacgggcgccgcgcgcattgccgccaaccctgactcgggtgtggtggcccggccgctggcgttgcgcatgccgccgctgacgacctacctgctgtaccccgacggcgagccgtccgatgtgctggcgcggttcattgagcgcgtgcaggccatcgagtcacccgaacccccaaggctcaagtcgggccatccttccgatcccttggaggaacctgcgccatga

SEQ ID NO: 356561 - DNA, 2031 bp, Pseudomonas aeruginosa
atgcggctgtttctgtgcgagaagccctcccagggcaaagacatcggccggattctcggcgccacccagcgcggtgaaggctgcctcaatggctccggcgtcacggtcacctggtgcatcggccatctcgtcgaagcagcagcacccgaggtctatgacgcggcgctcaagcgctggtcgctggagcagttgcccatcattccccagcagtggcgggtcgaggtcaagccgaagaccgccacgcagttcaaggtcgtcaaggcgcttctggcgaaggcgacccaccttgtcattgccaccgacgccgaccgcgagggcgagctgatcgcccgcgagatcatcgacctgtgcggctaccgcggtcccatcgaacgcctgtggctgtcggcgctcaacgatgcgtccatccgcaccgcgctcgccaagctgcggccctcggccgagacactgccgatgtattactcggcgctggcgcgctcgcgcgccgactggcttgtgggcatgaacctcagccggctgttcaccgtgctcgggcggcaagccggctacgacggcgtgctgtcggtcgggcgtgtacagaccccgacgctcaaactcgtggtggaccgtgaccgagagatcgcggccttcgtgtccgtgccgtactgggccatcgacgtgtccttgtccgcaggcggtcagacgttcaccgcgcagtgggtggcacccgatgccagcgccgacgacgccggccgctgcctgcagcagcccatcgcacagcaggccgcgcagcagatccgcgccgcgggcagtgcccaggtggtgtcggtcgaaaccgagcgcgtgcgcgaaggcccgccgctgctgttcgacctgggcaccttgcaggaagtctgttccaagcagcttgggctggacgtgcaggagacactggaaattgcccaggccctgtacgagacgcacaaggccacgacgtacccgcgctcggattcgggccacctccccgaaagcatgttcgccgaggtgcccacggtcctggacagcctgctaaagaccgatcccacgctggccccgatcatgggccagctcgaccgcacccagcgctcgcgcgcctggaacgacagcaaggtgacggcgcaccacggcatcatcccgacgctcgaacccgcgaacctctccgccatgagcgagaaggagcaggcggtgtaccggctgatccgggcgcattacctggcccagttcctcccgcaccacgagttcgaccgcaccgtggcggacctctcctgcggccagcagaagctggtggccacgggcaagcaggtcgtcgtcaagggctggcgcctggtgctggccgagccagaacgtgaaggcagcgccgacgaggacggcgatgccccgcgcagccaggtgctgcccgcattgcgcgacgggatggcatgtcaggtcgccggggccgacatcaaggccctcaagacgatgccgcccaagccctatacccagggcgaactggtcaaggcgatgaagggcgttgcgcgtttcgtgaccgacccgcgcctgaagcagaagctcaaggacacgacgggcatcggcaccgaggcgacgcgggccaacatcatcagcgggctgatcgcccgcggctacatcgtgaagaagggacgctccatccgcgcatcggatgcggcgctcacgctgatagacgccgtgcccgcggcgattgccgaccccggcaccaccgccgtctgggaacagacgctggacatgatcgaggccggacaactcaccctggatgtgttcatcggcaagcaggctgcatggatttcgcagttgatcgcgcagtacggcagcacgtccctgtccatcaaggttccccaaggaccggcttgtccgcagtgcggcgcacccacgcgccagcgcaccggcaagagcggcccgttctggtcgtgcagtcgctaccccgcctgcaaaggcacgctgccggtggcaaccggcacgtccaggcgtggtgcctcgcgtccacgccgtaccagtggcggtggctgcaaaggcgcctga

SEQ ID NO: 356562 - DNA, 132 bp, Pseudomonas aeruginosa
atgcccgaggtgtggaggtcgaaatacgatttctcgttggacgtggtgttcatggtgaatctccattgggatgaagcggagacacaccggcccacgcatgcggggaaggtgcgtgaccccgcggtgggttga

SEQ ID NO: 356563 - DNA, 255 bp, Pseudomonas aeruginosa
gtgatcgccctgaccaacaaggagttcgccctcctgcacctgctgatgcgccgcgagggcgaggtgctgtcgcgcaccctgatcgcctcggaggtctgggacatgaacttcgacagcgacaccaacgtcgtcgacgtggcgatcaagcgcctgcgcgccaaggtcgacaatcccttcccgaacaagctgatccataccgtgcgcggcatcggttacgtctgcgaggagcgcccgtgcccgcccgccgctccctga

SEQ ID NO: 356564 - DNA, 669 bp, Pseudomonas aeruginosa
atgatcgataccccggtggtggcggcgctggacatgtatgtcgagccggactgcgtcaggcaggccggcgcaaccttcatcggcgaggtctgccggcgcctgggcgtgcgccgttacgcgtcggccgccaccgatctggcggtgcagtggcgacagcctaacctgttgttcgcgcagacctgcggctatccgctgatgacccagttgcgcggccaggtggcggtgctcgcggtgcccagctacgacttgcccgattgtgctcccggcgagcattgcagcctgttcgtcgccgccgaaggacaggcgcgccagcgcctcggcgacttccgcaatacccgcctggcgctcaacgaccacgactccaacagcggcatgaacctgctgcgccatgcgctggcgccgctggggcgagactcggcgttcttcgccgaggtgcacatcagcggcggccacctgcgcagcctggcgatggtggccgcgggtgaggtcgagctgacctcggtggatgcagtgaccttcggctacctgcaacgccacgcaccggagcgcctggacggcctgcgcgtgctcgggcgcagcgcgccgagcccggccggcgaggagcattaccggattctcctcgactacgagcgtcaggcgcagggctggggttacccgcaattgcgctga

SEQ ID NO: 356565 - DNA, 936 bp, Pseudomonas aeruginosa
atgcccgccgtgcgcaccttccaagacctgattctcgccctgcagaactactgggcagagcagggctgcgtggtgctgcagccctacgacatggaagtgggcgccggcaccttccacaccgccaccttcctccgcgccatcggcccggagacctggaacgccgcctacgtccagccgagccgccgccccaccgacggccgctacggcgagaaccccaaccgcctgcagcactactaccagtttcaggtggtcctgaagccaaacccggagaacttccaggagctgtacctcggctcgctgaaagccatcggcatcgacccgctggtccacgacatccgcttcgtcgaggacaactgggagtcgccgaccctcggcgcctggggcctgggttgggaaatctggctgaacggcatggaagtcacccagttcacctacttccagcaggtcggcggcatcgagtgctatccggtcaccggcgagatcacctacggcctggagcgcctggccatgtacctgcagggcgtggactcggtctacgacctggtctggaccgacggcccgttcggcaaggtcacctatggcgacgtgttccaccagaacgaggtggagcaatccactttcaacttcgagcacgccaacgtgccgaagctgttcgaactgttcgacttctacgaaagcgaagccaaccgcctgatcgcgctggagctgccgttgccgacctacgagatggtcctcaaggcttcgcataccttcaacctgctggatgcgcggcgcgccatctcggtcaccgagcgccagcgctacatccttcgcgtgcgtaccctggcccgcgccgtggcgcagagctacctgcaggcccgcgcgcgcctcggcttccccatggccacccccgaattgcgtgacgaagtactggccaagctgaaggaggccgaatga

SEQ ID NO: 356566 - DNA, 339 bp, Pseudomonas aeruginosa; identical to SEQ ID NO: 343100

SEQ ID NO: 356567 - DNA, 1485 bp, Pseudomonas aeruginosa
atgggcaaggcgatcgccgtcgccggtaccgtgaagtcgcgcaagtccgaccgccacgccacgtccgactggatggagatggaaaagcagcgcggcatctccatcaccacctcggtgatgcagttcccctaccgcgagcacatgatcaacctgctcgacacccccggccacgaagacttctccgaagacacctaccgcaccctgaccgcggtggactcggcgctgatggtgctcgacggcggtaagggcgtcgaaccgcggaccatcgccctgatggaagtctgccggctgcgcgacacgcccatcgtcagcttcatcaacaagctcgaccgcgacatccgcgaccccatcgagctgctcgacgagatcgaggcggtgctgaagatcaaggccgcgccgatcacctggccgatcggctgctacaaggacttcaagggcgtctaccacctggccgacgacaggatcatcgtctacgtcccgggccacggccacgagcgcatcgagaccaaggtcatcgaaaagctcgactccgacgaagcccgcgcccacctcggcgatctctacgacaatttcgtcgaggagctggagctggtgcagggcgcctgccacgaattcgacaaggacgccttcctcaagggcgagatgaccccggtgttcttcggcaccgcgctgggcaacttcggcgtcgaccaggtcctcgactgcatcgtcgactgggcgccgcagccgctgtcgcgcgccacccacgaacgcagcgtggagccgaccgaggagaagttctccggcttcgtgttcaagatccaggcgaacatggatcccaagcaccgcgaccgcatcgccttcatgcgcatctgctcgggcaagtacgagaaaggcatgaagatgcgccacgtgcgcctgggcaaggacgtgaagatcgccgacgcgctgaccttcttctcctccgagcgcgagcaactggaagaggcctatgccggcgacatcatcggcctgcacaaccacggcaccatccagatcggcgacaccttcagcgaaggcgagaacttcggtttcaccggcatcccgcacttcgccccggaactgttccgccgcgtgcgcctgaaagacccgctgaaatccaagcagttgcgccagggcctgcaggaactggccgaggaaggtgcgacccaggtgttcttccccgagcgcaacaacgacatcatcctcggtgcggtgggcgtgctgcagttcgacgtggtcgccagccgcctgaaggaggaatacaaggtcgagtgcgcctacgaggcgatcaacgtctggtcggcacgctggatcgagtgcgacgacgagaagaagctcaaggagttcaaggacaaggccttcgagaacctctccgtggacggcggcgggcacctcacctacctggcgccgacccgcgtcaacctcagcctgatggaagaacgctggccggacatccgcttccgcgcgacgcgcgagcatcactga

SEQ ID NO: 356568 - DNA, 405 bp, Pseudomonas aeruginosa
atgagcgatgccaaggtcgatacccgccgcctggtcggccgcctgctgctggtgaccgtgctgatgttcgccttcggcttcgccctggtgccgctctatgacgtgatgtgccgcgccctggggatcaacggcaagaccgccggcagcgcctacagcggcgaacagcaggtggatgtcgggcgcgaggtgaaggtgcagttcatgacctcgaacaatatcgacatggtctgggagttccgctccgccggcgaccagttggtggtgcatcccggcgcggtgaaccagatggtgttctacgcgcgcaacccgagcgacaagccgatgactgcgcaggccatcccgagcatcgccccggccgaggccgccgcctacttccacaagaccgaatgcttctgtttcacctag

SEQ ID NO: 356569 - DNA, 168 bp, Pseudomonas aeruginosa
atgagcagcgaagtcagcgccatccgccaattgatcgaagactggcgagccgccgtccgcgccagcgacgttccgcgcatcgtctcgtactacgcggaggacatcgtcgccttcgacgccatcctgcaattgcaattcaaggggcgcgacgcctaccagaagcactga

SEQ ID NO: 356570 - DNA, 3726 bp, Pseudomonas aeruginosa
atgcataaggatttacctgtgattaaccgtgccgatctgctgaaaaacctgcagtccctgttaccgcatattgagaaggacatcctcgcctacagcgagtccaacgcggagctcagtgaacatttgcagagcgaatatcgcgcggcggttgaggctgaacgcaccgccgagcacttcgtttcctggcgtgaagcgcaaataacccaggccgcagtggcctgggtattgacctgtgtgtttgtgcgttttcttgaagacaacggcttactgaacgagccagtgttggctggcccggtgagtgatgcgcaggggcgaaatgccttgcagcaggctaaagagcgcatggtggcttacttcaacgaaaacccgacctttgaagagcgccactacctgctcgatctattcgcggaactggaaaaatatccggtgatcgcggagctcttggatcatcgccataaccccctctggcagattccggtttcggctgatggtgccaaacgtctgattgacttcttccagaagatcgatgcagacagcggtgagatcgtccacgactttaccgaccgagaatgggatacccgcttccttggcgacctctaccaggatctttctgaatccgtgcgtaagcgttatgcgctgctgcaaaccccggaatttgttgagagctttattctcgactacaccctggagccggcgattcagactttcggtctgccggggctgcgcctaatcgatcctacatgcggttcagggcactttctgctgacgacctttgagcgggtgttcaatcagtggttgaagcgcgagcctggcaccaacgcccgtgaattggcgcagcgagcattggacgtagtgcatggtacagatatcaacccctatgccattgccatttgccgattccgtttgttgattgctgcaatgaaggcagcaggcagcatcaagatcaaagatgcacccagctttcatttcaacctggcatgtggtgattcactattgcatggccgtcgatttgagtggcaggggcagggtatccagggtggattgctggatgagggaaataagcacgtttatgaggtggaagatcccgcgagactcgaaaaaattctcgggcagcgttaccacgtcgtagtgggtaatccaccttatattgtcgtccgcgataagtctttgaatcaggcttatcgagatagatatcaaacttgtaaaggcaagtactcattaggtgttccgtttacggagcgtttttttgatttgacagttgttgcggacagtagtcgacctgctggcttcgtgggaatgataactgccaatagcttcatgaagagattgtttggtcgagagttggtcgaaaaatacctgcaccggaaagatgtgacgcacgttattgatagtgccggtgcttacataccgggtcatggtacgccaactgtaattcttttcgcgcgcaatcgtgcccctggcgctgagcatgtacgtacggttatgggtaagagaggggagcctgctaccccggttgatgcgtcccagggagaggtgtggtgttctattaccgatatggtaaatacgccgggccaagaaaatgattatgtcagtgtggctgatcttgataggtctttgttttgtgtgcacccatggagtattggtggcggtggtgctggtgagctaaaggcgctacttgatgaaactcacagtcagcgcttaggtgtggtcgctaacaatattgggattgcagctgtcacacttgaagatgaagctttttctttttcaaggcatgtaattgagcgtttcgttggagatcaggctgagtttgttacgatggtggatgcggactccattcgtgattgggcagatttctctaagaatttggctatattcccatataggggaaaagatctgaaggtggttgtgccttcttctgttaggagatttctttggcctatcaggaccaatctcaataacagggtttggttccgtaagagtcaggctgagcgtggtttagattggtgtgagtatggtcatatctcaagggataactattcttttgacttggcgatctcatatcctgaggttgcaagtcataatcacttttatctaagccaatgtcgtaaagtctatcagcagacgtcgccgttaattactcttggtaaaaaagcagttaaggatgactactattctctgctgggtattctcaatagctctttggtatgtttctggatgaagcaagtgagccaacagaagcagatgactggcggtgacggtgttcgtgttgagtcaagggccaaggttccttatcagttctcgagcacgtccttaaagaagctgcctatacctgaaatatttgagaggcccgaatttagaaggactgtttctagcctggctgcccaggcagatgaagcggcaaaccgaattttgcagctttctgcggatcaagttttagctcgggcgcttgagcaggggcttgaccttgaacattcctggcttgatgcacagacagagaggaataagctcaacagtaggcttgtccttatacaggaggagttggactggtgctcttattatgcctatggactatgcgactactcactgctggctgatattcaggcttggtttgattctgatattaaagctggtgagaggccttttgagatactcgcaggagtaagtgaggaaggtttttctgttccaaatagtattccccataattggccagaagagatgcaaagcaaatggaggcaacggatagatgccatccatacaaatcagtgggttcgtgttatcgaggattcgcattacaagcggcgctggattggtcgtcaaggattatttaaccatgtggcaaaaaatgatgaaataaaaacggcatgtaaaaattggatgctggagcgacttgagcattcttgtaaagtgagtgaactaaaaacgtgcgctcaattggctgatgtcattcgggctgacgaaaatgtggctcgtgttgctaatttttgctatggcgaattttttgatctgcaatcgattgtcgctgatttagtagatgctgagcatgtgccgcaaatggctgtggtgcgtttgaaaacagtcgcaatggataagttcagggcatggcaggaggtatgggagaagcaacgtctggaggatgcgattgatgttaaatatcgagttgatcagccgctgcctgaggaagacgccctgatttctgaagaaaaagctaaatacgacctggctttagcgcaagcaaagctagagaagactgagcgagtaggtgacattcctttacctccgcaatacaagtccactgatttccgtaagcccagttattggccgctgcgcggcaaactggatgtccctaaagagcgcttcttctcattacctggctgtgaaaaagacggcgataccacacttgtcatcggttgggccggtttgaaccacttgcaacgtgcccaggcgattgcagcttggtacctggatcgcaaagaaggtgagggctgggaaactgagcgacttatgcccatgctggttgcgctggatgagttgatcccctggttgaaacaatggcacaacgaggtggatccagagttcggcgagcgcatgggggattactacgaggctttcctgctcgaagaactgcgaaatctggaaattacgcgggtcgaccttttgagctggcagccggcagctgtagctggaaagcgtggcggtcgcaaaaagaaagtggccgagcagaactga

SEQ ID NO: 356571 - DNA, 2529 bp, Pseudomonas aeruginosa
atgagcgcccaggcggcatccatcggcgcgcttatctcgaccctactgctgtcggatcatcgcgtcctgcgtctctcttgggaaaagccctttacgcactcgctggaatggcgcgagctccgagagccgacttatctcgcttaccagccgtgggcggcgcgcgttccagaccatatattcgactcagcttggcgattcctggtttcacagcagatatcaggccaagacgtgctgatcacatcgttacaggcactggtcgacgaatttctggaactgcgccatgacaaggtgtgcgttcgtcgggattttcaaggggcttggcagcagggcctagctagccggctctcagccatcccgattcaggcagctgctgacgtgtcgttcagtgtcgggcagtactcccctaccaactcgtcaagtatgcgtctcgtctcgttcggtcgtaatgcaaccttgtggcggagtcaggtcctaccactccttcgacccgatgaggcccttatccaagactatgtggaacgtgaaggcctgcacgaaacgcacctgcacctgaacggcagcactcccgcagagatctgctggctgcgtgctatccgcaacccatacacagaaacccgggagttcatcgccgcgtggacccgaggcaagcacgccagccatctccgtgagttagttggtcaggcgaatcccgagttaacgccgcaggttctctttcagcacctactgacggctagccgccttcgcgcttggctcgtcggagccgctgaagaccggattgagccgaatgcgctcctcccagtgtcctgtcaggccttgtccagtgcaggtaacgatgagtggtccgtcggactacgagggcagaccccgtcatggcgatgcgagcctgatgtcgagggtgaactcatctggatggctggccttatcgcaaggcttcgcaaatatccgagcgtgcagttagcccgtatgttccacgcctatctactcctgtcgaacgaacactatcgattgctcgtccagagcgaggcgcagtatggcttcgaccaattccagaagctgaccctgacggaactacgtgagccggcggaacgagactatcgaaatcggttccacgcaatgcatggggctcgatcggggactagcacgatcggatatctggaaggtcgcttcgcacccaaggacagtccactgaaggcctgccggctcttccaagccatcctaggcggctaccttgaatacctgcgcgacgctaccgacaccgggcactcgctcggcatgcctccacgctccctctcagccttgctggcccagctcgatcggtacttcgagcagtcacctagtcgacaccggagcatccaccgcctgacacttgtcgcgcatttcatcaagcaaccctggcctcccgtgcagaggagcaaggctggtcctttccgacattacccgctcgacctccaactgagacggacgacgggagtgctgctttctgtactcgagcgctggcctccgctcaaaacctgggtgcgaggcatcgatgccgccgcgaacgagctacatgccccaccggatgtgtttgcccctgctttccgagtctgccgtcgagccggacttacccggcgcacctaccatgcgggtgaagacttccgtcatctgctcacaggaatcgccaccatttgggaggcattaaccctgctggatctgcgcgacggcgaccgaattgggcacggcacagcaatggggatccggccaagcctgtggcttgatcgcatgccgggcatgctcacgctgtcccgtggcgaatggatgacgggcttactggccgcatggcaactcctgcgggacgtgccagagatgcagacctgtgcgcaccgactgcagcgcgaacttgaggtaatcgccggccagatctttgggcgctcgctggcggctcgcgaggtggaggacgcaatggtgcttcgcggacttagtcgacgtgacttgatgcactaccagaccggcgaggtagacccgcaccaggagtccttgagtgatctgtggcgtgaggaaacaacgctggtccgctcaatgcgtctgagccagcctcaatccgtcggactactctgggaatggttgagcgatgcgggcgtgcaagcacgtgcagacgaactgatcgccaaggaggctgaattcatggatgccccgagctacctccgactgcagcaagctctcatgcgacaggttgctgatcgaggcgtcctcatcgagacgctgccgtccagcaatgtcagaatcagtcagtaccaccatgtcggcgagcaccattcgctccgctggatgagggttccaggccacgttgaggacggagacccagagattatggtgtgtctcggttcagacgatcctgggatcttcgcgagcgacctcgaaactgagttctacttgctgtatgccacgcttaggcgattgggcctaagtgatacagaagcactaaaccgtctgagcacactgaacgaacgcggcagaacctatcgtttccaccaccccatgctgtcttga

SEQ ID NO: 356572 - DNA, 1680 bp, Pseudomonas aeruginosa
atgcttggagcgaattgccgagtaacgcatccggctctaggcacggaatcgagtccggtcgcagatgtcatccatgcgattgtaaggcgcggattgcgcgtcaagactggtcccgacgttaccgtctatgtcgagttcctgctcaagcagcccttgcgctcagtgtttcaggtcatggccaactgtatgccgcacctgggtatctcatcgccatccgccatagaacctgcaccttggtcagctgagctgacgaccgccctcagccgctccttgcaagccttggcgctgaccagtctctacaagttctcggtcgacaccgacgccatcgccgcgcaggagttgccggccttgacgcaggccgtgttcgagttgtcgctgctggacggcgacatcgacaccgcgttgtatcttcgaccgatgtcagcagagtctgacatgaaagcgagctttgcagctctggcggcggaagttcctaatttttgtgcgaagcggccgggcacagcacttaggtatatgctgcggggccccggtagtgtctcactctactcgctggcccgcgaccagccaggtccggcagcttccgcggtagatcgcatccatcaattcaagtcatacatgggcatcggccggagagaagacagtctcgactgggctcggcgcgccaccgcagtcatcgcgcagccctacagcatcagccccaaagcccgtgtcatacttccaggtgttgtcggtttgagtcggaaggggcgcaagtcagagcacacagctcgaacagcgatccgactcgccgtcgaaagcgattcaatccagcaactgcctgtttttgcgctgagcatagttgacgtcgctagcggtgccggcatgcgcacatacggatccatctttacgcttgtcggcctcatcgagaagctgctctcagcggactccaaggttgttcaagacgcacgaacaatcttcgaccgcgcgtatccatcattaaccgtttcggctccgacttggtcgcaaacaagcacggcggatctggaagaaacggaagcgccaaaatccgcaaagctaggaagtgagttttctaagcaagagaagctgtgggaaagcatcgactcgtggcgccagagtgcattgcagttggccgatgtgacgttgccttctgcaatcttcctggggaaagtttggacaaggcttttcttcagcatacagagcgcttccgaagcactgagacctcgcgcagacttcggcgaggtaatggagatcttcgccctctgcgtaatcaatgctttcctagtcgaggaggctgaacatcacctctcgggttctcccagcacgtctctccccgaatttcgcatagacaggaacaaccctcgaacctcggccagctggtttgtcgacaaactcaaatccgtgcaacttcgacggaacgagttcccgatgacatcaatcatggcgacgtgccctctactattgggacttctcgacgcacagttgggctacgcacatgcactgagatccttattccccgatagtacggagacggcctcgattgaggagatgctgcgtcccaaggagctcaccgaactgctgagaaaagtctccgtagcaggacagtctaggactagatcaccgtccacagcctccaagcccgcagcgacgtcaagttctgcagatgaggccaacgacgaatga

SEQ ID NO: 356573 - DNA, 234 bp, Pseudomonas aeruginosa
atgcgtaatctcacccgtgttgccgatcaggtcgggaataacctgagtaccgcaggcattgcgttggagacaatcgcgaacctgctgggcgcagatggctgcgaacaccaccttgatagtcgcgaggtcagcggcctgctcaacgctgtatcggctctgtctgcctacatctcgggagctggttacgacctgtgctccgccgtggaagaagaatgtaacgggggtgccgaatga

SEQ ID NO: 356574 - DNA, 264 bp, Pseudomonas aeruginosa
atgacccatcgtcgcatcctcaccctcaatccgtctaaagctcgcgccgccgctcaccgagcaatggcccttgccgccctccgcagcaattcctccctcgctgttcgactcaaccgctacaaccaccaccgcgctatccagcgctcccttgaagcccagcccaacgcctgcgattggctggagaatctggagggggatgcctgggccgatgcctgcgaagaaatcgccgatgccctggaagctcaggaggtgagccatgcgtaa

SEQ ID NO: 356575 - DNA, 612 bp, Pseudomonas aeruginosa
atgaagaaatttcaaagacagatatcaagcggatgggtcgatgagacgctaactgaccgagctctagaagcaattcgatctacacccttatctaatgatgatctagaacaaaaaattggtgagaggttgggaaggtacaggcttctcaggcagttccacgacaccgagccacagccagcagtactagtgaggcacttgagtgatctggcatccacttctcacgagttgatcaccggaattatgactcttccccccgctgcccgcgccttggctacagaaatactatatgcaactggaaaggaaagcttccagaaactatccaagcagttggctagagacctagttacttttagcgcagcaatgaactccgtatccaatagggtcaagccgtcaataggacgaaaaggggaaaggccaaatacgctagagcattctttactctctgacgtagcgcagttgcttcaggacttcggttgcggtctaggtcggattgaagaagcacagaaaacggttgaaattctagtagccgcagggattagcgaacttcctggcactccggaaaaggcacgcaaagctataattgcctggcgaaaggcccaagataagccttaa

SEQ ID NO: 356576 - DNA, 1227 bp, Pseudomonas aeruginosa
atgaagcgcagcgagatcaagcgtcgcccacttgccgatacaatccttgcaggtcttgaaccggaaaacgccgtctatcgggagcacgacggccaagctttgtacttcagggtgaagcccaatggcagtaaatcttgggagcttcgatacaagaagccagacgggaaatggtcgtggctcggtcttggcagttaccccgaagtcagcggtgcaaatgctcgccagaaagcagcggagcttcgctcagataccgccgacggcaagaatcccctagcctctaaaaaagcacgcaaggcttcgcaaatcctggcggccagtgaaacctttgagtcactggctcgtgaatggatagaaatccgttgctctggatgggcacccagcactgccaagcgcactatcggcgcgctggagcggcatgtatttccagtcttcggcaggcgactctataaagagattctacccatcgaatggatggaccttctaagagggatggagaggcaaggaatcatcgaacagatgagccgtgttcgtcgttcttgtaaagagatctatgaccttgctcgagtaaccggacgagctatacataacccaatggaaggcctaaaccgctttctccagacaaagcccgcggagaatttcgcgcatgtcagccaagccgagttgccggctctactaagggcgatctcttcttatccacatgccatcgatgtacgcttggggcttcgcctcctgatgctcactggtgtccgtcccagtgagctacgagaggcccgatgggaagagttcgacctggatgccggtttatgggctatcccatcacatcgaatgaagaagcggcgcccacacaccgttcctctttccaggcaggctcttgactccctcaaggctctccaagtgctgacaggaaggtacccactgctcttccctggccgcaatgatcgaaccaagcctcgcagcaacatgaccttcaatatggcgctccgccgcctgggatatgaaggtcgccagacagcccacggcttccgtcatgttgcctcaactattctgcgtgagaatggattcgccaaggaacacgtcgaagctcagctatcccatgcagaggacggcatcgctggcgtttacaacaaagctgtctacttggaacagcgacggaccatgatgcagtggtacgcagacttcctagacaagctgtcagctggaaacgtctcagagattagaaaagcatga

SEQ ID NO: 356577 - DNA, 1020 bp, Pseudomonas aeruginosa
atgcgacagtcggccggaaatcgccgagaacgcgctgccggtaccgtagttcgcgtcgatgccggcggcgcaggccagcaaacgtgcctcgtagtcgtgggcattggcgccgacgaaaacaccgacctggcgttcgcgcaagtcatgcggcggaatacctgcccgctccagggcctcccaggcaaccatcaggaacaggcgttgctgcggatccatgctgcccgcttcccgtggcgagatccggaaaaagtcctcgtcgaacccttccacgcgctcgaccaggctggcatggcgccgggtgccgaccggctcggtcaggcgcgacgacggcaccggcacgacgcatgtcgcctgctcgagcaatacttcccagagcgcctcgggactgtccgcacgcggcagccggcaagccatccccagcactgccacctcgtgtccggtatccgccccgcgcgcggccggcgcacaggtcgtcggctggatttccttcgccgcacccaactgctcgaggcgccgcgccagcgcctccagattcggatagtcgaagccgaccgtggcaggcagttccaatcccacccgtgcctccagcttgcgcttgaactcgatcagcgagatcgaggtcaggccgagttcgaaaaaacccctttcggcatccagctcgtcgcatggcaccccgagtatctccgacaacgccgcgctgaccacttcccgcgcctgcgccagggtgaccgccgggcgcgccccagccttcttcgccggaacattggcaagcgctgccgcaggctcgtcgaccgtgcacagggcgacatcctcggccgtggcacagagtcgtccctcagcgtcgaacacctgcaccctggcatgcaaggcttgcgcgcgcgccggcacgccctgcgtcgcctggaaccagtaggcctcgcgttgccaggggtaggtaggcagttcgacgaagccagcgtcccccctggtacgccttccagtccggcgccacaccattttcgtaaaggccggcgaggatag

SEQ ID NO: 356578 - DNA, 234 bp, Pseudomonas aeruginosa
atgttcatcaataggtgtaggaaccgtcacaatgaaaacattgcacttttgcaagtcctgaagattgaaagtaaagctcagttcggacgcttctttcaactcagccgcatctacttcaagagtagagtcaatgccttgccgcagttcagcgattcgcccctgattgatatcgaaaccgacaacggttcgttttttaccaaattcaacagcaagcggaagaccaacatagcctag

SEQ ID NO: 356579 - DNA, 1062 bp, Pseudomonas aeruginosa; identical to SEQ ID NO: 327387

SEQ ID NO: 356580 - DNA, 666 bp, Pseudomonas aeruginosa; identical to SEQ ID NO: 323670

SEQ ID NO: 356581 - DNA, 555 bp, Pseudomonas aeruginosa; identical to SEQ ID NO: 352492

SEQ ID NO: 356582 - DNA, 348 bp, Pseudomonas aeruginosa
atgcaagcaattattgaaacggtggcaagttggtttaaggcgcttttggcgtggttcggtcgaatctttgaatggttccttggcatgttcaaggatttcatggagttcattgctgatttgccgctactgatattcaagggcgtcatggaaggcgcgctgtacttgatcaatgcgcttccggttccgcagttcctggtgcagtacaagttgcagacgctgttcagtggtttgcctgagtcggtgctgtggttcgtccagttcttcggcattccgcaggggctggcgatcctgggtgcgggtgtcgcgtttcggctgctgcgcaaggcgctgacgctgggccaatggtaa

SEQ ID NO: 356583 - DNA, 1449 bp, Pseudomonas aeruginosa; identical to SEQ ID NO: 352457

SEQ ID NO: 356584 - DNA, 225 bp, Pseudomonas aeruginosa
atgaaagccaacctgaaacaaaccgccctggtcctgggcgctgtcgctgcatccgctgcggtgccggccttcgccgccgagggcgatctcgacttctcgtcgatgatcagctcggtcaacggctcggccgtgatcgccgcgttcatggccatgggcgtggtcaagctcggcccgaacttcgcccgctgggcggtcaacaaggtggccggcttcttcggtcgctga

SEQ ID NO: 356585 - DNA, 960 bp, Pseudomonas aeruginosa; identical to SEQ ID NO: 356108

SEQ ID NO: 356586 - DNA, 531 bp, Pseudomonas aeruginosa; identical to SEQ ID NO: 352460

SEQ ID NO: 356587 - DNA, 627 bp, Pseudomonas aeruginosa
atgttcggcttcggcaagaaatccgcgcccgcgccatccggcgacagcaagcaagccgccgcccccggcgaggccggccggcagacgccagccagcggcggcagggcgtccgccaacggcgacgtgaagctgccgtcgcgcccttcgccgctggccggcatgagcgagcgcctgctcaagcagaccgaggcgccgccgccggacaccagtgccctgaacagtcaagtcgtgcaggcggtgcagatgagcaacagcgaaaccgccggctatgcgccgtcgcagatcgccatcgcgccgaacatgatgatcagccaggcctccgggctggtggcgcaatccgccgccagctacttcgacggagtcagcaagatcgccctggccagccaggcgatcctgctccggcagatgacccagaacatcgccgaaaacaagctggcccaggctgccgaggacgcgctcggcgcccttgccaccgacctgctgatgggcgctgccgccgcggtagccgcggcggccggggcgatcgaggcggaatcggccagcttcgccatcgacaagatcgaccagagcatcgccaagtacagcgagaccctcgccagtcgcggcggcaaggacacccaatcgtag

SEQ ID NO: 356588 - DNA, 483 bp, Pseudomonas aeruginosa; identical to SEQ ID NO: 352462

SEQ ID NO: 356589 - DNA, 498 bp, Pseudomonas aeruginosa
atgcctcctcaacgaccgattctccgctaccacggcggcaagtggctgctcgccccgtggatcatccagcacctagcgccccaccacacctacatcgagcctttcggaggcgcggcttctgtcctgctgcggaaggcccgcagctacgccgaggtctacaacgacctcgacggggacgtggtgaacctgttccgcgtcgcgcgggaccgtggcgaggaactacgccaggccctggcgcttaccccgcttgcccgtgaagagttcgaagccagctacgcggaaacgacggatccgctcgagcgcgcccggcggatggtggtccgcagcttccagggtttcggcagcgccgcggcgaacggcgaacgcacggggttccgctcaacgtcggcgaggattggtaccacgcccgcgctggactggctcaactaccccgatgcgttggccgccatcaccgagcgcctacaaggcgtggtgatcgagaaccgcgacgcccgctga

SEQ ID NO: 356590 - DNA, 363 bp, Pseudomonas aeruginosa; identical to SEQ ID NO: 352463

SEQ ID NO: 356591 - DNA, 309 bp, Pseudomonas aeruginosa
atggcacgcaaccgcgcgcaacagctgtgcatcgtcaccttggactatcagcgcttcctgttaccccaggctgatgcactcaagctgatagacatcatgagtcgagccgcagaggttcaggccgactacgcctctggagctggattcaagtacaccgtcggcgaagtgccggaagtcgagttgacgatagtacgccccagtcaattggtcatgccgcaggccgagccggccccagctacaccacgcgctcgccggaagtctccggcacaggtcacgcacgatgccattcggctgctggaggggctctga

SEQ ID NO: 356592 - DNA, 282 bp, Pseudomonas aeruginosa
atgtcctctacccagcaccaactgatcgaacagtgcgccacccgcctgcgcagcatcgtcgaagtcctggacaacatccacgacagcaccccgcaccgctggtcgacggacctcgacgaccttcactcttccgccgagagcctgctggctctgatcaatgaccacctcggcggccgcacactgctcgccggcttgcgggccggcgttcggaaatatctgcagctgcttctcggtaatcagcatcggtactctccagtaacgttaatgctctgctatcggtag

SEQ ID NO: 356593 - DNA, 450 bp, Pseudomonas aeruginosa
gtgctcaacggcggcagcctgagccgcgtggctggcgagaacgtcggcgtgtatggcatcaaccagggcggcctgggcctggtcagcgcgaactacgacctgagctaccagggcaataacctgaccatcaccaaggcgctgctgaatgtgatcgccgatgccaagaccaaggtctatggcgatgccgatccgagcctgacctaccaggtcagcggcctgaagaacggcgacagcgccggtgccgtgctcaacggcggcagcctgagccgcgtggctggcgagaatgtcggcgtgtacggcatcaaccagggcggcctgggcctggtcagtgcgaactacgacctgagctaccaaggcaacaacctgaccatcaccaaggcgctgctgaatgtgatcgccgacgccaagaccaaggtctatggcgacgccgatccggcactgacctactag

SEQ ID NO: 356594 - DNA, 207 bp, Pseudomonas aeruginosa
atgttcatctggaggcggcagcaagcctactggaccatccggtataggctcagtaagcgaaacacttttaaatccttcaacgagcttctcagccctagagtactcgcccaaggttttagtgataatttctggaaactcttcaagattaccaaatctcgaaagaagctccagcgtctcttttccgccgaagtcgctaatctgctgtag

SEQ ID NO: 356595 - DNA, 204 bp, Pseudomonas aeruginosa
atgcctgcctacccgtggctggtagagaacaagcttgatggcaaggacaccgccaccaagatggaagtcctgcgcaagctgggcgtgccttacaccgacgaggacatcgccggtgcacgtgaagccgtgaagggcaagaccgagatggacgccctggtggcgttccttcaaggcctgggaacctctatcaagagcaaacggtga

SEQ ID NO: 356596 - DNA, 483 bp, Pseudomonas aeruginosa; identical to SEQ ID NO: 352462

SEQ ID NO: 356597 - DNA, 744 bp, Pseudomonas aeruginosa
atgaagtaccgtccaggaaaggtcgacgtagaggttgggatatctctgcagcaactgctcaagggttggcagcaggaaattcatcttgccctgggttcggtagattcccatgctcgttcctgcatgcgcccaaatgaaacgaacacccgggttctcacgcagtgcttcctcgagttccccaaggtagaggggatagcgctcccgcttggaggtgatgttggagtgaagcaggacgggcaagtcaaactcagcggccaccctatacaccctagccagcgccttgctattcgcccgcggggctttaccgtagatcagtgccgtcaggtaatcatggcgagtaaacacttctccaatcccctgccacaaaccagggtcgagttccagcaggcgccggatctgggtatcggcattcatgtcattggggttgaaccccgatatgaaggggtgaaagcgcaattgctcttgcgccggcaactgcttgtaggcatcggcgatcagcgtatcggtggcgctgtaccagtaagctcttgcatcgtccccggcatagtaacgggggcgtttgggctcatcctcatcccactccttggcgaccgagatgcccgagagcatggcatgatcaatctttgcctcagccttctcctcaagcaatggcttggtgccggcactcgactgaaagaaatccacgtagtgcaaatgagtgtcgctatatcggaaatcattggcttcagcactgatcgccaataa

SEQ ID NO: 356598 - DNA, 987 bp, Pseudomonas aeruginosa
atgctcccagtcaagaacctcttcgtgctctacaccggcggtaccatcggcatgttgcagaccccgcagggcctggccccggccggcggcttcgaagcgcgcatgcgcgaccacctgcaaagcctcggcgacgccccggacctgcgctggcgcttcgccgaactgcaaccgccgctggacagcgccaacatgacccagggcaactggttggcgatgcgcgacgccatcgtcgccgcgctcgacgccggccacgacggcgtgctgctcctgcacggcaccgacaccctggcctacagcgcagcggcgctgtccttcctgctcctcgacctgccgatcccggtgctgctgaccggctccatgctgccggccggcgcgccgggcagcgatgcctgggacaacctggtcggcgccctgcgcgtcctccaggagggccacgcgcgcggcgtacaggtctatttcaacgatgccctgctgcacggcgcgcgggtcagcaagctgcgcagcgatgcgttcgacgccttcgccgaactgccgcgaccgcgccacgccgagcatgcgccggtgcccgcggcgctcggctaccgccagccgcgccgggaagtgaacctcgccgtgctgccgctctatccagggctgcgcgccgcgcacctgcgcgggctgctcgacagcggcgtggaagcgctgctgctggaatgctatggcagcggcaccggcccgtccgacgacgaggagctgctggcgaccctgcgcgaagcccacgcccgcggcgtgctgctcgccgcggtcagccagtgcgcctacggccaggtcgagttcggcgtctacgccgccggcagccgcctgcgcgacgccggcctgctctcggctggcggaatgacccgcgaggcggccctgggcaagctcttcggcctgctcggcgccggcctcggacgcgacgaagcgcaacgctggttcgccctcgacctgtgcggcgagaacgccgactga

SEQ ID NO: 356599 - DNA, 435 bp, Pseudomonas aeruginosa
atgcgctgcgccctggtcattcccacgcgcaacgccggcgcgcacctggaccggctgctgccggccctggccgcgcaacggcggcagccggacagcattctggtggtggacagccgctccagcgacgacacggtggagcgcttccgcgccttcggcgcgcgggtcgaggtcatcgagccggccagcttcaaccacggcgggacgcggcgctgggccagtcagcaggtcgaggccgacgcgctgatctacctgacccaggacgccattcccgcctcgcccgacagtttcgccaacctgctcgacgaactctatgccgaggccgacatcggcgtggcctacggccgccagttgccgcaccccggcgccggcctgctcggcgcccaggcggcggcgcttcaactacccgccggaaagccgcagcaagcgcctggctga

SEQ ID NO: 356600 - DNA, 627 bp, Pseudomonas aeruginosa
atgcccaagcctcggaaaggcgtcactaggcggcgcgggcctcgttccatgctccaccggcaataccagcggcagcagccgtgcggtattgcgggcatcctccagggcgcggtgctgctggccctggaaactcatcccggccagttgcagggccgcgttcaggccgaccgggcggggcagctggcggacttcgccgaagcgttgcttgagattgacgtgcggcacttcgctgagctggctggtcagcccgtgctggcgccattcctgctccagctggcggcggtcgtagtcgccccagctggcccagccggccagtcgcggacgatgctgggcgagccagcgctcgaaggcttcccagaccgtgtcgagatgggcggcgccatcgacgttggcctggctgatatgcgtgaggtcgcggcagaagtgggtcagcagaggccgcctgaccggtcgtacgaaacgctggaagtggtccagttcgcgggcgtccgcggcggcgaccagggtggcgccgatctcgatgatttccatttcctccaggggccagccgccttccgcggtagtggcctccagatcgattaccagccagtgaggcatcggagctatccataccagggtccgcgctga

SEQ ID NO: 356601 - DNA, 450 bp, Pseudomonas aeruginosa
atgattgctcgatgcacggtcgaccagtgcttgtatggccatacgatccagcgtgacattgccactcagctcgatgaagtcaatgccccagtcatagggtgttccacttaccgattgttctgccgcgaagtgtcccttgacgatgacaggttccacctcgccgtccactcgcaggatcaggtcatcaccctgacgcagtacaatcagttgctcttcccgtacatcgtcggcgaacaccaggcgattggccgaccccttccggtcgtaatcgataatcgtgtcacgcccagtcccgcgatagaggcggtagatgtcatctcccctacctccttccagagtgtcattgcccagaccgccaagcagggtatcgtcgttatcctttccggcaagatgatcggcgacatcgctgccttccaggtacaagacctgatcccgccaggcatcagatag

SEQ ID NO: 356602 - DNA, 912 bp, Pseudomonas aeruginosa
gtggccttccgtgccctgttgcacgcgtcgtttgatttcatcgagtccccaggactttccgccggaaaactctatgcgctcgacttggtaaccagaggtagcgtcttcttcgaagaaatgttcgatggtgacggcatcttcctgaccaacctgaatcagaaggttgtcgtcggagcgggagagcgaaacatcctcgcgagcgatgtcgaggaacctgacaacatcctgcttgccctcagtgtaatttccgttggcgatcgtatcccggccgaaaccgcgggcgaattcatagacattgcttcccgtaccaccgacaagggagtcgttgccggtgccgccgatcagtacgtcgtcaccgtcgccgccgaagagccggtcatcgccctcgccaccttcgagacgatccgccccgccaccgccatagagctggtcatcctcagcgccaccgcgaagatggtcgtcgctgtcatatccatggagaacgtctcggccgtcggtgccttgcgtcacttcgcgcctgatcgcctcgatgtcccattccgttccgtcctccaggcgaacccattcgacggcactgctggtgcgtgcatcatcggcaaaatagcgggttactgtcagcacgtcctcgccaccggaaatgacgatctgcaaatcaataccgacacgacgaaactggacttgcgaggcttgcaacgtacctcccagcaggatcgtatcggcagcggttcccggtgcatccgtatctgcgttgtcgatggtgtccctgccatatccgccggcaaagacataggtgtccgcaccgttccctccacgcaaaagatcattcccgccacgaccatccaggcgatcactccccacgccaccatcgagcgtatcgtgaccggtgctccccaggatcgtatcgtcgagtaa

SEQ ID NO: 356603 - DNA, 186 bp, Pseudomonas aeruginosa
atggtcgaaaggccggagaacatcctcgcccctgcgctccagatctatcctgatccgatcatttccgctgccgtaggcgatgaagagattccccttgagggcatcgcccggtgtcgcaaccagacgcaggctcgtcgcttcgatgtctgtgccgaagcgcgccacgttttcctggcgcgcgggtaa

SEQ ID NO: 356604 - DNA, 795 bp, Pseudomonas aeruginosa
atggccgcccgcgcccagacggctgagtgcggcatcgccccacagaatgtcggccccttccccgcccagcagggtgtcgttgccgccaccgccctcgagcaggtcattaccctgaccgccatcaaggaagtcattccctctcagggctgccggagtcgctcctttcgtcgcctcatcccagttgctgctgtctccgtacagtgtgtcgttgcccgatccgcctaccgcgaaatcgttgccaccctgtccttcgatccggtcatgccccgttcctccgtagagagtgtcgctcccatgtcgttccagcggggtataagaaaagaacttgctatccaagacgccatctccataaaggaggtcgtcgccgtcgtcgccgaacagcagatcgttgccgcccatgccttggatatcgtcgttgtcctcgttgccgtgggcaatgtcgtcgccagtgccggcctcgatatgatcctttcccttgcccccctccagaatgttccgctcatcctgcagagcgatcagcatctcgctgctctggtctcctccattgtctccggtgactgtgatactgctgccgttccggtagatgacccagttgaatccacgcgccagttcggggccttgcgcctctggcggcagaaagtcggtccgactcacggtgatcaagtgtccggccagactgccaaacagatagtccgctccatcgccgccgatcaggtgatcttcgcccttcccgccccacagcatgtcatcgccctggccgccgtcgagcgtatcgtcgccttccccgcccagtag

SEQ ID NO: 356605 - DNA, 1317 bp, Pseudomonas aeruginosa
gtgaagttccacagcaccgactacttcaagccgacccgcgaattcaacgccgacgatgtgctgttcaccttccagcgcatgctcgacaagaatcatccgttccgcaaggcctaccccaccgagtttccctacttcaccgacatgggcctggacaagaacatcgccaggatcgagaagctcgacgagcacacggtgaaattcaccctcaacgaggtcgacgcggccttcatccagaacctggcgatgcccttcccatcgatccagtccgccgaatacgccgcgcaactgctcaagcagggcaaggccagcgatatcaaccagaagccgatcggtaccggcccgttcgtgttcagccgctaccagaaggatgcgcagatccgtttcaagggcaacaaggactactggaagccggacgaggtgaaggtcgacaacctgatcttcgccatcaacaccgacgcctcggtgcgcgcgcagaagctcaaggccggcgagtgccagatcaccctcaacccacgccccgccgatctcaaggccctgcaggaagcggcgaacctgaaggtgccctcgcagccaggcttcaacctcggctacatcgcctacaacgtcacccacaagccgttcgacaagctggaagtacgccaggcgctggacatggcggtgaacaagaaggccatcatcgacgccgtctaccagggcgccggccagttggcgagcaacggcatgccgccgacccagtggtcctacgacgagaccatcaaggacgcgccctacgatccggccaaggccagggagctgctgaagaaggccggcgtcgccgaaggcaccgagatcaccctgtgggccatgccggtacaacgtccctacaaccccaacgccaagctgatggcggaaatgctgcagaacgattgggcgaagatcggtatcaaggcgaagatcgtcacctacgaatggggcgaatacatcaagcgcgccaagggcggcgagcatgacgccatgctgatcggctggagcggcgacaacggcgacccggacaactggctcggcaccctctacggctgcgacgcggtggacggcaacaacttctccaaatggtgcgacgccggctacgacaagctggtcaaggatgccaagcgcaccaccgaccagggcaagcgcaccgagctgtacaagcaggcccagcacatcctcaaggaacaggtgccgatcaccccgatcgcccactccaccgtgtaccagccgatgcgcaagacggtacacgacttcaggatcagccccttcggcctgaactcgttctacgaggtcagcgtcggcaagtag

SEQ ID NO: 356606 - DNA, 843 bp, Pseudomonas aeruginosa
atgacccagccctcgaaacggaatgggcaggttccgctggacgacgccctggagcgccatcgcgacgcgctgaaggacctgttcccgctgccgccctcccggccgaaatcgcgcaaggcaagcaaggcggccggcgtcgcgctattgctggcgctggccatcggcgccctggcctggctggacccggcctacaagcgcgagcgcttcgccaccgccatcggtgagcggcgcgacgtgaccctggccgacggcagccagctcctgctcgacagcggcagccagatcgaggtcagttggcacccgctcagccgccgggtcgtgttgcgcgcggggcaggtgcttttcgaggtatccccggcgcgctatcggcccttcgtggtgtccgcggggtcgaccgacgtccgcgtgctcggcacccggttcaacgtgcgccgcctggacgacgacgtccgcgtgaccctggagcgcggacgggtggaggtcggcacctcggctacggcgcaagcgccagtcgtgctcctgccgggccagcaggtcgatgccattggcgggcaactgatgccgctggccaaggtcgatgccgccacggcgatggtctggaaagacgaccgcctggtcttcgagcgcacgcccctggacgaagccgtcgcgctgctgcgccattaccgcaaggcgcccattctcatggacgaccccagcctggcctccctccggctgaccggcgtcttcgccgcgcacaacgccgaccggctgctcgacctgctgccgagcatccttcccgtcgccgtgtcgcggcaggaggacggcagcgtcgagatccaacgcaaatcgacgcgaaaataa

SEQ ID NO: 356607 - DNA, 363 bp, Pseudomonas aeruginosa; identical to SEQ ID NO: 352463

SEQ ID NO: 356608 - DNA, 498 bp, Pseudomonas aeruginosa; identical to SEQ ID NO: 356589

SEQ ID NO: 356609 - DNA, 789 bp, Pseudomonas aeruginosa
gtgatcgccgatgccaagaccaaggtctatggcgacgccgatccggcactgacctaccaggtttccgggctgaagaacggcgataccgccggtgccgtgctcaacggcggcagcctgagtcgcgtggctggcgagaacgtgggtgtgtatggcatcaaccagggcggcctgggcctggtcagcgcgaactacgacctgagctaccagggcaataacctgaccatcaccaaggcgctgctgaatgtgatcgccgatgccaagaccaaggtctatggcgacgccgatccggcactgacctaccaggtttccgggctgaagaacggcgataccgccggtgccgtgctcaacggcggcagcctgagccgcgtggctggcgagaacgtcggcgtgtatggcatcaaccagggcggcctgggcctggtcagcgcgaactacgacctgagctaccagggcaataacctgaccatcaccaaggcgctgctgaatgtgatcgccgatgccaagaccaaggtctatggcgatgccgatccgagcctgacctaccaggtcagcggcctgaagaacggcgacagcgccggtgccgtgctcaacggcggcagcctgagccgcgtggctggcgagaatgtcggcgtgtacggcatcaaccagggcggcctgggcctggtcagtgcgaactacgacctgagctaccaaggcaacaacctgaccatcaccaaggcgctgctgaatgtgatcgccgacgccaagaccaaggtctatggcgacgccgatccggcactgacctactag

SEQ ID NO: 356610 - DNA, 363 bp, Pseudomonas aeruginosa; identical to SEQ ID NO: 352463

SEQ ID NO: 356611 - DNA, 483 bp, Pseudomonas aeruginosa; identical to SEQ ID NO: 352462

SEQ ID NO: 356612 - DNA, 9669 bp, Pseudomonas aeruginosa
ttgcgcatcgagctgggcgagatcgaggcgcgcctgctggagcatccgtgggtgcgcgaggcggcggtgctggcggtggacggcaggcagttggtcggctacgtggtgctggagagcgagagcggcgactggcgcgaagtgctggccgcgcacttggcgacaagcctgccggaatacatggtgccggcgcagtggctggcgctggagcggatgccgctgagtccgaacggcaagctggatcgcaaggcgctaccggcgcctgaagtaagcgtggcgcaggcaggctacagcgcaccgcgcaacgcagtggagcgaaccctggcggaaatctggcaggacctgctgggcgtcgagcgggtcggcctggacgacaacttcttcagcctcggcggcgactcgatcgtctcgatccaggtggtcagtcgagcgcgccaggccggattgcaactgagcccgcgtgacctgttccagcaccagaacatccgcagcctggccctggcggccaaggcgggtgcggcgacgacggaacaggggccggcaagcggcgaggtggcgctggcgccggtacagcgctggttcttcgagcgggcgattcccaaccgccagcactggaaccagtctctcttgttgcaggcgcgccagccgctcgacggcgaccggctggggcgtgccctggaacgcctgcaggcgcagcacgatgccctgcgcctgcgtttccgcgaagagcgcggcgcctggcaccaggcctacgccgagcaggccggcgagccgctgtggcgccggcaggcggggtccgaggaggcgttgctggcgctttgcgaagaagcccagcgcagcctcgacctcgaacaggggccgctgctgcgtgcgctgctggtggacatggccgacggcagccagcgcctgctgctggtcatccaccacctggcggtggacggggtgtcctggcgcatcctgctggaagacctgcagcgtctctatgccgacctcgacgccgatctcgggccgcgtagcagttcctaccaggcctggagccggcacctgcacgaacaggccggcgcgcgcctggacgaactcgactactggcaggcgcaactgcacgacgctccgcatgcgctgccatgcgaaaacccgcacggcgccttggaaaaccgccatgagcgcaagctcgtcctgactctggacgccgagcgtacccggcagttgctgcaggaagccccggcggcctaccggacccaggtcaatgacctgctgctgaccgccctggcccgcgcgacctgccgctggagcggcgacgccagcgtgctggtgcagctcgaagggcacggccgcgaggacctcggcgaggccatcgacctgagccgcacggtgggctggttcaccagcctgttcccgctgcgcctgaccccggccgcggacctcggcgagtcgctgaaggcgatcaaggagcaactgcgcggcgtgccggacaagggcgtcggctacggcctgctgcgctacctggctggagaggaggctgcggcccgcctggccgcgctgccgcagccgcggatcaccttcaattacctgggccggttcgaccgtcagttcgatggagcggcgctgctggtaccggccacggaaagcgccggcgccgcccaggatccgtgcgccccgctggccaactggttgagcatcgaaggccaggtctacggtggcgagctgagcctgcactggagcttcagccgggaaatgttcgccgaggcgaccgtccagcgcctggtcgatgactacgcgcgggagctgcacgtgctgatcgagcattgctgccaggagggcaacgtcggtgccacgccgtcggacttccccctcgcgacgttgcgccaggagcagttggatcgcctgcctctggcgctgatcgaggacatctacccgctgtcgccgatgcagcacggcatgctgttccactcgctctacgagcaggcttccggcgattacctgaaccagctccgggtcgacgtccatggactcgatcccgcgcgcttccgcgccgcctggcaggcggcgctggacagtcatgacatcctgcgcgccggtttcctctggcagggcgacctggagcagccgctccaggtgatccacaaacacctcgaactgccgttcgccgagcatgactggcgtggtcgcgaagcgctcgccgaggctctcgacgagctggccgcgagcgaacgccggcggggtttcgagctggagcaggcgcccttgctgcggctggtcctggtgcgtatggacgaagagcgctaccacctggtctacacccaccaccacatcctgctggatggctggagcagcgcgcagctgctcggcgaggtgctcgctcgctacaccggcgaacaggccgagcgcacgggtgggcgctaccgcgactacatcgcctggctgcaggcacaggacaagcgcgtcagcgaagcattctggaaagaacaactggcggaactgctggagccgacacgcctggcccaggcggtcgccgccgagcgcgagcaggtcggcagcggccagttccagcgcagcctgccgccggcacgcaccgcgcgcctgaagacgttcgcccagcggcacgcggtgaccctcaataccctggtgcaggccgcctggtcgctactgctgcaacgctacaccgggcaggatacggtggtcttcggcgccaccgtcgccggccgtcccgccgaactggccggaatcgaaaggcagatcggcctgttcatcaataccctgccggtggtcgccacgccgcaaccgggcatgcgcctcaccgactggctgcaggaggtgcaggcgcgcagcctggcgctgcgcgagcaggagcacacgccgctgttcgagatccagcgttgggccgggctcggcgaggcgctgttcgacagcctgctggtattcgagaactaccctgtggccgaagccctggaaaagggctcgccaggcggcgtgcgcttcggcccggtgagcaatcatgaacagaccaactacccgctgaccgtcgccctgggcgtcggcgacagtctgtcgctgcaatacagctatgaccgccaggcgttttccgatgccgcggtcgagcagttggaccggcacctgctgaacttgctcgaaggcttcgtcgacaacgccgaacggacgctggtcgagctgagcctgctggatgccgaggagcgcgcgctgatcgattcgctgtggaaccgcagcgagtcgggcttccccgcttcgccgctgatccaccagcgggtggcggagcgcgcgcgcctggccccggacgcgccggcggtgctgttcgacgaccaggtgctgagcttcgccgagctggacagccgggccaatcgcctggcacacgcgctgatcgcccgcggcgtcggtcccgaggtgcgggtggcgatcgccatgcagcgcagtgcggaaatcatgattgccttcctcgccgtgctgaagtccggcggcgcctacgtgcccctggacatcgagtacccacgcgaacgtctgctgtacatgatgcaggacagccgcgcgcacctgctgctgacccagagccacctgctcgaccgactgccgattcccgacgggctgtcctgcctgtgcctggaccgcgaacaggagtgggccggtttccccgcccatgatccagaggtggcgctgcatggcgacaacctggcctatgtgatctacacctccggctccaccggcatgcccaagggcgtggcagtgtcccacggcccgctggccgcgcatatcgtggctaccggcgagcgctacgagatgaccccggcggactgcgagctgcacttcatgtcgttcgccttcgacggctcccatgaaggctggatgcacccgttgatcaacggtgcgcgggtgctgatccgcgacgacagcctgtggctgccggagcagacctacgcgcagatgcatcgccacggcgtcaccgtcgcggtgttcccgccggtctatctgcagcaactggccgagcacgccgagcgcgacggcaacccgccggcggcccgggtctactgcttcggcggcgacgcggtggcgcaggccagctacgacctggcctggcgcgcgctacgcccgcaatacctgttcaacggctacggaccgaccgaaacggtggtcaccccgctgctctggaaagcccgcccggacgacccctgtggcgccgcctacatgccgataggtacgctgctgggcaatcgcagcggctacatcctcgatgcccagttgaacctgctgccggtcggcgtggccggtgagctgtaccttggcggggaaggcgtggcgcgcggttacctggagcgtccggcactgaccgccgaacgtttcgtgccggatcccttcggcgcgcccggcagccgcctgtatcgcagcggtgacctgacccgtgggcgtgcggatggcgtggtggactacctgggacgggtagaccaccaggtgaagatccgcggtttccgtatcgaactgggcgagatcgaggcacgcctgcgcgagcaggcggcggtgcgcgaggcggtggtggtcgcccaggcgggtgccagcggccagcaactggtcggctacgtggtcccgcaggatccggcgctggccgaggacgtcggcgcccaggcggcctgccgcgacgccttgcgcaaggcgctgaaggaacgcttgcccgagtatatgttgccggcgcacctgctgttcctggcgtgcatgccgctgacccccaacggcaagctggatcgcaagggcctgcccaagccaagcgccgatcagcagcaacgcgactaccaggcaccgcgcagcgaagtggaaagacaactggcgacgatctgggcggaggtgctgaagctggagcaggtcggcctggccgacaacttcttcgagatcggcggcgattccatcatttccctgcaagtggtcagccgtgcgcgccagctcggcatccatttcactccgaagatgctcttcgaggcgcagaccatcggtgccctggctccgctggccgagagcggtacgcaggtgctggctatcgaccagggaccggtgaccggcgtcacgccgttgctgccgatccagcagggtttcttcgccgaagaggtcgccgagcgccactggtggaaccagtcggtgctcctggaagcccgcgagccgctcgatgcccgactccttgagcaggccctgcggggcgtgctggcgcaccatgatgcgctgcgcctgtccttcacccgcgaggcggccggctggacggcgcgccaccggggtgtggaagagggcgctgcggcgctgctccgtgtcgctcgggtcgccgacctggcggcgctgcgggcgctggccgacgaagtccagcgcagtctcgacctggccgatgggccgttgttgcgcgccctgctggcgaccttcgacgacggcagccagcgcctgctgctggttatccaccacctggtggtggatggcgtgtcctggcgtattctcttcgaagacctgcagaccgcctaccggcagttgctggcgggtcaggccgtcgagctaccggccaagaccagcgccttcagggattgggccgagcgcctgcaggcgtttgccggtgacggcggcctggatggcgaactggcgtactggcaagggcaattgcaaggcgcctccagcgacctgccgtgcctcgacccgcagggcgaccagagcaaccgccatgcccgttcggtcagttgcggactggacgccgaggcgacccggcaattgctgcaggaagcgccggccgcctaccgcacccaggtcaacgacctgctgttgaccgcgctggcgcgggtgatctgccgctggaccgggcaggtcgatgcgttgatccagttggaagggcatggccgcgaagaactcttcgccgagatcgacctgacgcgcacggtgggctggttcaccagcctgttcccgctacgcctgacgccggccgagggcatcgccgcatcgatcaagggcatcaaggagcaactgcgcgcggtgccgaacaagggcatcggcttcggcgccctgcgctacctgggcagcgcggcgagccaggcagccctggccgggttgccggtgccgcgcatcaccttcaactacctcggccagttcgacggcagcttcgccatggaggagggcgcattgttcgctccggccggcgagcgtgccggcgacgaccagagcccggacgcgccgctggccaattggctggcgctgaacggacgcatctatggcggcgaactacgcatcgactggagcttcagcggcgagtgcttcgaaatcgccagcatccagcgcctggccgacgcctatcgcgacgaactgctggcgctgatcgcccactgccgcgtggccgagggccagggtctgacgccctcggacttcccgctggcgcgccttgaccaggcgcgtctcgaccagttgccgctggcgccctgcgaagtcgaggacctctacccgctatcgccgatgcagcagggcatgctgttccacagtctgtaccagcaggaggccggcgattacatcaatcaactgcgggtcgacatcgacggtctgcatccggagagcttccgcgcggcctggcaggcggcgttggacgagcacgatgtgttgcgcagcgggttcctctggcagggcgccttcgagacgccgctacaggtggtgcgcaagcgtgtcgaagtgccgttcagcgtacttgactggcgcggtcgcgaggacctggcggcggccctcgacgagctggccgccggcgaaggccgactgggcttcgacctgagcgaggcgccgctgctgcgcctggtgctggtgcgcacggacgaagagcgctaccacctgatctacaccaatcaccatatcctgatggacggctggagcaactcgcagctgctcggcgaggtactgcagcgctaccgtggcgaaacgccgccgcgctccggcggccgctatcgcgactacatcgcctggttgcagcgccaggacgccgcgctcgccgaggccttctggctgccgcgcctgcgccaactggacgagccgacccgcctggggcagtcgatcgcccaggccaagcagcgcggcaagggctacgcggaacggttgcgcgagctcgatggcgagcagacccggcgcctggccgagctggcccgcgagcagaagatcaccgtcaataccctggtccaggccgcctggctgatgttgctgcaacgctataccggacaggacagcgtggccttcggcgctactgtcgccggtcgcccggcggaactgaacggtatcgaggagcagatcggcctgttcatcaataccctgccggtcatcgctagcccgcttccgcagcagagcctggcgtcctggctgcaggcggtgcagggcgagaacctggccctgcgcgaattcgaacacacgccgctgtacgacatccagcgctgggccgggcagggcggcgaggcgctgttcgacaatatcctggtgttcgagaactaccccgtttcgcagatgctccagcagcaggcctcgcaaggcctggctttcggtgccgtgggcaaccacgagcagaccaactacccgttgaccctcagcgtaagcctggggcagcgcctggaactgcagttcgcctacgaccgcgagcatttcgacgacgccagcgtggcgcgcctggatcgtcacctgacgcacctgctggcgcagatggtcgagcgtccggccagcacctgtctggccgagttccagctgctggaagcagcggagcggcgccaggcgatcttcgactgggggcgcaacccgggacgctatccggacgagcgcagcgtcgagcagctgttcgccagccgcgcggcgatggagcccgagcgggtggcattgctcttcgaggagcgccagctgagctacggcgagctcaacgcccaggccaaccgcctggcccaccgcctgatcgagctgggcgtcgggcctgacgtgctggttgggatcgccgtcgagcgcgggctggaaatgatcgtcagcctgctggcggtgctcaaggccggcggcgcctacgtaccgctggacccggaatatccgcaggagcgcctcggctacatgatcgaggacagcggcatcgccctgttgctcagccagagccacctgctgcaacgcctgccagcggcctccgggatcgcctgcctggcactcgaccaggcgcgggactggcaggaccgtccggcgagcgacccgcagttgcgggcgcatccgcagaacctcgcctacgtgatgttcacctccggttccaccggccgtcccaagggcgtcggcatcagccgagagagcctgtcgcggcatacccacgtttcgctggagttcttcggcatcgggccggacgaccgggtgctgcaattctccaccttcaatttcgacggcttcgtcgagcagctctacccaccgctcgcctgtggcgcctcggtggtgctgcgcggcaccgagatctgggacagcgagacgctgtaccgggagatcgtcgagcgacgcatcaccacggtggacctgactaccgcctactggaacatgctggccaaggacttcgccaaccagggcgtgcgcgactacggcgcgctccgtcaggtccacgccgggggcgaggcgatgccgccggaaagcctggtggcatggaaggccgccgggctggagcatgtgcgcctgctcaacacctacggccccaccgaggcgaccgtcacggtcaccactctggattgcgcgccctacgtcgacggcagcaaggcgatcccggcgaccatgccgatcggcaaggtgctgcccggccgcgccatctatctgctggacgatgccgggcaaccggcgccggtcggggcggtcggcgagctggtgatcggcgccgagctgctggcacgtggctatttcaagcgtcccgacctgacggccgcacgcttcattcccgatccgttcgacgagcagggcggcggccgcctgtaccgcaccggcgatctggcacgctacggcgccgacggggtgatcgagtacgtcggccgggtcgaccatcaagtcaaggtccgtggcttccgcatcgaactgggcgagatcgaggcctgcctcggcgagcacccggcggtgcgcgaggccctggtcatcgccatcgagggcactgccggggcgcagctggtggcctatctggtgccgcaagcggaagcgctggctagcgccacgctggaggtacaggccgcgctgcgcaacgagctgaaggccctgctgcgcgacagcctccccgaatacatggtgccggcgcacctgctgttcctcgaacgcctgccgctgagccccaacggcaaggtcgaccgcaaggctctgccggcgcccgacgccagtctccttcaggaggcctacgtggcgccgcgcagcgagctggaatgccaggtcgcggcgatctggcaggaggtgctgaaactccagcgggttggcctcgacgaccatttcttcgaactcggcgggcactcgctgctggccatcaacgtgatttcgcgcattcaactggagctgggcatgaagctcaccccccaactgttgttccaattcccgaccctggggcttttcgtcagcaatctggaaaaggccggtgggcaggtcgacacatcgaaactgaacaagctggaagccctgcttgatgaaatggaggaagtttga

SEQ ID NO: 356613 - DNA, 156 bp, Pseudomonas aeruginosa
atgggcatatatacctatacccgcattctcaatcgaccaatcagagcctggcaaattaacaaatctaatccaatactttaccggcttcttaatgccatttacatccacctcgtcagtgagtggattattccaatcgccaaaaccaaagtcatgtag

SEQ ID NO: 356614 - DNA, 576 bp, Pseudomonas aeruginosa
atggcactcatcggctatgcgcgggtatcgacggcggaacaggacaccgccttgcagacggatgcgctgcgcaatgcaggctgcgaacgggttttcgaggacacggcatccggggccaaggcagaccggcccggcttggccgatgcgctggcttatctgcgcgatggcgatgtgctggtcgtctggcggctggatcggcttggccgctccctgccgcacctgattgagacggtcggcaagctggaagcacggggcgtcggcttccgctcgttgactgaaaacatcgacaccaccacgccgggcggacggctcatcttccatgtgttcggtgcgctgggccagttcgagcgcgacctgatccgcgagcgcaccaaggccgggttgaccgctgccgccgcacgcgggcgcaaaggcggacgcaagccggttgtcactgccgacaagctgcaacgagcgcgggagcttgtcgccaacggcttgaatgtccgcgaggccgccgcacgcctcaaggtaggaaaaaccgctctctacgctgccttgcaggcggccagttctggcagtgcagccgactcctga

SEQ ID NO: 356615 - DNA, 891 bp, Pseudomonas aeruginosa
atgatgctccagtttcaattcaatgaccgtgttgcactcagctcctgcaaccgccttgcgagaggtgttaaaaccttcattcaaccgaatggcgagccattcccatcgtttggccagatgaagtattgggccgaacaaatgattggaccaaagaatttagcccgcgaactcaatgggaaacacaaggcaagatcccaagcaggttctgcgggaagcttcgcagaacgtttgtcgaatttatgtcagcgggttgagttcgatgggtattacatctctgagaagctgtcaggcattacggaaggaagcgctgtagatggcttttgtgtggtacgggccgtctgcggcctatctggtgctgtagtgggtataggcttcgcagagggtagagaaaccatggaggcctacaagatggcactgttttccatggcgctcgataaggtgaagttttgcgagctattcggactcaacattagctctgaagagtggccctgctatgggctgactggtggagtcattttcgatagggggcctggcgcaacatatggcagtgagcccgagattaattggttgggaagcatcgagcttactccaacattttctgggcaatccaaagctaccgttgaatcatctcacccaagagacaaaaagagcttggaacaaccgacgtatttccatagcaaattgaattttgtgttaatggcaaggcgagagattttacaggttctaactgacaaccaatcttcagatgcgagtggtcggatgactgaagagatgattatcaatagggtgaagccaacacctcacggcatttggaacttcctggatagtcgtggccgcaacagctctatagcaatgccgttcgaagaggctgcgtatttcggcccaccgtga

SEQ ID NO: 356616 - DNA, 663 bp, Pseudomonas aeruginosa
gtgaacgaaagtattggttccaggtttgacgattgcctagacatagaagctattaggcagcgaattacggttaggcctgaccccgttagagacttggctagccaagacgcattggttgctgcacaaatcttgtttgaggctttggagcagatatatctgccaaatgacttctcgctttcctttatcaaggaaatgtctgcaaaagcagcgttgcacagccaatggttattctcaagccaggtggattacatttcgcggttctatactccgcctgatgttgaggttcaaccagtctgcttgacaggtttggctggtgttggaaagagccaaaccattgctgctttacggaaagtactacctgcgcctatcgatttcgcatgcgaccatttccatggaaacctcaagctcatttctcattggtatgtaagtgccagaggtaaagctggtggcagacagttgctggcggactttgtaggtgccgctggaggtaacgctgcgaagctacttgttgactgtcggcgtcgtgcaaacagggatggagtttcgctactgctactggatgagacccagcacataaatacagggcagggtgcctctagggtcacagaaatgctgcttacgatggcggcgattggcccgccgatgatttacgtttccaactag

SEQ ID NO: 356617 - DNA, 453 bp, Pseudomonas aeruginosa
atgaccttcgagataccggaggagatggagtgggcaacttatgatgcctcacgagtctggcagatatccaaagggggggggcataactttaccgccgaggtgaccgccgtaggtgacaacggcagctatgactacgacagtatgattttttacgtttccgaaaaggttgataaaaatgaattccataacgcctcaaactacataaaaggaacagcagaaatataccaagaccatcttagagaaaacataaaactagataagaaagcaataagtacgctccaaaaaaacaagagcgaagagaaaagtattgaacggataaaaaaaggaatcgcagaaatggaggccaagattcctctcgccaagatctacgaacacgatctcggcatccccgactcccatatccttggcagcaagaatatcccggcggcggcaaaaactgagtgcaacacctga

SEQ ID NO: 356618 - DNA, 150 bp, Pseudomonas aeruginosa
atggccggcgcaatggtggatctcatcgaagaccacgaacacccggtagtcatcaagcagctgccagaatccctcatcacggtattccatagcctgataggtataagccgcgcccacggcacctatctggccgtcgagacgcctgcctag

SEQ ID NO: 356619 - DNA, 1062 bp, Pseudomonas aeruginosa
atgccccgcctttccgccctgctgttcctcgccctcgcaccctggctggcccaggccgaggagaccctgcgcgtctacaactggaacgactacatcgacccgcaggtgctcgagtccttccagaaggacaccggcatccgcgtcgagtaccacaccttcgccaccgccgaggaactggacaaggcgctgcgcagtggcgaggcgatcgacgtcgccgtcccctcccacgacaccctgccggccctgctgaaggacaacctgctgcggccgctggacttcacccagctgcccaaccgcagccatctcgaccgtcaattgctgagcaaactggccgcggtcgaccctgacaaccgccacgccgtcccctatctatggggtgccgtaggcctggccatcaataccccgcaggccgaagccgcctatggcgggccgctgcccaacagctggagcctgctgttcgacgccagccagagccagcgcctgaaaagctgcggcatcagcctgctggacgcgccggacgaaaccctggcgatcctcctcaactaccagggccgcaacctcggtcgtaccgctccgagccaggtacgccgcgccgccgaggcgctgcacggactgcgaccgaacctgcgctacgtcgacagcgagcgctacatcgccgacctcgaaggcggtcgcctctgcctggccatggcctgggtcggcgacgccctgcgcgcggccaaggcgggccagccggtaagtttcgaggtaccgcaggaaggctcggtgctgttcatcgacaacctggtgatcccggccggcgcccagcatccacgcgaggcgcaccgtttcatcgactacctgatgcaaccgaagatcgccgcacagatcaccgccgccaccctctaccccagcggcaacgccgacgccgccggcttcctcgatcccgccctgcgccagcaacccggcctgtatccggaccgcgacaccagccgccgcctgttcgccctggaaacgccgccggaaaaactccggccggtggtcgacgagatctggaaggccttccgcggcgccagccactga

SEQ ID NO: 356620 - DNA, 1002 bp, Pseudomonas aeruginosa
atgcgccgatcagaggtcattggtcttaaggtggattgtctttcgtttaagtctgagggttattggcttacttatactgttttcaaaacctccatttcgtcacagggcgacattaaaacaatacctatcccaaaaattgctgctgacgcaattgaagtaataattgaaatagggcgggatgctcgtgcttacggtaatcacgactatctgtttgtcaagataccaaagttaagttttggaaacactccgcagtccactgtggtagagcgagcttgcaatcgagtggcaaacaacctgggtattgattatagagtacacccacatcgttttcggaagtcacttgccctttatataattcatcaagattcgcggaatcttgaaattattaaacgcctcttttctcaccgcagcttaaaaatgacgttaaggtacatcctttctttaccaggcatgaacgatgaagtcaaagctacgttgattgaagaaaatacggaaattctcgtcgaggttttgcaaggtgtaatttctggtcaaattgggggcattggcggcaaaaggttggccaagactgctaattcgtctccaatactcagggctaaattgcaaaacgcgggaaaagagagtttaagtcagtatgtcgcctctttgcttgatgaaggtgtgaagcttctgcatagaacgaatcttgcaatctgtatgcgaacgccgggtctttccagcgagtcaccttgtgatgctaagaatgatagccctgggtcgaggcttcatccaaacttgtttgcgtgtgacccatataattgtagatatgctgcatttgtcgaggccaatgttccatcattaaaaaatgagataattttccacgataatatgattaagcataggtactgtggagcgactcagaaggaatattcgcagaggcgtatcgctgaagcctttaagcgacttcacgaggttgtaggggatgaagcacataatttcctaaagcaggtagcgcatggctaa

SEQ ID NO: 356621 - DNA, 1239 bp, Pseudomonas aeruginosa
atggctagcatacgcctgaccgcgacggcggttgaaaagctgaacccgcccgctacgggccgcaaggatgtctatgatgcagaggtgcccgggctggtcctgcgcctctcgtcctccggcgtcaaaagctggagcttcacctaccgcgtagagggtaagccccgtcggctgacgctgggggccttccccggcgtgtcgttgaagctggcaagggaccgcgcccgagatgcccgcgccgccgtccagcgcggcgaagacccggtagaggacaagaaggccgaggaacgggagaagcagctaaacggctttgccgcctgcgcccgcgactacgtggagaagtacgccaagcgccgccaacggacatgggcagagactgagcgcgtcatggagaagctggcaatccccgcatggggcgacaagccggtgaaggagatacggcggcgggatgtggtcgagctactggaccgcgttgcagtcaagaccccgcatcaagcaaaccgcctccgggcctacctgtcgcgcatgttcaagtggctgattgagcgcgaggtgctggaggtcagcccggtcatgggggtagcccctcgcatcaagccgtatgcccgtagccgcatcctctccgatgctgaactggtcgccttgtggaaggctaccgagcgggtcggcggcaccttcggcgcttgcgtccgttacctgatgaccacaggggttcgccgggacgaggcctcctgccttcgctgggacgagctggacgggccttgggcggctatgcccgcctcgcgcatgaagggcggtcgggacttccgcgccccgctgtcctcgacggcgctggccattgtggaggcgatgccccgcttcgagaagtgcccctacgtcttcacgaccaatggccgcagcccgatttccggctggagcaagacaaaggagaagctggacaagtacatgggcgaggaactcggggagccggtcgccgattggcggctgcatgacctccggcgcagcctcgccagcggtctagccgggctgggcgtccggtcggagatcatcaagcgggtgctgggccatgccgccaactcgaacgacgtgacggcggttcattacaactggcactcctacgatgccgaagctatggcggcggtgcaggcatgggcagaccatatcgccaagctgctgaacccgaaggcggcagacgacgaggccagccccgccgaggaacccgcagaactggcggcggcttga

SEQ ID NO: 356622 - DNA, 897 bp, Pseudomonas aeruginosa
  misc_feature (856)..(865): n is a, c, g, or t
atgatcacattgagcaaggtgacgctaaaaaacttcaagatctacggaggtgagcctttcacggtcaacttcgaaaacaatcgcttggttctgctggacggcccgaatgggtatggaaaaacaacagtattcgacgccattgaactggccattactggtagccttcgcaggctgattgtgctcgaaagtcggcaaaatcctgctgacattgttgtagcccataatgggcagagcgacgttgagatcaccatcgaatttcttgatgaagacggcgaaagacgaacctttctgcgaaagctcaagcgagacatcgcaaactcagcgaggcgtatcggcaatttttctgctctatgggaaatccatgagattgttaaatctcaagcgaaacctgtggacaacaaggagttcgaccaactcttcaatagcaaggattttgcgcgcgacttcctattatttcattacattgagcaagaagatacgtctcgattcctcaagtcaaataacgaggcacagcgcgctgaaaaactggccaatctatttggggatacttatgagtcagagcaaaaacttcaaaagcttacagatgtaaaaaggaaaatctttacagcgcgacgagacatcaataccaagatagaaaacattcgtagcctgcacaacctggaggccatcaatgatctatctacaggagaaacggagcaacatgtctatgccttgccttggctgacgggcgagaagtcaccgttctgggatcgccccacaattgcccagctcaacgaagatcgcatgaccaaagcgattgctgaactgcaaaaaatatccgccctatttactcatagagacttcttcctgcgctcannnnnnnnnncgctggtatcagcgggcagcacaagagcgtga

SEQ ID NO: 356623 - DNA, 594 bp, Pseudomonas aeruginosa
atgtctgctgcaatcgactgctataacgacctcaagtacctgtcctatcaattcaaagacgatggcatgacgcattgccaacggctcgatcatctttgccgcatgctcggtttcaacaaccgccatcacttcgagcagaagatcgccgaactccctgatgcccagatcggcaagtactcaacgaagctcatgcgacaggcttgtgccagggtcttacccaagcctaacgtggcctactatgagttcatctcccagcgcgaacgccgtatgcgcttttacagcctctgggcaggctgggacaagcgcgggcaggaggttcgtattccgagggggctggatggggctttcgcggttccacgcctgcgtgagcggctggatgcgcctgtgtatgtaattgaaactgatcgccagttggttgcatggcgaagtaagtggcacggcatggcttatgtgcctgcggcacttgctcgggaacatatgaaggaagcttttgcacgtcgtgagtcggtgattaaagggcccaggaatgaagcctatgggctggaggaagatttcaacgataactatgcgacgtggtatccggttggcgagtaa

SEQ ID NO: 356624 - DNA, 174 bp, Pseudomonas aeruginosa
atgtcgaaatccttcctaaccaatgcagagttctgtcagttgctgcgttgcagtgataccaccctctggcgtatgcgccgtgacatcccaggtttcccacagccccaccagtttggccgccgcctgctttggacccaagagcagatcgagcaggccatcgcactaatcctttga

SEQ ID NO: 356625 - DNA, 888 bp, Pseudomonas aeruginosa
atgaccgatccacaaattctttttcgtgaggcactgcaagccgcttttggcccgctggattggctgccgatgccggatggcgccattcaccgctttcacgtccccggcgaccgtaccggctcgcgtaacggctggtacatccttcgtctcgacggcatcccacgcgggacgttcgggagctggaaaactaacagctcaagtacctggagcagccgcaagcctgccgatccgttcgaggttaaagctatcgcccggcgtatcgatcaggacaagcggcggcgtgaggccgagcagcagcgacgtcagcagaacaccgctgtgtccgcagtgcaccagtgggaacgtgccttaccggctgatcctgaccacccctatctggctcgcaagggttgcaagccacacggcctccgtcaatgtggcgaagctcttctgatcccgctgcgcctgcatggtgcgctggtaaacctgcagcgcatcagcgcagaaggggaaaagcgtttcctgtctggtggacgcgtgaaaggcacgtattcagcaatcggcactttggaaccggccgcaccgctatatatctgcgaaggttgggcaaccggcgccaccatccacgagcacaacggcgctgccgtggcctgcgcgatgaatgccggcaacctgctggaagttggccaacgtctgcgccgtacctacccggaaaacccgttgatcgtagccggcgacgatgaccgccagaccaagggcaaccccggacgcaccgccgccaaccgtgccgccgccttgttgggctgtggcgtggtgttcccgccctggtcgggagccgaacccctgaccctttccgattttaacgacctgcgccaatggcgggaggcgaatctatgtccgcagcagtag

SEQ ID NO: 356626 - DNA, 1353 bp, Pseudomonas aeruginosa
atgtccgcagcagtagccgaattgatccccgacgccatgccggcgcccgatcccatcgagggcgcgcttgccaagatcaagcaagaccccggcgccgtgtttgaagcggacgtgctggcgctgctgcgccaggtgcgggaggccgagccggcacgctgggcgcgtattcgtcacgccatcaaggaagcgaagacggtaagccttgccgacctggacaagctgaccagtggcgccagcgaagccgcagccggcaccgatgagctgttccccgaggtgacgctatggcctggccctgtggatggtgaggagctgctggacgacctgaccaccatcattcgccgccatgtaattgccgacacggcaacaatcaatgctgccgcgctttggatcgttttcacttggttcactgacgtagtggacgtggcgcccattgccaacatcaccgcacctgagaagcgctgtggcaagacggtaatgcttggcgtattcgcgcgattggcctgtcgtccgctggcttcgtccaacatatcctcggctgcgttgtttcgcgccttggagctgtgggcgcccaccctcctgattgatgaggtggacaccttcctgaccgagcatggcgaagcccgcggcatcctgaatgccggatttactcgtgatagcgcctttattatccgctgtgtgggtgacaatcacaccccgacccgcttcaacgtatggggcgccaaggcactgtgtggcattggcaagattgccgataccctagccgaccggagtattccgctacgcctgcgccgcaagctgaagggggagcgcactacaaagattcgccacgccgcccccaccacctttgccgagctggtgggcaagctagcgcgcttcgccatcgacaaccgggaggccattcgcacggcaaagcctgctgaggtggaagggctgaatgatcgcgccaatgactgctgggagccgctgttagctgttgccgagatagctgggggtaattggccgagcctggctcgcatcgctgccgcgacgcttcacggcctggaggacgacaccccgagcatcggcgccgaactgctggcatcgatccgcgacgccttcgacaaccggcgcaccgatcgcctgtccaccgctgatctgctggaagccctggccgaggatgaagaagcgccgtgggcagcctggaaccgtggcaagcctatgacgccgcaccaactcgccaagcggctgggtgagttcggcatcaagccggctaccttgcgcatcgattacaggaccgccaaagggtacaagcttgagcaattcgaggagagttttgcgcggtatttgcccgcagccaccgccaaaaatccgtaa

SEQ ID NO: 356627 - DNA, 474 bp, Pseudomonas aeruginosa
atgtctgcgcataacatcgagaggttcaacgaaattactggccaggttctggcctatctctatgtgaactttcccgttccggtagatctctcgccggcttcgattggcatcgatgaagccccggaggggcagtacgagccagtgtcagggcttgttgtcggcagtaagccgaagaccgtggaggagctgttcttcggccacagcgtcgcttggctaatcgccaccggctacctctcggcagagcggctcttcccaggagcatcttttcgcaaagcgatactcaccgccaaagggttagaggtcttgaaagcgacgcccgccagcttgagtagcagctcgttcggtgagcagcttcaaactgctgccaaggatgggatgctcgatacgattaagagcctgaccaacgaagccctcagtcgaggggttggtctggcgaccagtgccgcagtggcttgggctaactcgcagggataa

SEQ ID NO: 356628 - DNA, 309 bp, Pseudomonas aeruginosa
gtgagccttgagacaacgggttacggcacgctgatcctcgtgctactgatggcgctggtcacactggcgacccgctggggtggtgtgtatgtgatgtcttatgtgccgataggctacagggtgcggcagttcatcggtgccatgtccggctctgttctggtggcgattctcgcgcccatggccgtgcagggcgacaacgctgcacggctggcgcttgtcgctacagctgtgaccatgctgctattgaagaagccgttacccgcgattgcgatcggcatcctaactgcggcgatgctcaggcagatttga

SEQ ID NO: 356629 - DNA, 711 bp, Pseudomonas aeruginosa
atggcagacgccgagacgaatctgcatgaactcaatggccggatggtgtgggacggtttccgccagctcattccgctctcggtgttcgtcacgctgtttggtgcggcatttggcctagccgccgtgcaagcaggtctggacgacgtgaccatcgtggcgatgagcactctggtcttcgccggggcctcgcagtttgcagcactggaactgtggggggagcaggtacctataatcacgctcgccatcacggtcttcgccatcaacgctcgccacctgttgatgggagccacgctctatccatggctaagccaacttccgccagggcgccgctacggtgtgatgctgacggcttccgatgccaactgggccatgtccatgcaggcgttcaatcgcggccagccaggttttggcttgctgctgggaggcggtctggcactgtggtcgttctgggtggtcggcacttggttgggcgtctatttcggtggagtcatccaagacccgaagagcttcggcttggatatggtgatgggctgtttcctgttggcgatggtcgccgggggagagaagaatctacgcctgttgttcatctggctgattgccgcagctgcttccctgctggcctggcatttcctgccggagaacagccatgtggtggtaggtgcgctcgctggcggcgtggcgggaacattctggatggagcagagcaagtga

SEQ ID NO: 356630 - DNA, 870 bp, Pseudomonas aeruginosa
atgaactatcaggatcttcagatcgactggctgaaatgctttgtcgccgtggtggatgccggctcgctctcaggcgcagcgcccgaggttcatcgctctcaatccgccgtcagtatgcagctgaaaaaactggaggcagcgctgaattgtcagcttttgaggcgtggccccaggcagcatcagttgacgccacaagggcaactactcctgggctatgcgcggcggatgctcgacctgcatgcagaaactcaggccgcctttcatggccaagagctgaccgggcagattcgtctgggcgttcctgatgattacgccgcccgctatctcacgccggtgctcaagcgtttcgcacagcaccatggcggtgtcgaaatcgaactgaattgcgaacagtcgaccgccttgattcctcgtgtcgagaaaggggaactcgacctcgcactagtgtcacgcgaccatccccggcacggaaccctgctgtttcatgagccgctggtctgggtcggctcggcgcagttccagacatggcggcgcgacccgctgccgattgccgtctacgaaagcaccagcctggccaagcgcagcgccatcaattcgctcgctttgcaggggcgccgatacaaggtggtctacaacagctccagcctggctgggcaactcgctgcggttgaaagcggtttggccattgcggtgctgacccaatgcagtgcgcctgcccacctgaaaaccttgggtgccgagcacgggttggggccgcttgagccgatggaagtggcggtctatcgaagccgggcctctcaagcatcggcggctgtcgacagcctttacagcctgttgatccagacactcagacagtcatccgcaagctag

SEQ ID NO: 356631 - DNA, 801 bp, Pseudomonas aeruginosa
atgactctggatatccgctcgttcttcgatccggtcacctcgaccttcacccatgtagttcatgcgccaggccaggcgcaatgcgccgtagtcgatgcagtgctgggttatgacccggtcacccgcctgaccgatacgcacatggctgatgaggtgaaagcctatattcaggccagggggctgcagctccagtggttactggagacccatgtccatgccgatcacctgtcggccgccagctacctgcgcgccgaacttggcgggcgtatcggcatcagcggccgggtcatggaggtacgctgcacgctcgtcgatcggtacggcccgttccagcagaggccatacgaccacttgtttgccacggacgaaatgttttacatcggtccgctgcggacgcaggcgcttgccgtgccggggcacacgcccgccgatatcgcctacctggtgaataatgaggtcgtgttcgttggcgacacgctttttccaccggacgtcggcacagcgcgttgcgacttcccagggggcagtgccaagacactgtatcgctccatccagcgtctgctgagtttgcccgcgcatgttcagatgatgatgtgccacgactacccgcctcgcgaccgcgcgcccattgtcgagtgcaccgttgctgaacagcgctcgacaaatattcatgcgcgaagtggcatttcagaggccgagtttatcgagatgcgtacccagcgcgaccggacacttccagccccacgccttttggggccatccatgcgtgcgaatctagggggcttgcaaactgatcgttga

SEQ ID NO: 356632 - DNA, 774 bp, Pseudomonas aeruginosa
atgaacatcattgctacgtacagccatcagccctggaacaaaggaaaattagtcggacagaaggcaccgctgcctgagagatatctgggcgatccgagtgagactgtaaatcgccgagagaacccgagatctggcactcttcgatttagccatcgacagcaaactgcgagcctgcgatttaaccaagctccgtgtgcgcgacgttgctcatggcgagcacttgtcatcgcgagccatcgtaatgcagcagaaaactcatcgcccagttcagttgccgaaagcgcggtaaccaaagcgcagcttgcaaatgcagccaaacaggtcgatgccaatagaaagctcgaactgctcgatgcctctcatttcatattgctctgcagactttccgacatgagtgactcgcacctccaggctttactggcgcaggaggctgcggaggggcgcttttcagacgacagcgctcagatcgctcagcatcacgcccgtgcacgtcgaatcaacctgcaccgttatgagcgcaaggatctggctcattggatggagaagcacgtctatctcgctcttggctctctgatctcccgcgcggcggcgctgggcattgacgccgtacccatggagcatttcgatcaggcctcggtcgatgcagcctttcaattgccacaacatgggctgaccggcgtgctcttggtcgcgttgggctatcgcagtcgtgacaacggagacggtcctggaaagtcgcgcttgccggctgagcgaatattcatgtttcgctga

SEQ ID NO: 356633 - DNA, 1257 bp, Pseudomonas aeruginosa
atgttcgcgctgatcgactgcaactcgttctactgctcgtgcgagcgcgtctaccggccctggctggacagcgtgccggtggtggtgctgagcaacaacgacggttgcgtcatcgcgcgtacgcgcgaggccaaacgcctgggcattcccatgggcgccccgtatttccagtggcgcgaccaaatgcgtgaatggggcgtggtgtgcttctcaagcaactacgagctctatggccagatgagcgcccgggtgatgacgacgctcgagggaatgttcccgcgaatcgaggtgtacagcatcgacgaggcgtttgccgacctgacggggataaccggcgacctggtgctgctggcgcatgaagcgcgcgagcgcgtgctgcgctggaccggcataccggtgggcgtgggcatcgggcctacgaagaccttggccaagctcgccaactgggctgcgaagacgtggaggaagtcgggcggggtaatcgacctacgcgaccccgagcggcgggacaaactgctgcaaatgaccgaggtgagcgaagtgtggggcgtcggtcggcggcttactgctcgcctgcgaccgctgggtatccagacggcctgggacctggcgcagtacgactcgccatcgctgcgaaagaaattcagcgtggtgctggagaaaaccgcccgcgagctgcgcggaatctcctgccttgagctggaggaggcggtaccgccccggcagatgatctgctcctcgaaaatgttcggcagccgcctgcgcgacatcgcaccgatccgtgaagcggtggtggcgtacgtcaccaaggccgccgaaaagctacgatcacagcaaagtctggccggcgccatgcaggtggcaatccgcaccggcatgcacaaccccaaccagccgcgctacgccaacgccatcaactgcccattgccatacccgacagacgatacgcgtgtgctcgcggctgcggctgttcgcgggcttgaggccatcttccgccagggctacgcctatagcaaagccgaggtgctgctgatggatctgcggcagcgaggcgaattcacgggtgacctgttcgccgccgcggcgcgacctggtgccgataggctgatggccgttgtcgaccagatcaacgcgcgtgaggggaggggtacggtacggctaggacgcatcccggccaatgcggagtggtcgatgaagcgggagatgatgagccagcggtatacgacgaggtgggatgagttgatggtggtgcggtga

SEQ ID NO: 356634 - DNA, 426 bp, Pseudomonas aeruginosa
atgcgcgccactattctcggccagctcggcccgacgtcaacattcctgcagtacgtcgatacccgcgtgcccgcgggtttcccctcacccgccgccgactatgaggaggtcacgctatccatcgatgagctgatcgatctccgaacgccgcacgtctacctggtacgggtcgagggcccgagcatgatcggcgctggcatctatgatggtgacgtgctggtggtcaacaaggcactggaggcgcgctcaggccacatcgtggtcgcatacgtcgacggaggaatgacagtgaagcggctccagatcacgccggccggggtctggctgcagcccgaaaacccggactaccgcgccattcctgtcaccgagtccctgcatgtgtggggtgtggctactcacaatctgcatcaattatgttcgcgctga

SEQ ID NO: 356635 - DNA, 693 bp, Pseudomonas aeruginosa
atgtgtggtcgattcgcgcagtatcgaacagcagtcgagtacctggatgcgctgcgctatgacaagcccatcgagggcgggatcaaccctgagccgatcaaccggtacaacatcgcgccgcgttcacgcgtgatgatcttctacgagaccgatacaggcctgcgcatggcccgcttgccttggggataccagcctttctgggcagcgggtaaacgcccgcccgcgatcaatgcgcgggtggagacggcagcgacaagccggttcttccgcgatatctgggccacgggccgaacgctggttgcggccgatggctggtacgagtgggtcaaggacccatcggacccaaagaaaaagcagccctactacgtccgccgcaaggacggcgaaccgctttggtttgccgcattggcacagatggaccgcaccggtacgaccgatcgcgaaggggatggcttcgtgattatcacagccgacagcgatcagggcatggtggacatccatgaccgccggcctgttgtgcttgaagcggatctggcaagggaatggattgagccggacctgccgcttgagcgagccgaagagatcgtgagacacctagctttaccggtggaagtgttcgaatggtttccggtcaaccgtgccgtgggcaacgtccgcaacgaaggccgctcgctaatagagccagccagctaa

SEQ ID NO: 356636 - DNA, 354 bp, Pseudomonas aeruginosa
atgtcccgcgttctgtgtaaccgctgcaagcggatgatggttccaagagtaatatttagccgaagcattgccggtggctggggatggagaattggcgggggaaagccaatctccaactgctgtccattctgcttatcagaacattgggatgtagtagtagagccaagcccactgcgtggcagcgttctgatgaaggtgctgagtattccgctgaccctgatcatgtttaccttgctattcggtgcttccaatgagttggctagctatatgggtgggtcagcgatcgtgcagtggattggcgtgatcgggtcggtcgtggcgacctataaatttggccgctggttcgtaaattga

SEQ ID NO: 356637 - DNA, 1401 bp, Pseudomonas aeruginosa
gtggggcacaaactgagtgatacccaggctaaaaaatgggctgctacgggtgagatgaataagaatggggtggttacgcccacacgtacattctccgaacagctcggtgtgcgcgggtccggttcgatgcttcttgagcggcgccccagcggggacattgaggtttacctagcggtacgccggggtggcaggcaagagcgcaagaaactcggccagtttggaacgctatccgctgatggtcagattagaggcttagcgtactggcgtcaggaggcagaacgagttgctgcggccgctcgtgattttccaacgctcgaaacgtacgaaaatcatgttcaacggttgaaggccgagcagcaacggatcgcaagccaagccgcccgtcaagggtcctttcagcagcttttgctggcttatgtagcggacatggagcgacgtgagaagaccagcgcccgaggcgtcatgggtgcactacggcttgatgtaattgatgcattcccggacctagccggcactaaggcgaaagagatccagccagaagatatttcgcagatcctacgccattgcattaaccggaaacccgcatccaaggggcgtgggcgacgaaaaacacaggcgagcacaacgaatggcaagctaaccgcggctaatcgtcttcgggcttatttgcgtgctgcgttttcgtttggcttgaagcacgatctgaatcccttgagggcaggcgatgcagtgctattcgggctcagatacaacccagttgccgatctccctacgattgagggtgcggagcgtgcaaacacggaggcgttgaacgctgacgaactgagacaagtgcttcgtgctgtcgctgcgctgccagggcgccgtcagccaatagctaacgcgatgatttatctggctgggcaacgtgtgcaaatgttattgcgcgcaacttgggctgacctgtcagaagatcctgagcacggtacggttctccgcttggtcgattacaagggaggtaaaggaacgcctccgagggatcatcttttgcccatatctggaagggtcgaagaggtactagcgccgttgctggcgcctcggactggcgcgggtccgttttcgcttgacggtgtgcgaaaagtatccgcggatacagtgcagaagatattttccgagcttggctctgtgttgtcagcacagggtctgactcgcgcgttcacctggcgcacgatgcgagcgaccatcgagactcatttggcgatgcttggtgttgatgagcagcgaagggcatggctgctttctcatgggcgaagcggagtacaagcaaagcactatgaccgttacagctatctgaaagaaaagcgcgaggacctagacaaatgggcagcctatctagacgcaatgttggataaccccgcatag

SEQ ID NO: 356638 - DNA, 465 bp, Pseudomonas aeruginosa; identical to SEQ ID NO: 319804

SEQ ID NO: 356639 - DNA, 699 bp, Pseudomonas aeruginosa
atgcttcttgtgactccagagtgcgacttggtgcgccctaaaccttggcaaacagtgattttacttagcggccagtttagaaggaaagagcaggttgtttggcctgtagatccggaagagtttgagctttttgtctttaatggcgaggagttcgtgattaaatggaattataactcagtgatttctgagaccattgcctctctttcgagcaagattttcaatggtgagttgctgcatgtttcaaggatgaggtccatatatgctttgaaacagcagaggcgaatggcggctcagatgactagggtgggtaccgaagttccactgcacgaatatgtgccttttgttgccgatctctattttaggactgaaggaaaaaaatgtgccttctcgcttcgtctaagttctagtgagggaggggtttatattcagtatgggaaaagcaagtcccaagtgatttttatgcctgatgcggtagacagaattcttgagtgcgcggaggctgagggggtcactcaggagacgaagtctgctttgatttcagtttcctttatgcgagaacttcgtaaaggtgttctgcttgatgggggggctaagagcctcgaattaaatggtggatcggttattctgaaaatgacaagtagtccaccggctcaactggataagcagttgcgcgttcagataaatttataccggggttag

SEQ ID NO: 356640 - DNA, 195 bp, Pseudomonas aeruginosa
atgaagcacctgttccgcagcctgaagtcggagtggatcccgtcggcgggctacctgacggcgcaaggggctcagcgggacatcagtcattacctgatgtactgctacaactggatcaggctgcatcaattcaatgacgggctaccgcctgcggtggccgaggaaagactcaacccactgtccgggatgggttga

SEQ ID NO: 356641 - DNA, 567 bp, Pseudomonas aeruginosa
atgcaaagccaaactcagcacctcaccgccttcgcggaattcatcgcccagccggtctctagccggggcctcgttcttgagtacctcaccgatgcccgaagctgcgttgatggcgaccagccggaggcggcaatctggcggctggaggaagccttgaagctgctgcgaaaggtggctcgccagccgacttctaccgacaaggacatcaccgggtgccattactgcatcatcgaagattcggaatgggtgaagacaaaacgtggcggctacctagaactcatcctcaaggtcgtcaagggtccggcaacggggcgtcgttttgtggaacgcctcaaccttcaagacccaaacccggtgccggttgaaatcgcctacaaccgtctgtcggtgtatagccgcctgacaggcatcctccacattcaagacccaaggcaactgcataacatcccgttctggatgtggctggacgagtctgatgtaacacctaagatcaggctgctagaagaaacggcggacggaaccctgaaggaggtcgcccccagcaaacgcgtcgaggtgctggagtag

SEQ ID NO: 356642 - DNA, 1977 bp, Pseudomonas aeruginosa
atgacgatggatttcctatcctcgggcatccccgaggaattgaaggcgcacgcctgctgggtggggtggcgctacgaagaatcaaaagatcggccgaagccgacgaaggtgccgctggacccgaacgtctggagcacggttaagcgtgctagtccgaccgctccggccacatgggcaacctttgacgaagccgaggcatacgccgaacagcatggcgtcggcgtcggcttcgtcctgtcggcggagtcgggcctttgctgcattgacctggacgcgaccaatgaccccgccgtgcagggcatccatcgcggcatcctcgaagacgcgaaggcagcgggggcctacatcgaagcctcgcccagcggcaagggctggcatatctggttgcgctgggatggtccgaagtcggcacccaaggctattcccggcgtcgagtgctacacccacgaccactacctgaccttcaccgggaaggggcgcggccaagtcgtcccgatgcccgattcgctggcctcccggctggccccctgcttcgcggttcctgcaacccctgtggtcgccgccccgtccgtcgagctaccgaccctgatcgacgacgaagtctatgaccgggccgccgcacactaccaagacgccttccgcgccctatggcaaggcgactgggagcggctgggcattggcgacggttcgcaatctgacgccgacttctacttcgccatcatgctggcccgcttcacttcggacccggaccaatggctgcgcctgttcctgcaaagcggaatggccaagacgctggagcgcaagggcagttctcggaaccagcagcaatacctccagcggacttacaacaaggcgcggggacgggccgacaacgatgaagctgtagcccgctgggcgcggagcctgatgcagccccgcgacatcgaaggcgaagacccggactttgaatatctggatagcttcgccgagggcgcaccggctgaactcaagctggtggatggacttctcggggaaggcggcttgtcggtgatctacggcccgccgaacgctggcaagtctttcctcgcgctggaccttgcctatgccatagctaccgggcggccatggttcggcaagcccacagttgccggtccagtgctgtacgccgcaggcgaagcggcctcgggtttgcgtaagcgggcgcgggccataatccagcacaagaactgcgcaggggcaccaattggcatcctgaaaacggcgctagaccttccgaatgaatgggacttgctcgccgctcgtcttcgcaggatgcagcgcgaccttggccgagcaccggccctgctggtcatcgacaccgttaatcgcttctacggcgacggcgacgagaactcgtccaaggatatgcgggccttcctcggatcggtggagaaggtgcgcaaggaatttccggcgctccatgtcctgctgattcaccactcgggcaaggatgccgacaaggggatgcgcggctctaccgccctgctgggcgccatcgacacggccatccagtgcaaggcggaaccgaagcatctggcttgggtggagaagcagcgcgaaggcgtggcgcactatggtctcccattcaagctgcgcgaggtagtagttgattaccccgactgcgaagggcggaccagttgcatcgtcgaacaggacaccgacggcaagcctgccccggtcaataagagcaccagccgcaccgtgctcgccctccgcaacctcgacgccttcaccaagcaaagcggcgaacccgtcacctttcaaagtgtggtcaataccgccctccagctacgcgagccgggggagaaggaaggcacctacaactcggagaagcagaacgtccgcaaagctctggagcaactgcgcgacgactacaaagccgttgattacgacggcggaatggcagcaaccacagttatcactatcctcgaccgcttccgcggcctcgtcatcagctaa

SEQ ID NO: 356643 - DNA, 201 bp, Pseudomonas aeruginosa
atgcaagacaagaccatcctgcgcgcggctgacgtcgtcgccatcctcaacatcgccaagcccaccttctaccgctggatcaaggaaggccgcttccccgctggggtcaagtacggcccgaacacgaccggctggccccgccatgtggttgacgcttggcttgccgccaaggaatccacccagcccgccccggcacagtaa

SEQ ID NO: 356644 - DNA, 630 bp, Pseudomonas aeruginosa
atgaagcaatgcaggcgatgcggcgaggtgaagccgctggaagcgttcgggaagaataagcgggcgaaggacggcctcaattattgctgccgcgagtgcgacgcataccgtgcaaagtgctggtacgaggcaaacaaggagcgcggccaagcagcagcaaagaaaagatacgagaccaaccccgagcgggaactggcacgagcgaaggcatggcgagaagccaacaagaaaaggtatcagacccagaagaaggcgtaccacgaagcgaacctcgaccgtgagcgggaaacaaggaaggcctggtatgaggcgaacagagaagaaatgcaggcccgctcccgcgcctactatgagaacaaccgtcctcgcgtatatgcccattgccgcgctcgtaaagctgggctggcgacggctacccccatgtgggctgaccgaggagccatcgccgccgtctatgccgaggccgagcgcctgacccgcgagaccggcattccccatcacgtcgatcacatcatcccgctcaagggcaagggcgtatgcggcctgcatgtgccttggaacctgcgggcgattccagcggcggaaaacctgtccaaaagcaaccggattccagaccacctaattgtttag

SEQ ID NO: 356645 - DNA, 624 bp, Pseudomonas aeruginosa
atgaagacaccaccttggttgctctcgccggaagaactggcacagcaacaagccgaagctgccgaagcagcagacccgatccgacaccctagcggagtgctacaggaccccagaagcgggaagttcctgccggggcatcggaccaagggccgcccgaagggcagccgcaacaaggtcacgctcgcctgcgaggaactgcttgaaggagaggccgagaggatcacgcgccgctgcgtcgatctggccatgaagggcgatccgacagcgatgaagattgccatggatcgcctgtaccccgtccgcaaaggccgccccatcccgaagctggagaagcacgacggcgaaaccagcattgaagccctgcttcgcgccgtcctcgaaggggagattgccccggaggaaggcaaggaggttgtcggcctcatcgaaagcgccgcccgtgtggctgctacccaagtccttgccgacatgcgccagcgccagatggaggcaatccaaaaagcaaccgactccggcggggttcccggcggcgtcatgttggttcccatgctgggcggactggatgactgggaaagcgccgttctaaagcagcagcagcacctcaagctcaccgttaaggagtaa

SEQ ID NO: 356646 - DNA, 696 bp, Pseudomonas aeruginosa
atgaacatcgaatcgcagtacctcgtcaaagaccccgccgctactggcttcctcgacaacgcccagctcgacaccgggctcgctgccatcctgggcgatcccaaaggcatcgacgcccatgtcgcgccggacgtgcagagcgcccatatcaccctcaaggatgcggccaagaagattgcggcgctggtcggcgacccgacccggacggaggttcagaaacacgccgccgccaagcagcttgcggagaaggtgaccaaccatctggagaaatccaaggccgcgctggaggcgcacgccgagaagctgaaagcgtcagcgctggcgcaggctgatttgcatctcggccccagctcggaccgcagcgccctgcatagcgagattcgtagctgggtgcgcgagcaggccaaaacgccggaagggctgctgcaagtgaagcaggcgatggcggacaacgacgacgttgcagccatcctctggcactcgccctcgttcctcgtcgggctggctcccagcgtccatgaagggctgcgcctcgaagccctgcaatcccgcaagcccgagctatacgcgaacctgagcaatagcgtcggcctcgccaagctggcgggcaagtatgaagccgccatccgcaaggtagcgcccagcttctacacgcccagcctcgcggaacaggccagcaagcgcgtcgagatttga

SEQ ID NO: 356647 - DNA, 414 bp, Pseudomonas aeruginosa
atgaccgcagcccaacaggccctttccgcgctggcagattggatcaaagccagcagccagaactaccagactcgccttgccaccgttgagcgcggcccgttcgctgtcctcgtcccgctggccctcgaccaagcgcccgcgccgaccttcgaccccgaagccttgcccctgtggatacccgaggcacaggcacccgccgacctgccagccatcgacaccagcgccccggctagccaagaccgcaaggcgcagcgcctcgcgcatatcgtctggatggtgcaggagggccgctttccgggcgtccagcttatcgacctgaccgaccccggcgaaacgctacaggcggcgcttgaccgagaagcccccggcatcgacctcgaccttaccgccgccatcttctaccccggctggtga

SEQ ID NO: 356648 - DNA, 483 bp, Pseudomonas aeruginosa
atggcccgcatcatcgctagcgaggggccagacctccccccgctaacaccggggctgcggcataccccgatagaggccatccgcgacctattcgggacggtgttcctacaggcgctgaacgaaggggatgccgagtgggtggagagccccgactacctgctgattgccgactttgcagggatcgacctggacctagcggagcgggtgcgccgcatgttccttgctggggagatcaggcccggagccttcgcgggtctcgctcccgccatgcccccggagtcccagcgatggggcacccgttctgcggtgcagccttcgaccacaatccgccccgtcgagatggtccgggccatcgccgcgaccatgcccgatgccaaacccagcgaggtcgtccgcgcctgcattgccgctggagtcaatccggcgacggcagcaacccaagtccgcaagtatcgaaaggcgcttgctgagtcgaacaattga

SEQ ID NO: 356649 - DNA, 549 bp, Pseudomonas aeruginosa
atgtccgtcgatctcgcgcacatccgccaagtcagggcggaagccgactgcctgttcaacaacgacgaggtcgaggcagccatcggtcgcgtcgccgaggcgatcaaccgcgatctcggcgagaccaacccggtggtcttctgcgtgatgaacggcggcctgatcttctccggcaagctgctcccgctgctcgacttccccctcgaactgtccgcgacccgttaccgcaacgagacctccggcggcgaactgttctggaaggccaagccggaaatctccttcatcgaccgtgatgtgctgatcatcgacgacatcctcgacgaagggcacaccctctcggcgatcatcgacttctgcaagcatgccggcgcacgcgcggtgcacaccgccgtactggtggacaaggaacacgagcgcaaggcccggcctgacctcaaggccagcttcaccggcctctactgtgccgaccgctacgtgttcggctacggcatggactacaagggctactggcgcaacgccgcgggcatcttcgcggtcaaggggctctga

SEQ ID NO: 356650 - DNA, 249 bp, Pseudomonas aeruginosa
gtgggcgaagcgctcaacctcctggctttcagcagtaagaaagccgccgagatcatgaagaaagtgctggagtcggccgttgccaacgctgagcacaacgaaggcgccgatgtggatgacctgaaggtctccaccgtcttcgtcaacgaaggtcgttcgctcaagcgcatcatgccgcgtgccaaaggccgtgctgatcgcatcgtgaagcggtcttgccatatcacggtcaaggttgcggacaagtaa

SEQ ID NO: 356651 - DNA, 2352 bp, Pseudomonas aeruginosa
atgtcatttgtagttaaagctagggtattgctagagcttggttctgagctgattagctctgatggcattgcgttatatgaactaattaagaactcttttgatgctgggtccgacagggttgaaattagaatagtattatccatgtctgagagtgcttatcgcaagtgctgtcttagattggaggatgctataaaagaacgtggctctacgtcgctaagtgatcttaaggcgtatgttgcttcagaggtaattgggtctgcgccagttgatttgaaggcgaaattttatgagagaattaactccgggctcaatgttgaggatctcttagatagatttcggcaggcatatttcgatcttaactggatatcgattactgacttcgggagtgggatgagccttgaagagttgcgagagaacttcttaacaattggaaccaggagtcgacaaaggaaaaaagggacaggccgcggcgttgtgctcggagggaaaggagtcgggcggctctcttcaatgcgcctgggtagttggctttctgtaaaaacctcgtcgctgagtggctcttcgtatagttgcttggatattgactggaaaagattctctcatgactcggatgaggttatttctgatgtaaaagttgagccttatgttggtggcgaaaagaatgatccatctgagcacgggacggaaatagttataaggggcttaagctctgagtggtctctaaagaagctcgaggacgtcgcagtgacggagcttgcgaagctttgtgatccatttggagactcgagtagatttcccatccgcctctggttcaataccgaaagagtgagcattcctttttttcagccgaagcagttagatatggctcacgctgtttgcaatgctagatttgttccgcgagacgttttggcaggcaggccagcagcgctcacttatgatattgactatagatatcgcgatagaaaaatgtcagatgttctatcagaggcggaaatagtcagtgaggcagatgcttcgattgagactgtgcaaagtattggtgagttttctgtagagatatattggtataaccgcttgcagcttcgagaaaatatcaaagatcctattgagttgaagagtattaaggattttgtgaaaagttggggtgggggattgatgctctatagggacggatttcgagtaaatccctatggtagtcaggatgatgactggcttgggttggaccccattgcatttaagtcaggaggatataaggtaaatagaagtcagatcgtcggtagagtaagcataagctcttccggtaatccatatcttgttgatcaaacgaatagagaggggctgcgttcttgtggggagaaagaggcttttgttaatttgctgagaggcatattaattaatcgatttaagggctatatagagagtgttgataagtctgagaaaagtaaggatatccaagaccttaaggagctagaaagtagccttaacgacaaggagcgtgctcttcttaagaatgttagaaagattgcgtctgactatcctgaggctcaaaaaatagttcttcaggttgaggaccttttacaagaggcaagaaatattgcccaaaccgctgaggcaatcaaagcgaatgtagaggaagatcttgataagtatgtccatctggcaggcatggggctcatggtggaagtggttgcgcatgagcttacgcgcgcaacgcagcacgcacttgagtcggtgactgctgggcgtagaagagatctgccggatgatctttctgtaatatttaagaatttggagttgcagctaaagacgcttgagaaacgcctccgtggaattgacccgttgagcgtaaaagggcgtcaaacaaaatctgattttgatgtggttgaactggttgaggacactcttgaggctcatggtgcacagttttatcggcatgaaattgttcccagtttttccgtgcttggcggaaatacggggccactcaaaattagagctgttaagggtatgtttatacaggttttggaaaatcttattaataactctatatactggctaagccaagagaagaagattaataggggtttttctccggtaattgagatttttttggataagacggggatcttatatgttagggataacggtcctggtgtgcctcccgttcggaaagagttgatctttgaggctttttggagtggtaagcctggtggcaaaggaaaggggctgggcttatatatatctaggcaaattgcgggctaccacggtgctaaattatatctttctgacgaggctacggcgcacaaggagcgtctaaataccttcgtgttggattttcagggaattgaaaagtga

SEQ ID NO: 356652 - DNA, 330 bp, Pseudomonas aeruginosa
atgcgcagtcttctcgtgctctcggtcgtcttgttggcagcctgcgatcggccgtcctgcggggatctggccgaaacgctgatcgccaatcccgtgcggctcaaggcgctgcgcgcagagtgcgtggccgactggcgggcggtgggcgagggaatctgcagggccgccgccgaggcgtaccggcgccgcttcttcgccggccactccggcccggacgagtacgttgtcctggaggagttgccgacaattccaccgaccttcgatgaacctggcgacgaggtagccgaaagcagtgcgcggctggttgtcgtcaaggaggacgcgccatga

SEQ ID NO: 356653 - DNA, 264 bp, Pseudomonas aeruginosa
atgaagaaggtcatgccatttctatgtgtcctggccctcacggcctgtggtcaacccgacgcaccgacgccgtcggcgttgcccacggttgatgaactcgcggccgatccagtgcggcggaaggagcttcgcgagcagtgcaagctggagcgcgcccaactgggtgacgagctgtgcaatcgtgtggccgaggccacacgcaagcggttctatggcgatgggaaagtaccctacacactgccgaaagagccgcccaagttctga

SEQ ID NO: 356654 - DNA, 897 bp, Pseudomonas aeruginosa
atggatcttcgacatcttcgctgctttcttgccgtggctgaggaattacacttcgcgcgggcggctgaacgattgcatattgagcagtcgccattatctcgtgcaatcaaggagcttgaagaagagctgggtacacagcttttcgtgcgaaccacgcgaagtacaaagctcacgcatgcagggcgcatgctgctagaacacgttccccgcgtattcgtagccttgcaacaagcccgcgatagcgtgaaggctgcgaccaacggtttctgcggtcaactgcgaatggccctttctgacggaatttctccgtcacgtttctcttcgtttctggcgctatgcagacaagaggaccctgaggtcgagattcggctgtttgaagtgccgctgtcgcagcagatcaaagggctccttgatgatcggtatgacgtaggttttgctcagtcgaacgaggtaggcgatggtatcgtcgccgttccggcctggagtgacccactgatggtagctgtgccagctcgccatccaatcctagcccaccggcgtattccgctggctgagttgctgcgctatccgttggtcttatgtgacccgcaagtatgtgagggccatgcgcgccaagttgagcgtttcctgcggcaggatgaagtagagccgctgattgccgaacaagtgggctcctgcgaccttatgatggcgctcgtggcggccggcatcgccctaggcttgacgggagcgtcgattattgcggccagccgcgagtcgggtgttgttggtcggcctatggagggccgtcccccgatactcactacttatctactgcattcgacgcatacaccaacggcaatgctgagtcgctttatcgagcgggcgcaagccatcgagccatcgcaaatctcctag

SEQ ID NO: 356655 - DNA, 837 bp, Pseudomonas aeruginosa
atgagcaagaatcatattctccttatccacggtacgtggtgtaacggcaataactggggagcatttgccaccgaacttgggcgtcgagggtttactgttcacactccaactctccgacaccatggtgcccctgataaatatctctgggaaaatgctcagaaagtggcaggggttgggctgttggattacgtcgatgacctcgctgcactcgtggataccatggatagccctccaattatcgtgggtcattctgtaggtgccctattggcacagttattggctgcgcgccgaccaaataaaggcgtcgttctccttgccccagcgccagcagcaggaatgttcagcatgtatccgagcatgacccttctctgggggcgtttcctgccgcaatggttgatgcggaagccaatgtacccgtgctcttgggatgcgtgggttagtcagatttgcaacactcaatcaagagaaacgcaagagctgtactacggaactctttgtgcagagtccggtactgcttattttcaaatggcgctctggtacttggatccgaagcgagcagcgcgagttgatttcaaagccatcgcctctccagtgctagtagtcgcaggatccgaagataggtgcacggttcctcgaattggtcgcataactgcaaagcgttatggcaagcaaagtacctacgttgaactgcagggatctgatcatatgattacttttgggagttttctgcctgaagcgctgaagtcaatagataattggctggggaaaaataatattgctcccaaagactaccagggtgagagtgtttgtggcatgttggtagggggtcgtagttaa

SEQ ID NO: 356656 - DNA, 1017 bp, Pseudomonas aeruginosa
atgaacccggtagttcgcgcagctggaatgcaagggtatgaagccctcatgaaggagttgggtgtactcatttcgcctttgctccaacgtcataccatcgatcccgtggccttgggtgatccagaggcatttatttccttacactcgattattcgtttactggaagagagtgcaatagcagcacgatgcccggacctagggcttcgcctagctggataccacgactcgggcatgcttggtgtggtggctctcgtgatccagaacgctccgacggtagaacaagccattgcagatacctctcggtaccttttcctccacagccccgcattcgaaatcgtcctcgatgacagaagcgcacgattcgaggattgcgttacgctgcgtttcaacattcgcctaaccgagttcatcgctcagcggcaaaccttggatgcttgcgttggccacatgttccaatcttcacggctcttctgcggagatcggtatcgcctccgaggagtttccctgccacattcaccagtggcgccggagcgtgtttaccatgagttctttcatgcaccagtgttctttgaagagccatatgcaggtttacacctgcatcgtgatctgcttcaaacaaacatgaagtccgttaaccctatggtccgccaactagccttggagcatattgagcagcaaatgccacctcgtgcttcaggattatcagacagagtccggcagaccctaacgcgtacgctaggagcaaaccgaggaaccaaatccgagattgcagagctactcggcatgcatccaagaacactgcagcggcgactcgaccaagaagatattaccttcgagaaccttcgtgaagaggtatacaagaacgccacgttgcgtttccttcgcgagactcagattccacttaagcaactcgcgggagcgctagggttttcagaacagtccgccctcactcgctcgtgccggcgctggttcggccagtctccgtctcagattcgttctgagggaaagcaagcttag

SEQ ID NO: 356657 - DNA, 717 bp, Pseudomonas aeruginosa
atgacatgctcaactagccagaagcctactcctactattttgctgatcggcgcttcgcgcggtctcggatttgcactagcagcggaattcctgaaagtgggatggaatgtcgtcgccaccgtgcgcggagatgccagaactgatctgcacagcttggctgaggatcatcaagacagtgttgagatagaacgactcgacgtgaccgatctagaccagatttcagatctacgtagtcgtctttctggccgcagctttgacatcctgtttgttaacgccggaactgcgaacaagaaccaaaatgaaaccattgcggatgtgtccacggaagagttcgtgcgggtgatggtcacgaacgcacttgctccgatgcgtgtcatcgaagcactgcaaaatctcgtttctgatgatggtttgatcggcattatgtcctcaggacaaggcagtatcagtaataacgagagtggtgggcatgaagtctatcgcggcaccaagtcggctctgaaccagtacatgcgaagttatgctgcccgtcatgctggcgatcgtcgtgctctcgcattgattgcgccgggctggatccgtaccgagcttggcgggccggacgccccgctcactattgaggagagcattcccgacattgtgaatgtgctcctctcgaagcgggagaggcctggtcttgaatacctcgatcgtatggggcgcgccgttccatggtga

SEQ ID NO: 356658 - DNA, 924 bp, Pseudomonas aeruginosa
atgcgacacgtggacttgaaccttcttacgtcgctggacatgctgctcaccgagcgcagcgtgacaaaagctgcacgtcgtcttggcttgagcccttctgccatgagcaggactctcgctcggctacgggcagtcacaggcgatcaactgctggtccaggcgggcaggacactagtccccacaccttatgcagagcagctcagagaacatgttcatgaccttgcccgcagcgcccaggccgtgcttcagcccgcttgcagctctctgaatatcgccacgctcgaacgaacttttactattcgcgccaatgatagttttgtcgacctggttggtccgctcctgatggcgacgatcacagaagccgctccctatgttcgtatcaggtttgttccgaagcccgacaaggatgcacagccgcttcgggagggaactattgacttggagattggggtaatcggaagcatggcccccgaactgaaaacacggtcactttttcatgaccgttttgtcggtatttgtcgggcaaaccatcccattttggaaaagccaaagctaaccgcagaacgctatgccagctatccacatgtggtcgtatcgcgcaagtcgcaatttactggcccggtagacgaaacgttggaaaagctgggcctacatagaaccattgccatggtagtgcccacctatgctaatgcgatacagatcgtgcgccactcagatctactcgggctcatcccttattcatgcatcggaaatacccacctgaaggtcagtgccataagctacgacctccaacactttgaactccctatacacacgcctcaaataaatatatccgcaatctggcaccctcgactccattcagacccagcccatcgctggctccgagataccatattgaccatctgcaaaaatgcatatccatga

SEQ ID NO: 356659 - DNA, 834 bp, Pseudomonas aeruginosa
atgtccagctcggcaccggagcgggaacagctcgacctgttccgcgccttgccgggcgacatggcgccgcgcgacagccaggacctgatggcctacccgttcttctcgttggccaagtcgcggcgcaccgcgccgatcgacttccgctccggtggcgtcaccgtacgagtggagggcacgcgggaacatggcatcgccacgatctgggatgccgacgtgctgatctgggcggccagccagatcgtcgcggcgcgcgacgcgggcctgcacccgtcgcgcctgatgcgcgccacgccctacgagatcctgcgcttcatcgggcgcggagtgtcgctgcgcgactaccagcgcctcaaggccgccctggatcgcttgcagtcgaccacagtggccacctccatccgcgagaccagcggccggcgcctgcaccgtttctcctggatcaacgagtggaaggagctggccgacgcccgcggtatcccgcagggcatcgaactgatcctgccggactggttctacgcgggcgtgctggacgtggccctggtgctgaccatcgacccggcgtacttccggctcaccggcggcatcgagcgctggctgtaccgcctggtgcgcaagcatggcggcaagcagccggacggctggcagttcgacttccgtcacctgcaccgcaagtcgggcagcacggccaggttctgcgacttcgcttgcgacctacgtgccctggcggcgcgtcagtcgctgcccggctacgtgctcggcatcgagcgtataccggaggccaacgtggagctgctgacgttccggcccgtgtcgcccacggcacggggataa

SEQ ID NO: 356660 - DNA, 798 bp, Pseudomonas aeruginosa
atggccaatcactatgccgagcattggtatcctaccgccgcttatctctacgtcctgcacctggatgacctcgccctagcctgggagtacctgcgccgtaaccctgaataccgccgcgactggctagatcgccagcaccggcccgaagcgccgcaacgctggggattgcgtctgctggaaaacccgagcatggacgcgcgtgacgcacatccggtctggtttcccgaccacccggaactgatccatctgtatcccgacgtcgaccccatgcctgactccgtggcgttcgacttctggcgcctccctggcagcaaaggactggtccatgatggccagcgcctgctgctgacgacgcgctggccgggctgctgtctgcgcctggccgtggcgcccggtctggagcagggcatggcctacgtccatgccgtacacgcccgcgccagatggtgcgagcgttcctgcgccctcacggctgaactggacaagctggcggcagccgccgatgccgcgccacccgcggcggctctgtgccgacctagcccggctgtactgctggagctgcataccctgcaagcactcgatgccaccctggcgggggcatccttgcgcgaggtggccgcggggctattcggcccggcggcggtggccgacggctggcacgccgatggcggcctacgctcgaaggtgcgtcgtctggtgcggcgcggccgggagctgatgcacgacggctatcgccgcctggcacagctcgacgggcgcggggagggccgttcggcacagcccgcaaaacgaccctga

SEQ ID NO: 356661 - DNA, 756 bp, Pseudomonas aeruginosa
atgtctgtttctacttttttcgtttccgaagcctctctgcgtaatctcaagcaaggtgctcagcgccgcagccgcgcattgggtatctcttcctctcaccttagcgaagccattgcggcctcgttgggatacaagacccacgctgccctgcgcgctgcccttgcaggtcatgcgacagccgaggcgcagaagccgagcaatggccagttggttcagcgcttgaggcaactgggttatgacgctcccgagaatttggagttgttgccggaacttgatcgctcctattccccgttcaagagcttccccctgcgagcgaagcggggcgtgcgttggtgggcgtggcgcaacttgatggtggcggcgatcaatgctggcctcgaacagcgcctgttcgggcttgctccgagtgataactggtggccgggtggtgcctctgatagccacaaatgtatgcgtagcagctatcgctttgtcatcgatggggagccggccattgccagtgtggatgctatcagcggtgacgagctttccatcagcgtcgtcctcaagcccaagagggatgacattcagccagagtggtactgcggcctccgcgatggtgatgccgtggcgcatgggtggctggagcgtcgcctgggtgcgtggattcaggacggcggcgagagtttcagttgcaaacgtgcgatgcagtcacgaattgccgagctagcaatcgaccctgccggttattcggatcaaggcagcttcttcatgtag

SEQ ID NO: 356662 - DNA, 2022 bp, Pseudomonas aeruginosa
atgaacgccattacccaaaccgaagccgtgaccctgaccaccctggaagcggccgacccgaccaagaacctgatactgctgccgctctcgcagctcctgccgcgtcgctccaagcgcaacgtgcgcaccacgccgcgcctgtctatcgacgagttggccgcgagcattttccgcatcggcctgctgcaaaaccttgtcgtcatcttcgccgccgatggcaagcattacgaggtggtggccggcgaccgccgcctgaccgccttgaagctgctggcaaagaaaaagcgcatcgccgccgacttcgaggtgccgtgcctgctggtgcccgatgcctcggcccgtactgtcagcctcgcggaaaacctgttgcgcgagcagatgcacccggccgaccagttcgaggcattcgctgcgctggtcaaggaaggtcgccccgtcgaggacattgccgccgacttcggtgtcacgccgctggtggtgcaacgccgcttgaagctggcgaacgtctcgccacgcctcatggcggattaccgggccggcaacgtcaccttggagcaactgatggccctgaccatcaccgatgactacgccgcccaggaggccgcgttctacgacgcgccggagtggcaacgtggcgcggcggcgctccgtgctcgcctgacggagcgcgaaatcgatgtgtgtcatccgctggtgggcttcgtcgggctggaggcctacacggcggcgggcggcggcattcgccgcgacctgttcgccgacgacgacagcggcacctacctcaccgatgctgcgctgctggagacgctggtgcgcggcaagctggaggcactggccgaggatgtgcgtgccgagggctgggcctgggtggaagctgtgccacagttcagctacgcggatcggcaggccttccagagcgcgtcgcgcatccgccgcgaaccgaccgcccgcgaggcgcggcgtatcgcctcgctgcaagctcggttggaaaaggtcgatgccgagctggaggacgcctacggcaccgaggacgaagagaaggtgccgacgctggagcagcggagcgaacaggtggccgccgagctgcacgccgtggccgagtccttgcacggctacaccccggaagtgcagagtgtggctggcgctgtggtcaccatcgaccgcagcggcgaagcggtgatccatcgcgggctgttgcgcgaggccgaggccaacgcgctgcgcaccctggaactgctgcgccagggcatcggcgacagcgaaggcgcgagcgacgaggcgggcgagggcgccgagcaacccagggcagcgagtctgtccgaccggctggcccagcgcttgagcgcccatcgcacggcggcgctgcagattgaggtggcccggcacccgcaggtcgcgctggcggccttggtgcatggaatggtgcacaccgccctgcaggtcgattatcacggcgacagcatgccgctcggtgtgcgcctaaccgtgcgggatcgactcgatagcctggccccggactggccggcgtcgcccgctgccgtggcgctgcgtgagctgcgcaaggcctggggcgagaagctgtcgcaggatggtgccgagttgttcgccgcgttactggcgatgccccaggacgagctggtgcggctgctcgcggtgtgcgtggcggtgaccgtcgacgtggtcacgccgcgtgcgatacggcatcagcctggagccgagctggcgcaggtcgtgggcctggatatgggcgcatggtggaagccgaccgccgagggctactttcagcacattaccaagatagcgatcttggaagccgtgggtgaatttgcgccgaggcacgtcaaccagttggccaagttcaagaaagccgatatcgccagtgaggccgagcggctggttgccggtaccggttggatgccgacggtgtttgcgatggggccggagccgcaagaggttcagaaagaggcgaaggagccgacagatgctgccggcgctatttatggcaatacgctggctgcatga

SEQ ID NO: 356663 - DNA, 1125 bp, Pseudomonas aeruginosa
atggttgaccacatagcccactatttcaacgataaggaaaagctcttcctggcgcatacaaatccagcgatcgacaacctaaaacgcaaggtgaccgcgcaaaacgccgagttccggacaatcagcagtcaaattggcaagagggcctccgccactgaatacgaccttctcgtaatagacgaatgcagtaccgtcagtaatgcagatcttatcaaggtactggagaaaacttctttcaggttgcttgtgttggtcggagatgtctaccagatagagtcgatccagtttggcaactggttcgagataatcaggtcatttattccaagcacatcggtgttcgagctgacaacccccttcagaaccaagaacgactcactgttaggcttctggaacaaagtccgcgctattgaagatgacctcaccgaggtcatggctcgcaatgggtactgcagtgtgctcgataagacgctattcgagcctcaggggctggacgagatcatcctgtgcctgaactacgatggcctctacgggatcaacaacatcaaccgatttctgcagaccagcaaccctggagcagcaaccacttggcgtgtctcgacctacaagattggagacccagttctctttcacgagaccgaacggttccggccagtgatctacaacaacctcaaggggcgcatcgttggtatcgatagtgttcgtggccgaatccagttcgacatagagcttgatcgaccacttagcgagttcgacgtagataatgatgaacttgagtggatagagggctcgaccgtgcgcttctctgtctacgactccaatgctagcgacgaggacgacgattccctgaacaccaccgtaccattccaagttgcttatgctgtgtcaatccacaaggcgcagggtcttgaatacgattccgtcaaaatcgtcatcaccgacgccaacgaagacgacattactcacagcatcttttacacagcaattacccgagcacgtgagcgtctgcggatattttggacccccgaaacacagcaaaatgttctagcgcgtatcagcctcagcgcgaacacaaaggatgttgctattctcgctgcccgtcgcggccttacaccagtacgcaaatga

SEQ ID NO: 356664 - DNA, 258 bp, Pseudomonas aeruginosa
atgagcagcctgacctggattcgcggtttcaacgggacgatcggccgcatcgcgccgcgttggacggccgagcgtatgcgtcggacgttcatggtgcctggagagtggccgccgaaggattgggagctgccgctgctggccagttcggagcgcgtcactctgcgcttcgggctgtcggtgttgcgctggggcgaggggccggcagtcctgctgctgcatggctgggggccggcaggccgacacagttcgcccatctga

SEQ ID NO: 356665 - DNA, 483 bp, Pseudomonas aeruginosa; identical to SEQ ID NO: 356648

SEQ ID NO: 356666 - DNA, 414 bp, Pseudomonas aeruginosa; identical to SEQ ID NO: 356647

SEQ ID NO: 356667 - DNA, 696 bp, Pseudomonas aeruginosa; identical to SEQ ID NO: 356646

SEQ ID NO: 356668 - DNA, 624 bp, Pseudomonas aeruginosa; identical to SEQ ID NO: 356645

SEQ ID NO: 356669 - DNA, 630 bp, Pseudomonas aeruginosa; identical to SEQ ID NO: 356644

SEQ ID NO: 356670 - DNA, 201 bp, Pseudomonas aeruginosa; identical to SEQ ID NO: 356643

SEQ ID NO: 356671 - DNA, 1977 bp, Pseudomonas aeruginosa; identical to SEQ ID NO: 356642

SEQ ID NO: 356672 - DNA, 567 bp, Pseudomonas aeruginosa; identical to SEQ ID NO: 356641

SEQ ID NO: 356673 - DNA, 1701 bp, Pseudomonas aeruginosa
atgaacgacagcatccaactgagcggcctgtcccgacagctcgtccaagccaatctactcgacgaaaagaccgccgtgcaggcccaggcgcaggcgcagcgcaacaagctgtcgctggtgacgcacctggtgcagaacaagctggtaagcggcctggccctggccgaattatccgccgagcagttcggtatcgcctactgcgacctgaatagcctggacaaggaaagctttccgcgggacgccatcagcgaaaagctggtccgccagcaccgggtcatccctttgtggcggcgcggcaacaagctcttcgtaggcatctccgatcccgccaaccaccaggccatcaatgatgtccagttcagcaccggcctgacgaccgaagcgattctggtcgaagacgacaagcttggcctggccatcgacaaactgttcgaaagcgctaccgatggtctcgcaggcctcgacgatgttgacctcgagggactggatatcggtagcgcggaaaagtccacccaggaggataccagcgcagaagcggacgacgctcctgtagtacgtttcgtcaacaagatgctgctggatgccataaagggtggctcttccgacctgcacttcgagccctacgagaagatctaccgggtgcgcttccgtaccgacggcatgctccacgaagtggccaagccgccgatccagttggccagccgtatttccgcgcgactcaaggtgatggccggcctggacatttccgaacggcgcaaaccgcaggacggacggatcaagatgcgcgtgtcgaagagcaagtccatcgacttccgcgtcaacaccctgccgaccctgtggggcgagaagatcgtgatgcggatcctcgactcctccagcgcacaaatgggcatcgacgccctcggctacgaggaggaccagaaggaactctacctggccgcactcaagcagccacagggcatgatcctggtcaccggccccaccggctcgggcaagacggtatcgctatacaccggcctgaacatcctcaataccaccgacatcaacatttccaccgccgaagacccggtggagatcaacctggaaggcatcaaccaggtcaacgtcaacccgcgccagggcatggacttctcccaggcgctgcgcgccttcctgcgccaggacccggacgtgatcatggtcggcgagatccgcgacctggagaccgccgagatcgccatcaaggcggcgcagaccggacatatggtgatgtccaccctacacaccaacagcgccgccgagaccctgactcgcctgctgaacatgggcgtgccggcgttcaacctggcgacctcggtgaacctgatcatcgcccagcgccttgcgcgaaaactctgttcgcactgcaagaaagaacacgaggtgccgagggaaaccctgcttcacgagggctttccggaagacaagatcggtaccttcaagctttattcgccggtgggctgcgaccattgcaagaacggttacaagggccgtgtcggtatttatgaagtagttaaaaacaccccggccctgcagcggattatcatggaggaaggcaactccatcgagatcgccgagcaagcccgcaaagaaggcttcaacgatctgcgcacctcaggcctgctgaaagccatgcaggggatcaccagcctggaggaagtcaaccgcgtgaccaaggattaa

SEQ ID NO: 356674 - DNA, 612 bp, Pseudomonas aeruginosa
atgacccaaccctggatactaggcctcacgggcggtatcggcagcggcaagagcgcagccgccgagcatttcatttccctcggcgtccacctggtggacgccgaccatgctgcccgctgggtggtggagccggggcgtccggccctggcgaagatcgtcgaacgcttcggcgacggcatcctcctgcccgatggccagctcgaccgagccgccttgcgcgagcggatcttccaggcgccggaggaacggcgctggctggagcaattgctgcacccgctgatcggcgcggagatcgtccagtacctggccagggccgaatcgccctacgccatcctggtctcgccgctgctggtggagtccggccagcgccagatgacccaccgcgtgctggtggtggataccccggaacatctgcaactacagcgcaccatgcttcgcgacaaggtctccgaggagcaggtgcgctcgatcctccaggcccaggcccggcgcgacgagcgcttgaagcacgccgacgacgtgctggtcaacgacggcgacctgtcccacctgcagcgtgaagtcgaacgactgcacgccttctacctgaccttgcgaggaggccgagcatga

SEQ ID NO: 356675 - DNA, 201 bp, Pseudomonas aeruginosa; identical to SEQ ID NO: 320805

SEQ ID NO: 356676 - DNA, 210 bp, Pseudomonas aeruginosa
atgggtgtccatgaatgggcccgacagggcctgcgagagttgctgtcgaagagcgacgaggcggaccgggcaatgcgcctgcgcgcgttgctcagcgcaatcgtcgaactgaaccgggcggagcgcgatgctggcgacctggccagcgaactgcaatttcttgcggagaatctcgatgaccagcgcgactacgctttcatgcgcccctga

SEQ ID NO: 356677 - DNA, 690 bp, Pseudomonas aeruginosa
gtgatcgctgccgagttgctgtcggcggaaagcctggaactgggctgggccatctatgcgccggtgctgctgctcgccgcctggcgcgcgccctgggtcgagctggtcagcgatacccgccgccagcacctggtgttcggtaccatgctcgggctgttcctgctctggctggtgcgccgggacttcgaatcggggctgtccttccatttcatcggcatgaccgccgtcaccttgctgctcgactggccgctggcgatcgtggtggggctggtggcgcaactgggcttgtgcctgctcggccgccaggattggctggcgatcggcgtcaacggcgtgctgctggtggcgatccccgcgctgatcgcggagctggcggcgttgttcgtggaaaagcgccagccgcgcaacctgttcgtctacatcttctgctgcggtttcttcccggcggccctcaccgcggtggtggtcctgctgctcggccttggcgtggtctggatcgacggccttttcccgatgccgccctggctggaggacttcgccggttacctgtggctgatcatgttccccgaggccttcatcaacggcacggtgatcaccggcctggtggtctactacccggagtggctggaaaccttcaatcgcacgcgctacctgcaggcaccctggaaggacgaagagcgcaagccctga

SEQ ID NO: 356678 - DNA, 471 bp, Pseudomonas aeruginosa
gtgaaacgattgcattgggttctgctggccatgctgctgcccggcctggcactggccgtggagaagggctccaccctggagccctggacgttgcaggaccagttcgaaaaggcgcactcgctggacgactccacccgggtcctgctggtggcgcgggacatgggcggctcgaagctggtcaaggcggcgctggcggaacgcccaaagggctacctggaggcgcgccacgcgctgttcctggcggacatcagccgcatgccggcgctgatttcccggcttttcgcggtgccggccatgcgtgattacagttatccggtgctgctcgatcgcgacgcggccatcgcttctcgctatgcctcggacgagggcaaggtgctctgggtcaggctggagcagcgccgcgtgttggaaacccgccagttggattcgccggtggccctgcgcatcgccctggaacaactgcagccgtga

SEQ ID NO: 356679 - DNA, 426 bp, Pseudomonas aeruginosa
atgcaacttcgcagcgtcatcgccgccgatcacccggcactcttcgcgctatggtcgcgaacgccaggtatccgcctccgtgcggaggacgcctatcccttcttcctcgcctaccttcaacgcaaccccgggctgagcctgctggtcgaaaccgaaggggaggtgatcgcctgcctgatggccgggcatgacggtcgccgtggttacctccagcacctggtggtcgatcccggttatcgagggctggggctggcgcggcggatgctcgacgaggtgttggcgcgcctggcgagggaggggatcggcaaatcccatgtcttcgtcctggatgccgccgaggaggcccaggcattctggcgagcccagtcggactgggagcggcgcaaggacatccaggtattttccactcgggagggacacgcgtga

SEQ ID NO: 356680 - DNA, 630 bp, Pseudomonas aeruginosa
atgaacgaagcggattatctgcgcctgctcacccgtcaggccgaacaagccaacgacttcctctccaacgcacataaatgggaccgcgagcgctgggtctgccagcgcttcctcgaagccctcaacgtgccctatcgccaggaggatttcgccgcccccggggaacagccgccggacgtcatgttcaagggtgccggcttcgaggtgttcttcgtcctcgatgaaggtcgccggctgaacgaggagtggcgcgaggaactgacccgtcgccgccaggccgtcagcctgcgccaactgatccgccgcgaagagcggccacaacggatcgccgccgccgagctgcaggcacggctggcgccaaccctgcgcaagaaggcgcacaactatagcgagcgcggcatcgaccacggcgaactggacctgctggccttcgtcaacctgaagcgcgcggtgcccgatttcaatacgcccttcccgccgcccaccgaatacctgcgccaaggctggcgctcgctgtcgatggtcggtccgacctttgcccgggtgctcttcgctcactccggcgcccccgaattcctgcgcgccaacctcggccgcagcatcctgttcgacgccggggtaggcctgtga

SEQ ID NO: 356681 - DNA, 171 bp, Pseudomonas aeruginosa; identical to SEQ ID NO: 320798

SEQ ID NO: 356682 - DNA, 1308 bp, Pseudomonas aeruginosa
atgtcccatcgcatcgtgatcgtcggcggcggcgccggcgggctggagctcgccacccgtctcggccgcaccctgggtaaacgcggcaaggcccaggtcaccctggtcgacgccaacctcacccacatctggaaacccctgctgcacgaagtcgctgccggctcgctcaactcctccgaggacgagctgaactacgtcgcccaggcgaagtggaaccacttcgaattccagctcggccgcatgcagggcctggatcgcgccggcaagcgggtccgcctggccgcactggtggacgagaatggcgttgaactggttcccgagcgcgacatcgcctacgacaccctggtgatcgccgtcggcagcaccaccaacgacttcggcaccgagggcgctgcggaacactgcattttcctcgatacccgcgcccaggccgaacgcttccaccgacaactgctcggccagtacctgcgtgcgcataccgggcacgacgcgaacaacaacgcagtgagtatcgccatcatcggcgccggcgccaccggcgtcgaattggctgcggaactgcaccacgccgcgcagatgctggccgcctacgggctcgaccggatccgcccggaagacctgcacatcagcctggtcgaagccggcccgcgggtgctgccggcgctgcccgagcgtatcagccagccggtacaccagaccctgagcaagctcggcgtacgggtgatgaccggctccgcggtgagcaaggtagatgcggacggcctctggaccggcgacggcgaattcgtcccggcgacgctcaaggtctgggcggcaggcatccgggctccggccttcctcaaggaactcgacggcctggaaagcaaccgtatcaaccaactggtggtccgcccgaccctgcagaccacccgcgacgacgacatcttcgccttcggcgactgcgccgcctgtccccagccggcgcaaccgggagagcaaccgcgcaacgtgccgccacgcgcccaggccgcgcaccagcaggcctcgctgctggtgaaatcgctacgtgcccgtctcgaaggcaagccgctgggcgaatatcactaccgcgactacggttcgctgatctcgctgtcgcgcttcagcgcggtcggcaacctgatgggcaatctgatgggtagcgtcatgctcgaaggctggctggcgcggatgttctacgtatcgctataccgcatgcaccagatggcgttgtacggtccgctgcgcaccgcgatgctgatgctcagcggccgcctgcgcagcaccgagccacgcctcaagctgcactga

SEQ ID NO: 356683 - DNA, 1059 bp, Pseudomonas aeruginosa
atgaccggcaccaagcccacaacgcccgtagcccgctatttccaccaagaggcgcaacggcgcggctatgtgctggacgcagcccagggcaatgccattcttcatctcgatcgattggcggagcgcttgcgtcgaggtccgtcgctattccggcaagcgccgcgcagcctctacctgtgggggccggtcgggcgcggcaagagctggctgatggatggcttctttcgcagcgccgatttgcagggcctgcgccggacgcatttccatgcgttctttcgccggcttcatgacggcatgttccgccgccaggggcggcccgatgccctgggcggtgcgctcgacgaactgctaggagattgccggctgctttgcttcgacgaattccatgtccacgacattggcgacgcgatgctgataacacgcctgttcagggagctgttccgcaggaagatcaccctggtctgcacctccaactacgcgccgcggcaactgctgcccaatccgctctaccacgaacgcttcctgccggcgatccggttgatcgagacgcgcatggaagtgctggaagtagccggcgcccgggactaccggacgatttcgccgcggcaggagatcgcttccggttatgccagcggcgggtattgctggccagcctcatgcgcttgcctggatgagctgggcttgtccgcgcccgagcgctcgcaacgcgtgaccctgcaaagcggcgcgaggacgttgcaggcgcgcgcggtgtgcggcgacctggtgtggttcgccttcgccgacctttgcgaggcgccaaccgcggtgatggactaccttgccctcggcgaacgcttctctacctgggtgctggacggcgtaccgccgatggcgtgttgttcggtcgccgcccagcagcgcttcatcaatctcgtcgacgtcctttacgacaatgaccggcgttttttcctgagtgccgaaaaggcgctgccggacctggtcgagggcagcgacctgcctgcggacatgcagcgtaccgccagtcggctggcgcagttgcgccagcttcgctgttga

SEQ ID NO: 356684 - DNA, 867 bp, Pseudomonas aeruginosa; identical to SEQ ID NO: 345942

SEQ ID NO: 356685 - DNA, 738 bp, Pseudomonas aeruginosa; identical to SEQ ID NO: 326415

SEQ ID NO: 356686 - DNA, 126 bp, Pseudomonas aeruginosa; identical to SEQ ID NO: 326417

SEQ ID NO: 356687 - DNA, 1458 bp, Pseudomonas aeruginosa
gtggttgcggtagtggaacaggctgatgttccagcgcgagccgagcttgtcgagaaagttcagcaaggccccggggcgttcgggaaactcgaagcggaacagccgctcgcggcgcacctcggtaccgtggccgccgaccatgtggcggatgtgcagcttggccatctcgttgtcggtcaggtcgagtaccgggaagccctgctcgcgcaggccggcgagcaggtcggcgcgactgtcggtgagcggatgggtctgcacgccgacgaacaggtgggcctggcggtcgctgtggtagcggtagttgaactcggtgatctggcgccggcccagcgccgcgcagaaggccttgaagctgcccggccgctcggccacggtgacagcgatgatcgcttcgcgctgttcgcccagttcggcgcgctcggcaacgtggcgcaggcggtcgaagttgatgttggcaccggagtcgatggccaccagggtctgcccctcggtgcgttcgcgggccacgtacctcttgatccccgctacggccagggcgccggccggctcggtgatcgaacgggtgtcgtcgtagatgtccttgatcgccgcgcagatttcgtcgctgccgacggtgatcacctcgtcgacgtggtccttgcagacctcgaagttgcaagcgccgatctgcgccaccgccaccccgtcggcaaacagcccgacctggcccagcaccacccgctcgccggcggccagcgctgcctgcaggcagttggaatcctccggctcgacgccgatcacgcggatatccggacgcaggtgcttgacgtaggcggcgatcccggcgatcaggctgccgccgccgaccggcacgaagatcgcgtcgaggcggccgctgtgctggcggaggatctccatcgccaccgtgccctgtccggcgatcacgtccggatcgtcgtagggtgggacgaaggtcatgccttcgcgctcggccagttgcagggcatgggccagcgcatcggggaaggcgtcgccgtgcagcaacgcctcgccgccgcgcgccagcacgcccttgaccttgagttcgggagtggtgcgcggcatcacgatcaccgcccgcacgcccaggcgctgcgccgccagggccaggccctgggcatggttgccggcggaggcggcgatcaccccgcgggccttctgctcgtcgctcaggcgcgcgacacgggtataggcgccgcggatcttgaaagagaacaccggctgcaggtcctcgcgcttgagcagcacccggttgcccaggcgctgggacaactgcggcgcgacctgcaagggggtttccacggcgacgtcgtacaccggcgcggccaggatgctttccacgtagccggccagcaggggtttgcttgcgctgagggtcgaggcgctcatcggctggcctccgcgctcgccgccaccgaggccagcaggtcggtgccgtag

SEQ ID NO: 356688 - DNA, 210 bp, Pseudomonas aeruginosa
atgaacgttctgcgcaaatgcctgggcgcgcctcgccgtgcgctctgcgccctggcggtgcggctgctggcgaaggccgcgcacctgctgatggtgctcagcgtgcgtgcctacgccagcggccacctgagccagctcgaagtgaaatacctgctggactgttcgagcgcgctcaaccgcgcctcgctcagattggcgaggggcgggtga

SEQ ID NO: 356689 - DNA, 135 bp, Pseudomonas aeruginosa
atgatctatagaagcctgaacgaaacggctttttcggttgacctcgcctggctagaggtctataaaacccccgcccgcgagaccgggcactttctttccccctacgaagagagccatggacagtattcccagtag

SEQ ID NO: 356690 - DNA, 744 bp, Pseudomonas aeruginosa
atgagcgaaccaacggggccctcgggccccgtttttcatggcctgtctgccgcccctgccaagcgagacgccgtcccggcctcggcagggcgcccgttcgacaccgtcggtccaaagcgtggcgtagggcgaataaccgcatcgcggttatccgccggttcggcgggggctgcggcggataacgccgctggcgttatccgccctaccgaccgaaaaacagcccaacctcggcatgacatccgcttggcgctcatccgccggctcggcggggcaccgccccttgcccggattttgggcagcgtgcaccagcaggcgacaaatcggcagcaatcgctggcggaaaagcccgctccgtcatttttccgcaatcaacttcccacaatcccctgggatgccgccaagcccttgatccacgggcttccagagatattaatcaccagctcgcccacagacttatccacaggctcctcaggtaagccagtacgccgccagcgccccatgaaaattggcacagcccctgcattgaagcagacaacgaagatttcgggggcctcggtacaggcaggctggggaatccccccttttacatccggcggcaggcgcagcatccgcgcgcaaccgccacacccgtttcggggacctcggtacaggcaggctgagcactcccctcttttatgcccggcggcagcgcagcgacccgcgcctccgccctcccgtttggggacctcggtacaggcaggctga

SEQ ID NO: 356691 - DNA, 327 bp, Pseudomonas aeruginosa
atgagcgaacatatcgtcaacgttactgatgccagcttcgagcaggacgtgctgaaggccgacggccccgtgctggtggactactgggccgaatggtgcggtccgtgcaagatgatcgcgccggtgctggacgaagtcgccaaggactatcagggcaagctgaaggtctgcaagctgaacatcgacgagaaccaggacaccccgccgaagtacggtgtgcgcggcattccgaccctgatgctgttcaagggcggcaatgtcgaagcgaccaaggtcggcgcactgtccaagtcgcagctggcggccttcctcgacgccaatatctga

SEQ ID NO: 356692 - DNA, 924 bp, Pseudomonas aeruginosa
atgaaatttcatcgatttactcatttggggattctatcaaattgggggtggtactcaccccaagaaaagaagttgctcgctcaggaaatggcagtgggaaaagcggtgctcgagttggagccattcataagaatcagcccagccatgcaggtacagctgaataaattccatgccatacaaaccaatatgtctgtcaacgtggaagagtatgcgacagtagaaaaggaacttgatcgacttgctagtgccataaaagatgctcgattggacattctgaatgcggacggtgacaacatacctgcttccgctggagcctttcggaatcatcaccccgatgcacttataggagaaattcaaagcttcctgcattatcaacgctctcggcaagaggaagggcatgtcgacccgtccatgctggggttcagaatcaagtatcagcaagaccctgacgagttccatgaaatcatggctcttggcggaaaagttctctacacagtttccatcgacgatattcttaccattggcgatcctaaaagtactaagcactcagttgtcgctgcgggtgtcgattgtaaagcagcaggcattgctcaattggacattgacaagaatgctgatatttacggagcagtacaggactatcgaaagaagatccttattctggacatggagatgtcaaagcaccccgaagactcaaaggcgtggcaggaatttaaggacaatcgggacgttatggaggaacaggctaaggaattggagacaggactagccgggtgggttcctccagctcagcaatctcgtcgggttctcattgacttcgacagtggacattacgcgccgcattctgcatggaaagaggcaatggctgcttggcgtgcagctggctacgagccccgttggtcgcctaactcaaggcgggtctaa

SEQ ID NO: 356693 - DNA, 609 bp, Pseudomonas aeruginosa
gtgtccatttccctgaaaagtctcctggctgccgcagtagccagccttgttgtcggcaacgctatggcggcagacggcaccatcaacttcaccggtgaaatcagcgctgcatcctgcaacattactggcggtgccggtaccactgtcggtggcgaaaagggcaaccagaccatcaacgtaaatctcggcaaggtcagcatcgacgctctgggcggcaccgctggtagcggcatcgccggcggtaccaacatcaacctgaatctggattgcggcaataccggcaccggcctgaccaccgtcatgctcaagttcgatccacgttccggttctggtctggataccaataacgtcagcctgttgaaaactacgggtaccgctagtggcgttggtattggcatctatgatgtcaacggcaagctgttgaacctgtctgcaaacgaaactttcgatgcggacctgatcgccactactactggcgaaggtgctgatgccaagactacctatagcgcgaagctggatctccgcgcgggctatgtgaagtccggcagcgcagctccgaaagctggtaccgccaacggcaccttgccgttcacccttacctataactaa

SEQ ID NO: 356694 - DNA, 2511 bp, Pseudomonas aeruginosa
gtggccattttcaggaaaaagttgaacttcaagatcgcgatttgttcgggagtgccctgtttcgtaacgttagggctgttctttccagatactgtgcgagctgtggagtttaacgcggatttcctgcaaaagggcaatggcccggtggagcttcagtatttcgaaagaggaagctcggtactgcccggttcgtataatgtagacgtctacctgaaccagaggatgatcaggcgtcaggacgtcaatttcagcgcgacctcggaaaccggtgaggtaaagccggtgatcctgttggggctgttgagggatctcggtgtggatgtccccaggctgatgcgggaaaatatcattccggctaaccttgagaacaacatgccgctggatgttgccggcctcattcccggtgcctcggtggagttcgatgtcaataacctggctttactggttagcattcctcaagcttacgtgcagcgtcattctcgcgggtatgtcgacccatccctttgggatgatggagtcaccgctcttttcagcaattaccaggctaatttgagccgcaatacctataatggcgagcacagcgattatcgatacctggggttgcgaaatggcttcaacttcatgggttggcgcctgcgcaacgattcctcctttagtggcggtaccgacaggcataacaagttcaccagcaaccgcacttatgtagagcgtgacattcgtcgtctgaagggtactctggcttttggtgagctctacactcgaggagatatcttcgacagtgttcgcatgcgcggcgctcaactgtattccgacctcggcatgctgcctgataacgaaatcggttatgcgccggtggtgcgtggtatcgccgaaaccaacgccacggtagaagtgagccagaacggctacgtaatctattccaccagcgtttcacccggtgcgttcgagatcaacgatatctatcccagcggctccaacggtgatttgcagatcaagatcatcgaggccgatggacgtgaacggaccttcaggcagtccttctcctatctcccggtgatgactcgcaaggggaacgtgcgctacgcattgtccgctggtgaatatcgcaccgatggacagccttcgcccaagcttttgcaggggactgcggtgtatggcatgtcggacaatgtcaccggttatggtggtttgctttctgcggaaaaatacaaggcgttcaacgccggtgtgggcctcaacacgccttatggcggcatgtcggcggacgtcacgcacagccaatccgatacccggaggtcaggcaggaaccagggacaaagcttgcgtttcctctattcgaagaccatcaatgctactgagaccaacttcaccatggtgggctacagatactccaccgagggttatcgtaccttgagccagcatgtggaagacctgtccagccaggactatctcaatggcattagctacggaagacagaagagcagtcttgacctgaccgtgaaccagacgctgttccgccgtagctcgatctatctgagcgccggagaaaccacttactggaatcgccagggtagtaccaggcgttggcaatttggctatagcggtagcgttcgcaacgccagctacagcctagctgtgtcacgcacgcaggatactggtcctgtgggacagtcggatacccagttcaccgcttccatcagcattcccttgggtagcactaaacgttcgcatcgggtctacgccaacgcaacttcttcccagaatggcgactccagcctcagtacgggcgtttccggatacctggatgaaaagaactcggtcaactacagcgcccaagccaaccatagcaaagacaacggtagctccggcagtctcggcctaggatgggatacagccaaggcgaagctcagcgccaactacagccaaggtcgtgacgacaagcacttggacgtcggggcgagtggctctgtggtggtccatggcggaggccttaccctcgggcagccggtgggggagacctttggggtggtggaagtgccggaagtcggcggggtcggtcttgatggctatacctcggttcgaaccgatagccgtggctttgcggtggttccctacatgcagccttatcgttacaactgggtgaacctcgataccaacacccttggcagcgacaccgaggtcagtgaaagttcgcaggtggccatccccacccgcggcgctgtaattgccaagcgcttcgccgccgaatcgggacgtcgcgtgcagttcgacctgatgctggcctccggcggaaagattccattcggtgcccaggcctatgatgaagagggcaaggtcatcggtatggtggacaacctgtcccgtttgctggtcttcggtttggaggatcagggacgcatatccatccgttggagcggaggcacttgcgtagcgaactaccagctgccgccgaagaacaaagatctgacgtatgagcgtgtacccctcagttgccttatgtcctccgactga

SEQ ID NO: 356695 - DNA, 861 bp, Pseudomonas aeruginosa
atgaatgacaattggggctggacactattagttaagtatgttccgctgaccttgccctttgcttttattgcagttgctatcgcatacatgaactacagacgaaaatctggcctgctttttcgttgcaatttcactatttctgtaagaagggaaagtagctatccacatatttcagaggtcctattagaaaacctgaaagacaggtccgttacaattttttctatttatttgcggatagggaaatacatctacatagaactaaagaacttcgaggattcacctcttttaataaaggcttacgaagcctgcaaattagaaattgacttcccctacgcctatcgaatagatggtgaggcaatagatatttccaatgagattttagatttaaaaactgaaaaaagaatcattctatcaactagcgaaggaaagtatgtaatccctaaaggtatatctaaatggactccagctaaagagagactaaaaaaccctgccgtgatagaaatttctggaaaccctttaaactatggcggagttcctatcggggatagaagtatttatcttgtctccatttataagtctggcgagaaaatagaatcatttcaagtggacgctatgacatctcgaataaaaggagtctctatagataaagaggatttggtaagcgagaaatctctacaagagaagctaaactacaattacgagccagattaccattttttagtaaatgaaatcccaagactgaaagagactaaaaagaaaatttcagagatatcaacatttcacgccttttctcttaagttaggcagaattttttatcgaggaaaatctcctaacactattatagacaaggaggggaaatag

SEQ ID NO: 356696 - DNA, 321 bp, Pseudomonas aeruginosa
gtggcgcccctcgaacggctcgaccgcgatcgcgattttcctccggatgccgtcgtcgcggcctggggcggctgcttcgagctgctgtccggcgtgggtctggaggtggcccgcctgcttgggctgaaccttggcgggatcgccttgcaacaatggcggaccacaggcgctgccgtgagccagctcgtactcggtgcaagccctgagcagcggggcgaaattgtcgatcgcttgcgccgcgtggccagcgaggtcgcaccgctgcgtcaggcggtggagagcttcggggtgcccatggcggggaagccttcaatggcataa

SEQ ID NO: 356697 - DNA, 231 bp, Pseudomonas aeruginosa
atgaaaacggatcctctggggtacccgtcattcatacacgccgttcgcgcccggaacgctcaggccaggcagcgtcaagcgcaagccctgcgcctgaggcttgtccgccccccgcgcggctgccaggtccagggcggcggaaagatcaccgtcatcgtggccagcctggtcctcctttatgccattgaaggcttccccgccatgggcaccccgaagctctccaccgcctga

SEQ ID NO: 356698 - DNA, 468 bp, Pseudomonas aeruginosa
atgccccgcatcccccctgccctgcatgcccgctggctacggcttcccctgcgcgaacgccgggcgctgctcggcctgctgctgttcctcggcctggtcctggcctggatcctgctctggcaaccgcaacgccaggccctgctggatgccgagcgccactaccaggaagaactgcgcctgcgtgccgacctccagcgcctgcctggcgccctggatagcgacccgcgtatcgatgccgcggccctgcccggcctgctggcgcgcagcagtgcgcacgcgcgactgaacgtggagcgcatggacagcgaaggcagcgggcggatgaacctcagcctggaaggccagctcgccgacctgctcggctggttcgaacggctcggccgcagcggggtggagatctccgacctgagcctggaagtcagcccggatgcgctcgcccgggcccgcctgacagtggatgtccgttga

SEQ ID NO: 356699 - DNA, 1080 bp, Pseudomonas aeruginosa
gtgcaagcctggctctacctcacctccaccgccgacgacgcgccgctgacctggtggcgcgccgatggcatcgtccaccacggcgacctcgaacaggccgccgccgaactggccgaggccgaactgaccctgctgctgccggccgaagccgccagccaccatgaggtcgaagtgccggcccgcagcggccgctggctgcgccaggcactccattcggcgctggaagaacgcctgctggaagacctcgacgacctgcacctggcacgcgccaacctgcgcgacgggcgtttctgccgagtgttcgccgtgcgccgcgactggctgcgcgaacgtctcgcgcagttgctggcactgcgcctgctgccgcaccgcatccatgttgacgccgattgcctgccgggcgacccgccgctggccctgcgctgcgccggacgctggctggtggcggccggggagacgcaacgactggcgctcgacgacgacgccctggaggacctcgcgcccctgctccccgatggcctgcgacgcagcgaggaaacgccctggccggtgctggccgaaggcgcacgacaggccatcgacctgcgccaggacgagttcgccgcgcatgcggagaagcggatccactggcccttgctggcactactcgcagtgctcgcctgcgcggcacagctgggccaggacatcggccaccgcatgctgctggagcagcgcagcacggaactgcggcaaggcaacctggcgctctggcagcaacgcttccccaacgaaggccgggtcgtcgacctggctcgccaagtacaggcgcgcctgcgccaggacggacagtcgccggtcgacctggcgcgccgcctggaacgcctggcccatggctggagcgccggcggcggcgccaccgccacggtccgccggctcaactaccaggccggcgaaggctggagcctgcaagtcggagcgccggccttcgccgatctcgaacgcctgcgcgaagggctggcccgccagggcctggacgtgcaggccgactcctcggtgcgcgacctcgacggcgtcagcgcgcgcctgcagataaaggattga

SEQ ID NO: 356700 - DNA, 873 bp, Pseudomonas aeruginosa
atgactgaccggcagcgcggcgtggccctgatcagcgtgctgttgatcaccgccctggttaccctgatcgtcagcgacatgctcgcccgccaacgcctcaacctgatcagcagcgccaaccagtccgcccggcagcaactctggcaactggccctcagcggcgaagcctgggcgcgccagcaactgctggccgacctgcgcgaccagcaaggtctcgctcgcgtccacctcggacagcgctgggcgcaaggcccccaggaattcgagatagagggcggacgcatccgcatccgcctggaagacctcggcgcacgcttcaacctcgaccgcctgcgcgacggtcgcgaccgcttcagccacgcccgctaccagcgcctgctggccctgctcggcctggccccgcacgaccccgcgcgactctcggcgccgctcgggcgcgacggcaagccgctgcccttcgccgacgccagcgaactctggcgcctcgcggcgctggacgccgcgggcatgcgtcgcctgcgtccatgggtggcggcgacgcgcgatggcggcctgaacctgaacaccgcaccggccgaacagctggccagcctcgaagggctcgacatgggcatcgcccaggccctggtgcaggctcgcccggccgatggctactccagcgtgcaggcattcatcgagcagccgctgctcgccggccgcaaggtcgagcagtacggactcagcgtcgccagcgaacgcttccgcgcggtgctcgacgtcgccctgggcgagcaccgcctacgcctggtcagcgacctgctgacccgcagcgacgggcaggtgcagatcctgcgccggcggctcgcggcccccgaccttcccttttcggagtaa

SEQ ID NO: 356701 - DNA, 384 bp, Pseudomonas aeruginosa
ttgaagccctgtgacagcagccggcagcagggtttcaccctgctcgaagtgatggtcgccctggccatcttcgccatcctctcggtagcgctctatagcgccgcccagcacatcgccggcaacagcgccggtctgaccgagcgcagtctcgcccagtggctggccgacaaccgcctcagcgaactgcgcgccggcatgcgtccgctcgacgatggccggcgccaggaacgcgtcgccttcgccggtcgcgactggttgctggacagcaccgtcgaggccgcgcccgacccacgcctgcgcaaggtcagcgtcgaggtctcggtggccggcgcgcggccgctgcggcgtgccatgctggtcggcttcgtcgaggcgcggcgatga

SEQ ID NO: 356702 - DNA, 507 bp, Pseudomonas aeruginosa
atgcttgctcgcggcatcccgcgatcctccggacagcgggggttcaccctcctcgaagtgctggtggtggtcctgctggtcggcctgctcgccggcctcgtcggcctgacccaggtcgacgccggcggccagcaggcacggcgcgaaaccgaacgcctgcgcagtctgttctccctgctgcgccaggacgcgctgctcagccatcgcgactatggcctgcgcatcgagcagcagggttattcggtacaagtgttcgatgccgacggcgagtggcggccagctcccggctaccgcccgcaggcgctgccggataccctgcgtctggtcctggagaccgccgacgacgcgcccgccctcggtccttcgcacaaccgccgggacccgcagttgctggtgttgtccaacgacgaggtcacccccttcaccctgcgcctggaatatcgccgcaagcccctgtacgcgctgtccagcgatggcctccaggaggtccgcgttgaagccctgtga

SEQ ID NO: 356703 - DNA, 513 bp, Pseudomonas aeruginosa
atgcttcgccgaatccccgttcgcccgtcgccgcctggcctgctcctgtcctgcgccagcctcgccttctgcgcctggctgggctggctcatcctggacagttggcaatacggccacgccctggacgccgaggacaacccgccggcgccgctcgcggccgagcctcgcccagcgcccacgccgctggatacccgcggcatagcccggctgttcggcgccatgccggcagaacagcagcaagcggtaccgttgagcctgctcgccagcctcgccgacactcgcgcggaacgctcccgcgccctcatccagtcgccccagggcgccgccttctacggcctcggcgcacgcctgccgggcggcgcggtcctcaaggccatcgccaccgaccgcgtgctgatcctgctgggcgggcacgaacaggtcctcaccttccccagccacaccacccgcctgctggcgccgctgtccgccagccgcgatgcaaccaccgccgaggcggagagcacacgatga

SEQ ID NO: 356704 - DNA, 516 bp, Pseudomonas aeruginosa
atgacctccgacaaatacacgcggccgcgcatgctgctgcactggtgcttcgccgcgatcatcatctgggccagcatcagcggcttcgtcaatgcactgctgtccctgcccgagccgattgcggacaccatcgcgtccgtcaacgtctcgctgaccaccctgctgatccccctgctgggcgcacgcctgttctacgtcatggcccaccccgcaccggaagaaacggggcatttcggccaagccggccggttgctggccaagtgcgttcacctggcgctctacgtcagcacctcggtagtgttgctgtccggggtgctgatgatggagcggccgatcgacttcttcggcctgctggcgttcccccagccgctgcacgagccgctgctgaccggcttcttcaacgacatccaccgctacagctgcatggtcctggccgcgctggtgacgggacacgtcgctgcggtagttctccatcaactgcgcgggcacccagtgctgcgacgcatgctgccgtga

SEQ ID NO: 356705 - DNA, 3570 bp, Pseudomonas aeruginosa
ttgaacagagctcgaaccctgcctcgggcaggcggcttcgcgctccttatcggccggttggcactatgcctcctgggcctgctgccctggcagccaacgagcgccgccgacgccccgccggcacagccggtcagcctgacgcaattgctgcgcatgcgccaggaactgcccgaacggcccctgcgcatcgcccaggtggcatacccgcccggacagcaggaaagcaatggcagccggatcctcaacggcatcggcgacgattacctgcgactcatcggcgagttcctcgacctgccgctggagcgcgtcgcctatccgtcggtggaagcttccttcgccggcctgcgcaacggcgaggtcgacctgctgccgcgcgccagcgacttcgaaaggcacctgcccggactggtcttcagccatccgtacctgaatagcgcgccgatcatcatcggtcgcagcgacgaccagagcctgccgcccgacctcaagggcaagcgcgtgctgctgctcaaccactacctgcaccccgccacggtccgccaggcctacccggaagccatcctggaaagcgtccggggtaccgccagcggcctccagcgcctggccgaaggccaggccgacgccttcatcggcgacaagacccgggccaatcgctacatgctccagcgccccgacctgaagctacagaacaagttcgctgccaacctccccagcgagggcttcgccttcgccgccctggattcccgccgggacctgatcagcctcgtcgatcatgtgctggaaaccatcccggacagccgcaagcacgagttcctgcaacgctggacgccgtcccgccagctgttcgcgcccaccgaggccttcgccctcagtcatggcgagcgcgaatggctcgggcaaaagccccacctgcgcctgatcgtccgctcgaacccgccgtatttcttccgcaacagccacggtcagcgggacgggctcggactggacgtgctgcgctacctctccgatgcctacggactgccgctggaaatcctcgacggccagtcgccagcgcaagaccagcgcagcctggagcgcggcgaggcgctgctcgccagcagcatcccgcccacgccagagcgacgccgccggttggcgttcagcatgccgttcggcgtccaggactgggcgttcgtcatccgtccccactccagctcgcccagctcgctggaggcgatgaccggaagacggctggccatcgccgccgaccacccactgcgcgactacctggcgaagcgctacccacggatcgagctggttctcaccgaaagcggccacgaatccttctccctggtcgaaagcggcgaagtagacgccacgctacagagcgtccataacaatcgacgctggttgcaggagcacggtctgcgccagggcgagcacgtcgaggccacgcccacgccgcaggtattcgccctcgccccaggcaaccgcgaactgctcgggatcctcgacaagctgctcggcaaccttgcccaggaaggcgatgcaggctccgggctgcgcctgatggccagcggcccgcaggacgacaacctctggcagcacctacccgatgggttctggcacgcgctgctgctggtggcggtgatcatcctgctatcgctgctatggaactggcggctgaagaaccaggtacgccagcggcggatcgcgcaaaaccagctgcgcgaccagttggcgttccagttctccctgctcaacggcctgcccacgccgctttacgtgcgcgacctggaaggccgcctgagtacctgcaaccgtgcctacgagcaattcttcggcagctcgctggaagaaatgcgcggaaccacgccgtccgaacagggaatctgccccccgagcctggcgcggaccctggagctcgaatacggcgagctggtggagcaccgccagccgcgctacctcgactgctgcatcgaggtggctggcgaggcgcaccagatctaccaatggctggtgcccttctacaacgcgcgcggcaagctgcaaggcctgctcggcggctggatcgacatcagcgagcgcaagcacctggaaacccagttgcgcgacgcacgccggaccgccatggcggccagcgccgccaagggccagttcctcgccagcatgagccatgagctgcgcacgccgctcaatgccctggtcggcctgctcgaactggaaggccagcgcgcgccctcggaaaacctgcgcatcgcccagcgctcggccagttcgatgattgacctgatcggcaacatcctcgacctggacaagatcgagtccggccagatgcagctggcgccgcagcccaccgacctcggctcgctgctaccggaatgcctcgaactgttcgttgcccaggcccgtcagcgcgacctcgcgctcgagctggactgcgcgctgccggcgcaacgtcgctaccgggtcgacccgctgcgcctgcgccaggtgctctacaacctgctgagcaacgccctgaagttcaccgaggccggacgggtatgcctgaaggtggaggagcgatcgctggacgaacggcgcagcctgctggcgttccgcgtcaccgacaccggcatcgggattccccgcgagctgcaaccacgcctgctggaaccctaccgccaggcgcacgccgacacagccctgcgctacggcggctccggcctcggcctgagcatctgcaaccaactggtgcagttgatggggggacgcatctggctcgacagcgaaccgggttgcggctgcgaaaccggcttcgagctaccgctggaatggctgccggccacggaagaaccaggcgctgtcactcccatcggaagcgaagcggcgggtgccctgaaggtactgatagtcgacgacgtttccaccaacggcctggtattgcgccagcaactggcgaagctgggccacgaagccaccttcgtccgcagcagcgaagcggccctggacgcctgggaaaacgagcgctacgacattctcatcagcgactgcaacatgcccgggatggacggctacgacctgacccgctgcattcgcgagcgcgacaggcagcgcgggctgccacgccgcctggtgatcggctataccgccagcgccctggccggcgaggccgagcgctgtcgcgacgccggaatggacgagctgatgatcaagcccgtcaccctggggcgcttgcgcgaggtgctcgccagcgaacgcccggagcctgtcgctccccccgcgggttgcggcttcgatatcagccatgtggaaagcctgatcggagccgacccgaccctgttgcagcacctgctggccgaattgcgcggcaacctgcaacaggaacgggccgaactccggcaaccggtggcgcccgccgcggtggagcaactggtccatcgcctcagcgggctcgcctgcaccatcgacgctcccggcctgatccgcgcctgcctggccctcgaaagcgcggtcgggcacggcgaggctgccctgaaacggcaacaggcgcagctcctgagcgtcatcgatagcctgctggcggatgtcgaacggcagctcgcctga

SEQ ID NO: 356706 - DNA, 780 bp, Pseudomonas aeruginosa
atgagaaacgcttccctgtgcctcgccggcacgctcgccagcctctgctccgccgctgtcgccgaagaatggcattacagcatcggcctgggcgccaccaacgctccccgttatagcggcagcggcgaacgcgccagcgcgcccctcgtcgacctggaaatcgacggtccgcatggatttttcctgggactggacaaggggctcggctggaaacacgaatggccggacgccagcctttcggcctacataggccccagcgagcagcgcaaggaccgccgctcgcacttccatggctccgatcgcttgaacggcatgggctcgattcgttctcgcgcccagttcggcctggccggcacctacgacatcggaccgttcacgctgggagcgaccttcgagcacgccttgaggaaagatagcgaccgcgacacaggctccgcctacaacagcctcgaactgagcctttccagcggcctttacgaaggccgcttcggccgcctggacggcgcgctcaacagccgcttcggcgatggcgactacctgcggacctggtacggcgtcagtcatcgacaagccggccgcagccgcttcgaggcctacgatgccaacggcggactggtcagcatcggagccagcctgacctggagctacccgctcggaaaagacaccaccctggttgggctattcgatgtgcagcgcctggccggcgacgccggcgacagcccgatcgtcgagcgccggacgcagagtgccctcagcgcgctggtggaataccgcttctga

SEQ ID NO: 356707 - DNA, 129 bp, Pseudomonas aeruginosa
atgttcatcgccttcgccttccgcggccgccaaccctatgccgctcgccggaacacagcccagaatgcgatcttgcgtccgaaactggcgaaccggccggacgcgcccgcctccgccggaaaaccctga

SEQ ID NO: 356708 - DNA, 342 bp, Pseudomonas aeruginosa
atggaaaagcccttctcggatgatgtcagcgtgaatgtcctgcgtcgcatgaaagaaggcggcttcgacttcgcgcgtattcatcccatcgacttcttcgccatctttcccaatgagcgggaggcccgccaggcagcgggccagtttcgcggcgagtcgctcagggcccaggtcgtcgctcgcgacgatggcacctggaatttgcaggtcagcaaggtgatgtacgccacccatgccgccatcggtgccttcgaacacgacctggaggaagtcgtggtgccgctgggcggcgtgctggacgggtggggtgtgacccaggaggtcacttcgctgcgtccgtga

SEQ ID NO: 356709 - DNA, 2295 bp, Pseudomonas aeruginosa
atgaacaggctgtgcgtactggggcttctcatcgggctgagcgggagcccggcactggcggctggccagggcgaatccggcaatccgccggccaccgacaaggagcgtttcatcgccagcctgatggctcgcatgagcaacgcggaaaagatcggccagctacgcctggtcagcgtcggtgccgaccatcccaaggaagcgctgatggcggatatccgcgccggcaaggtcggcgccatcttcaataccgtgacccgcccggacatccgcgccatgcaggaccaggtccgccatagccgcttgaagatcccgctgttccatgcctacgacgtggcccacggccaccgcaccatcttccccatcagcctcggcctcgccgccagctgggaccccgaggtggtcgctcgcagcgcacggatctccgccctggaagccagcgccgacgggctcgacatgagcttctcgccgatggtcgatatcacccgcgacgcgcgctgggggcgggtctcggaaggcttcggcgaagacacctacctgacctcgctgctgtccgccgtgatggtccgtgcctaccagggctccagcctggccgccccggacagcatcatggcggcggtcaagcacttcgccctgtacggcgcggccgaaggcggccgcgactacaacaccgtggacatgagcctgccgcgcatgttccaggactacctgccgccctacaaggccgcggtggacgccggcgccggcgcggtgatggtctcgctgaacaccatcaacggcgtgcccgccaccgccaaccgctggctgctgaccgacctgttgcgccagcagtggggcttcaaggggctgaccgtcagcgaccacggcgcggtgaaggaactgatcaagcacggcctcgccggcaacgagcgcgacgccacgcgcctggcgatccaggccggtgtcgacatgaacatgaacgacgatctctactcgacctggctgccgaagctgctggcggccggcgagatcgaccaggccgacatcgatcgcgcctgccgcgacgtgctggcggcgaagtacgacctcggcctgttcgccgatccctatcgacgcctgggcaagccgaacgatccgccattcgacaccaacgccgagagccgcctgcaccgccaggccgcccgcgaggtagctcgcgaagggctggtcctgctgaagaaccgcgacggactgctgccgttgaagaaacaggggcgcatcgcggtgatcggcccgctggccaagagccagcgcgacgtcatcggcagttggtcggcagccggcgtgccacgccaggcggtaaccgtctaccagggcctggccaatgccgtcggcgaccgcgccaccctgctctacgccaagggcgccaacgtcagcggcgaccaggcgatcctcgactacctgaacagctacaacccggaagtcgaggtcgatccgcgctccgccgaggcgatgctcgaggaagccttgcgcaccgcgcgcgacgccgacctggtggtcgccgtggtcggcgagtcgcagggcatggcccacgaagcctccagtcgcaccgacctgcgcatcccggccagccagcgacggctgctgaaggcactgaaggccaccggcaagccgctggtgctggtgctgatgaatggccgaccgctgtcgctgggctgggagcaggaaaacgccgacgcgatcctggaaacctggttcagtggcaccgaaggcggcaatgccatcgccgacgtactgttcggcgaacacaaccccagcggcaagctgaccatgtccttcccgcgctcggtgggccaggtaccggtctactacaaccacctgaacaccggtcggccgatggaccacgacaaccccggcaaatacacctcgcgctatttcgacgaggccaacggcccgctctacccgttcggctacggcctcagctacaccgagttcagtctctcgcccctgcgcctgtccagcgaacggctggcccgcggcgacagcctggaagcgcgggtcacgctcagcaacagcggcaagcgcgccggcgccacggtggtccagctctatgtgcaggacccggtcgccagtctcagccggccggtgaaggaactgcgcgggttccgcaaggtgatgctggagcccggcgaatcgcgggaggtcgtcttccgcctcggcgaggcggacctgaagttctacgacagccagctcaggcacgcggccgagccgggcgagttcaaggtcttcgtcggcctggattcggcacaaaccgaaagccgcagcttcaccctgctctga

SEQ ID NO: 356710 - DNA, 501 bp, Pseudomonas aeruginosa
atgctctgcgcgctggtcgccccgtcgcagaacgtattcatcctcgccacgccaatcaagagcccgctgctggtgctcagccctgtcgggcagtacggtttcctgcgcagcctcgatagcgtcgagccggacctgaagaagatcaagccggagggcatgaagaagatcttctcgatccggagcctggtggagttcttcaagtcgaccctgaaggtcgccctgccctctctgctggcctggctgaccttgcagtgcaatctggccagcctcctgcggattcccgcctgcgggctggaatgcgaggcgccggtgagcgggatactcaggcaactgatgcgggtctgcgcgggcggcctgctggcgattgccgtcgccgactatgccttcgaacgtcaccagcactacaagcagctgcgcatgagcgaggaagaaggaatcccgttgttgcaacgagttccgctggcgcgggcgctgctgcgcgacggcaatgtcgaccagtag

SEQ ID NO: 356711 - DNA, 438 bp, Pseudomonas aeruginosa
atggacagcccggtggaaaagggctggatgccgatgtcggttatacgcccaaacgttgatcaggccgcattcaccttgcttgaactgctggtggtgctggtgatcgtcggagccattgcggcggtggcgttgcccggcctggtaaagatgcaggagacctgggcgcgcaggaccgcgctggacgatctgttcaatcaattgcagaccctgggctatcgcgtgcgcagcgatggacgggaactgctcattggcgaaaacggtgcggttccccccgagttgctgcgattgcccgatggctggacgattactgcacggccgccgatacgttacatggcaaacggagtttgcctgggcggagagttgcaggtccatcagggaggcacgacacatacgttgctgcttcagcctccccactgcgcacccgagactatccgctga

SEQ ID NO: 356712 - DNA, 480 bp, Pseudomonas aeruginosa
atggtctggtattcgtcgctgatcgccgcgctggccagcgccgggcttgagttctccgacatccagccagcctacctgacaccagccgacggccgcgccgccttcgagaacggcaaggtcgacgcctgggtgacctgggccccctgcgtggcaagcgcccagcgctactacctcgcctccagcgactacgccaggaaacatcctgaagtgctccagcaggtcttcgccgaactgcagcgcaccgggcgctggctcaagagccacccggccgacgcggccaaggtgctggggccgctgtggggcaatctcgatggcgctaccgtcgagcaggcgaatgcgcggcgcagctatgacgtgcaaccggtgagcgcagatggcctcgacgagcaacagcgcatcgccgacgccttccacgcccagggactgctacccaaaccggtggatgcgcgcgccgtggaggtgtggcagccgcagcactga

SEQ ID NO: 356713 - DNA, 1029 bp, Pseudomonas aeruginosa
atgttgctgaaagtgggtgaactggccaggcgcagcgggctgaccgtccgtacgctgcatcactatcacgatatcggcctgctggtcccggtcgcgcgtacggatgccggctaccgcctctacggcagggatgatctcgcacgtctgcaccggatccaggccctgcgccggttcggattgtcgctgggcgagatcggcgaactgctcgcccgccccgccttgtcgctcggctcggtgatcgagcggcaggtgagagtcctggaacaggagatcgcccatcgcgcgcggctgcgcgaacgcctggtgcaactgggcgagcaactggcgagaggagaggagccggaactggccgattggctgacgaccatggaactgatgaatatgtacgatcgatatttcacccggcaggagttgcaacagttgcgtttccatcaggcggatgcggcgcgccaggccctgtggcgggaattggtggaagcagtgcgcctggcgatggcgcagggattaccggccagctcggaagaggcacagacgctggcgcgccgctggatggccatgctggaggaggataccgggggcaatccgcgtttgctcgccaagctggacgccatgcacgcagcggagccggacctgcgcgagcggaccggtatcactccggagatccgcgactatgtgctggcggcgttcaaccagaccaagctggccatctaccgacgctggctggatgacgaagagttcgctttcctcagtgccaactatcctgtgcgcatgcaggagtggccgccgctggtggcggcgttgcgcgagaaactcgagtccggggtgcctgccgccagctccgaggtccaggaactggcacggcgctggttggagcttttccgttcctatgccggcgacgatccgcgaacccagcagaagatccgcgaggcgctcgcgcaggagccggagctgcgccagggctcctgggtgggcgacgacctgttggcgtatctgcgccaggccatggccaccctgcctgcgtcacgctga

SEQ ID NO: 356714 - DNA, 1371 bp, Pseudomonas aeruginosa
atgatcatcgccggcaccgccgtcggtgccggaatgttctccctgcccatcgccatgtccggcatctggttcggctggtcggtggcggtattcctgctcacctggttctgcatgctgctgtcggggatgatgatcctcgaggccaacctcaactacccggtgggatcgagcttctcgaccatcacccgcgacctgctcggccagggctggaacgtggtcaacggcctgagcatcgccttcgtcctctatatcctcacctatgcctatatctccggcggcggctcgatcatcggctacaccctgtccagcggcctcggcgtgaccctgccggaaaagctcgccgggctgctgttcgccctggcggtggcgctggtggtgtggtggagcacccgcgcggtggaccgcatcaccacgctgatgctcggcggcatgatcattaccttcggcctttccatcagcggcctgctcggacgcatccagccggcgatcctgttcaacagcggcgagccggacgcggtctactggccctacctgctggcgaccctgccgttctgcctgacctccttcggctaccacggcaacgtgccgagcctgatgaagtactacggcaaggacccgcagcggatcagccgttcgctgtggatcggcaccctgatcgccctggccatctacctgctgtggcaggccagcaccctgggcaccatcccgcgcgagcagttcaagggcatcatcgccggcggcagcaacgtcggcaccctggtggaatacctgcaccggatcaccgcgtcggattcgctgaacgcgttgctcaccaccttctccaacctggcggtggccagctccttcctcggcgtgaccctcggcctgttcgactacctggccgacctgtgcaggttcgacgacagccacttcggacgtttcaagaccgcgttgctgaccttcgtcccaccgaccatcggcgggctgttgttccccaacggcttcatctacgccatcggtttcgccgggctggccgcggcgttctgggcggtgatcgtcccggcgctgatggcgcgggcctcgcgcaagcgcttcggcagcccgctgttccgcgcctggggggggcacgccagcgatcgtgctggtgctgctgttcggcgtggccaacgcggtcgcgcacatcctggccagcctgcactggctgccggagtaccgttgagcgaccgccaggcctgccagggggctagccgcgcagtgcctccagcgtctgccgctggcggccttcggcgtcgaagttggaaggatcgagccagcgctcgaacgccgcccgtcgcgccggccattcgctgtcgagcagggagaaccaggcggtgtcgcggttgcgctgcttga

SEQ ID NO: 356715 - DNA, 1200 bp, Pseudomonas aeruginosa
atgctgtcggtgttgcgccccttcccgtcgccgctgctgagccggcacggcatcgacctggacttcccgctgctggcgggttgcctggcgctgctcggcctcggcctggtgatggtgacttccgcctcctccgaggtggcggcggcgcagtcgggcaacccgctgtacttctccgtccgtcacctgatctacctggtgatcggcctgatttcctgcggcctgaccatgatgatcccgatggccacctggcaacgctggggctggaagctgctgctggtcgccttcgccctgctggtgctggtggtcacgcccggcatcggccgcgaggtcaacggctcgatgcgctggatcggcttcggcctgttcaacatccagccttcggagatcgccaaggtctgcgtggtgatcttcatggccggctacctgatccgtcgccagcaggaagtccgggaaagctggatgggcttcttcaagccgttcgtggtgttgctgcccatggccggcctgctgctgcgcgagccggacttcggcgccaccgtggtaatgatgggcgccgccgcggccatgttgttcctcggcggggtggggttgttccgcttcggcctgatggtgatgctggcggtcggcgcggtggtcctgctgatccagacccagccctaccggatggcgcgcctgaccaacttcaccgacccctgggccgaccagttcggcgccggctatcagttgagccaggcgctgatcgccttcggccgcggcggctggttgggcatgggactgggcaacagcatccagaagcagttctacctgccggaggcgcacaccgacttcgtcttcgccgtgctcgcagaggagctgggcatcgtcggcgccctggcgaccgtcgcgctgttcgtgttcgtcagcctgcgtgcgctgtacatcggcatctgggccgagcaggccaagcagttcttctccgcctacgtggcctacggcctggccttcctctggatcggccagttcctgatcaacatcggggtgaacgtcggcctgctgccgaccaagggcctgaccctgccgttcctcagctacggcggcagttcgctggtgatctgctgtgcctgtctggggatgttgctgcgcatcgaatgggaacggcggacccacctgggtagcgaggaatatgaattcaacgaagaggactttgccgatgaaaggtaa

SEQ ID NO: 356716 - DNA, 351 bp, Pseudomonas aeruginosa
atgatgtatctcgtgatccgcgcccaccgcagcgaatacccattccccatcgccttcgacaaaggcgctccgctcagcgtaggcgaacgctacgaaggccccgaagagtgggcgggccggtacttctgcacgacacccgggcaacaaggaggttgggtgcccgaacaattgatcgagcgcatcgacgcggacagcggggtagctcgcgagcgctatacggctcgcgaactggaggtggaggtgggagaggaggtcgaaggactgcgtcgactgaacggctggatctggtgccgcagaaagcccgagggagatagcggatgggttccggaggaccacctggcgccccactga

SEQ ID NO: 356717 - DNA, 2025 bp, Pseudomonas aeruginosa
gtgaagaccgtactctatcccgccatcgcgctgatgaaccggctcagcttcggcatgaagttcggcctgatcagcgtgctgttcttcctgccgctgctgatcaccagtttctatctggtgcgcgatgcctatcgccagttcagcgacacccgaatcgaactgcagagcttgacgctgctggggagcggacttcagatccggcgtgacctggagtccctcaacgatctgttgcagatcaatgcagtcatcggccagtcatccggcaaggccggcaatctggaggcgcgcatcgcggacgtccagaaggggctgcgcgggcgactcgaagcgcttgcgccgctcagcgaggatggcgcggcggtagtcgaattcgaggcccagcgcgaccagttgctgaacggcttgcaggccgtggaggccgaagggtccctgcagggcaagggcgcgcgggcggagaagctgctcggtggcgcccaggtattcatcaaattgctcatcgcccaggccggcctgagccaggacagccagcgtcaagtgcgccagctcagcgaactggtcagctcgataacgccggaggtgacggcggccatcagcaaggggcgcgctatcggcgcctattccctgggccagggtttcctcaactcgtcctccagcgcgcggctcgacgagctgctgctggagttcgagaagctgcatggcgagtacggcctgaagctgcaggagtccctggccggcagtccacaggcgctcgaggaagctgcccaggccagtcgcgagaccctgaagagcctggggcagttgttcgaggaccgggtgatcgtggccgagacgctggatactccgtggacgcagttctacgaccaggtcagcgcggcgatgggcaagacctaccagctcgacgatgccgttctcggctatctcgatagccagctgcaaaagcgcctgcaacaggtgcgcacgcagatgctcatgctggtggcggccctggccgtggtttttgcagcgatcctatacctctacggcggtttctacgtttccacccgcgccaccctgaaggacctcggacgaatgatggagcgcgtcgccggcggcgacatgacggtcagcttccaggcccgtagccgtgacgagctgggtgagttggggcaatcgttcaacgagtcggtggcgaagatccacgacctgatcgagcgggtcagccagaccgtcggcgaggtcgagcggcagaccctgcgcgtcgagtcggtgtcggccgaaagcaaccaggcggtggccggacaacgtagccagatcgagcaggtggccacggcgatgaaccagatggccgctaccgcccaggaggtggcacgcagcgcggcgatggcggtgagcagcgcgaacagcgtgaaccaggaaaccctcagcggacgcagcctggtcgagtcgcaggtggttagcatccggcgcctggccggcgagatcgaccagtcggtagcggcgatcaaccgcctggccagcgacagcgcctcgatcagccaggtgttggatgtgatcaagggtatcgccgaacagaccaacttgctggcgctcaatgcggcaatcgaggccgctcgtgccggggagcaggggcgcggtttcgcggtggtggccgacgaggtgcgcacgctggccaagcgcacccagcagtccaccgccgagatcgagcagatgatcctgcgcctgcaaggcggcgtcgatgcggcggtaaaggcgatgggcagcagccaccataccgccgatggcacggtcagcgagtcggcgcaggtgcagcaggcactggagaatatcctcggcgcggtgggcatgatcgtcgaccagaaccagcagatcgccgccgccgccgagcaacagaccgccgtgacccacgatatcgaccagaacatcgtcgagatcaaccaggccggcgagcgcaccgcggaaggcgccagccagaccgaacgggccagccgcgagctgggtgcccaggtgacccagctgaaacgcctgatcggcgcgttcagggtgtag

SEQ ID NO: 356718 - DNA, 165 bp, Pseudomonas aeruginosa
atgaaaccctacgagcatccggcctacagcgaccccgtgatgggcaacgaggagcccgaccgaggttgccatgaatggaatttccaaccgggagacagcgatcaggaaccctatcccgaatatcgtggagcgaataccgaagaaggccccggcggaagcgcttaa

SEQ ID NO: 356719 - DNA, 648 bp, Pseudomonas aeruginosa
atgcgccgcgcgcaaccggcgccgcatcgcgccttcggcctcggcgaagcgcgcgaacgcagcctgctgctgggaggcttcctgctggccttcgtcctgcttggcctcgctccccacgaccgcggcgactggctactggagaacctgctggtcgccgcgctcggcctgggcctgttcgccgtgcgccggtggttccgcccgtccccggcgtcgtcgcggcggttgttcctgttcctgctggtccatgaaatcggcgcccactacacctattcgcgggttccctacgaccaggcctggacctggctcagcggcttctcgctggacgccgccctgggctggcggcgcaaccagttcgaccggctggcccatggactctatggtttcctgctggtgttgccgtggcgcgaactgctcgaacgcctcggcctgcggcggtcgctcgcgggcttcctggccatcgacctggtgctgtcgacctcggcgctctacgagctgatcgagtggctgggcggcgagtatctcggcggtgcccgctccgcggctttcgtcggtgcccaggacgacgcctgggacgcgcagaaggatatggccctggcgctgggcggcgcgctactggccagcatcctagccctgcgacgccgaagctag

SEQ ID NO: 356720 - DNA, 369 bp, Pseudomonas aeruginosa
atgatcgcccccagcctgctcaacctgtacgtcgacgaccccgcgcgcagcgccgctttctaccggcgcctgctggcgcgcgaaagcgtcgaacaatccgccgatttcgccctgttcgtcttcgacaacggcttcaagctcggcctctgggcgcgtgccggcgtggcgccggcgagctcggtgcccggcggcggcgacgaactgtgcttccaggtggatagcgacgacgaggtccggcgcctgcaccggctctggcgcgaagggggcgtggagatcgtccaggcgccgcagtccatggacttcggctacaccttttgcggcctcgatccagacggccaccgcctgcgggtctatcgcctggcgctgtag

SEQ ID NO: 356721 - DNA, 2895 bp, Pseudomonas aeruginosa
atgtcgtgccccaccacccaccgcattacccgtagtacccgtctctggtgcgccgccctcggcgccagcatgctgttgccgcagatggcgtcggcgctggccgggcaggccggcccggatgccgtgcccagccagcaggaagtcaccctcggtggtcgcttcatcgatgtccaggccgttcgtggcggcgcgctgttgcgcggtgccgcgacgctcggcaccgagcgcctgcgccaggaggcgggcgtgacgatccgctccctgcgggtgcaggacgatagcgcctacccgggcttcaccctgttcgccggagccctggacggacgtgctcgccagccagccggcgacatcgtgatggccctgcgcgacgacggtggcttcgtcgccctgttgcccgagcgcaacgcgatgatccgtggcgacgccgacggccagcagaccctcaccctgttcccggcgcaggacggcaacgcccacgagcatgtcgactacctggaggcgcccgacgcgccggcgcccgcgctgatcgagtcgcgcaacggtgcgctgcgttaccaggccgagcgcaacgccgccggcgacctgctgatcgacgtgctggccggcttctccaggctctccgtggcctatgtcggcgaccacgaagcctatgccctggcgcaggtcgcctcggtcaaccaggcgctggacaactccaaggtcaagggggtgcgcgtgcgcctggtcggcacccaggtgatcgacgacgaccaccgggtcaacaccgacaccctggccgacctgaagaacctcttcgccgagggtatgcgccagtacagcccggacctggtggcggcgttcttcaccggccgcggcagcggtcctgggcagaacaccgccgccggctgggcctacatcaacggtcgctattcggtgaacgccgccgatggcccgaccgtcttccgccacgaactggggcacaatatcggtggtggccattgcccgagcggacagggcttcaattatggctacaacaacggccggctcggcaccatcatgtgcggcaatcagttgggctactactccaaccccgacctgaaggacaatcagggcgtgcccatcggcgacaccctgaccgccaacatggcgcaggtctggcgcgacaacgcggcgaggatatccgcctacgcgccctcggtggtgccggtcgacgacgagcaggtcacccaggtgctgcacgagagcttcagcctgaccaaggcggacaactggaagcacttcgttgtcgacgtccccgctggcacccagcgcctggccttcgggatcacctcgggagcgcgccacgaaccgaccggaaggactgcgatctacctcaagcgtgatggccgtccgagcgaaaccgacttcgactaccgttcgcgcgaaggggtggtggccgcgctgggcgtgagcgaggaggccgctggccgctggtacgtctcggtgaagggcaacgatgtcgccatcgacgacctgatcctcgacggccatgccttcgccgtcgagagcgacagcgtccgggcccgctacctgcgcctggtggtggaatccgagacgagcggcaagggtggcgccagcgccgccgagatccaactggccgattcgcgcagccgcctgctcgacccgcgcagctggcgtatccattcggtgagcagcgccgatggcgccaagggcgcggcggccaacgctatcgacggcgacccgaagaccttctggacgaccgcgccgggcgccggcttcccccatgaaatggtcatcgacctgggtcaggacagccgcttctcgcacctgcgctacctgcctcggcaggacaacagccaggtcggcaatatcaagggctacaagctctacgccagcgacaatccctatggcggctgggtcgaagtggccgatggcagcttcgccgcggacaacaagctgaagacccaggtgctcaagccgaaggaaagcaacctgccacccgtggcgcagatcgacggcaagcgcgaagccgaggctggcgacctggtggtgctcgacgcctccgcctcgtcggacccgcaaggtgccgcgctgagctacacctgggcggtctcgccggcgctggagatggagctggacggcccgcgccttagcttcgtcgcgccgagcctggcgcaagacaccggctaccgcttcaccctgaccgtggacaacggcaagcagcgcgtgacccaggagcacgaggtgcgggtcaaggccgccaaggatgccagttgccagccggcatggctgagcggcaaggcctatctgtccggcgacgtggtccagcaccgcggccgccagtaccatgcgcgctggtggagccagggccaggagcccggcaacccgagcttcaccggtgccgatggcagcggcaaggtctggcgcgacgacggtccctgccagcagggcgagatacagccgcccctggcgcagatcagcggcaagaccgaagtggcggcgggcgagcgggtggtcctggacgcttcctcgtcgagcgatccgaacggcctggagctgagctaccggtggagcgtgtcgccggcgctggtattcgaggccgacggtccacgcctgagcttcgtcgcgccgaaggcggcgcaggccagtcgctacaccttcagcctgacccttggcaacggcagccacagtgtgaacaaggagcatgcggtacgggtcgcggcggagcagccgggaactgcctgcggcatggtctggagcgcttcgaaggcctatgtcggcggtgacagggtccggcatgccggacgccagtacgcggcgcgctggtggagccgcggccagcagcccggcgatccggcgttcaccggtggcgagggtagcggcaaggtctggcgcgacgaaggcgcctgcttctga

SEQ ID NO: 356722 - DNA, 147 bp, Pseudomonas aeruginosa
atgttccggtctttccgcaacgtatcgcccgagcacgccggcagccctcgccgcgacagggattcctgcctgatccacatcaagccgacctcgcctgaaagccgttacaacagcggcgtgaccgtcgtcctgtcgacggccgcataa

SEQ ID NO: 356723 - DNA, 303 bp, Pseudomonas aeruginosa
atgaacatgcaggatctcgccggccgggtccaggctggacatatcgacgccttgcacctggtgtcgctggagggcggcatctatgtcctggaggcgaagatgggcgaccgcgcctatccggtggaggacgacctcggccagccgctcagcctgcgctcggtggagcacgcgcgacaggtactgcgtgggatggcacgggtgccggtggaactggtgtacgccgacgttcacgatgaaatgtgtggtttgctggccgagccggggacgttcggtgagtcctccttggcgatccgccgacggtga

SEQ ID NO: 356724 - DNA, 276 bp, Pseudomonas aeruginosa
gtggtgttcctcttcgccaaccagggcgagagcgccgagaccgtgcgccatttcctccagggcgagaacctgcgcctggacaacctgctgttcgacaacggcgggcagcttggccagcaggtcggctcggtcgccttgcccaccaccgttttctacaccgccgagggccgcctgctgggcagccatctcggcgaactgtcccgcggcagcctggcgcgctacctcgaagccttcgagccggccgctgccgcccccgcaaccaggagttccgaatga

SEQ ID NO: 356725 - DNA, 195 bp, Pseudomonas aeruginosa
gtgcggcccgacctggaagcctgcatcggcaccgccgagagcatcgtcggcaaggcattgctcgaccccgtggcggcgcggaccgcccagtcgacccgggagattaccgcgatgatcgagcgcatccgcgccagcacggggcaggcgatcaacagcatggcgaccggcgtgagccgggtgagcgagggggtgtag

SEQ ID NO: 356726 - DNA, 369 bp, Pseudomonas aeruginosa
atgaaccgccagccccgccttgcccgtttcgtcctgccgttgttgctgagcctgtgccagccgtccttcgccaccgaactccgcgcagttgccgaagcccgccgccaggaattcctgctggaggacttgccggtggcgtgcggcgaggccggctgcctggtaccggaaagcgccagtctggtggcgttgcaggtgcgggccaggggcctggccgctcgcctcggccgcgatgacttttccccgtccgatcgtcagcccgccgccgtcccggactaccgcctgttcggcgatctcggcctggcgccaagccccttcgcctggcaagcgtcgaccggcgagagcgcggcggcgggcgcgttgcgcttctga

SEQ ID NO: 356727 - DNA, 570 bp, Pseudomonas aeruginosa
atgaataagttcaagcgtgtaattcttgcgcccctcgctgcgtcgggcgcccttcttgcgctgatgtcccccatggcccatgcggtggacggcatcgtcaacttttccggcaacatcaccgacgtgtcgtgcgatatcaacggccaggcgccgggtgcgggcaacgtcaccaatgtcgatctgggcatcgttgcgcccacccattttaccgctgtcggcaccagcaccaccttcaaggaattccagctggtcctctccggagcgggctgtgccgacgacaggaaggtttccatcgccttcgatccggtgaccaatatcgacaggaacaccggaaacctgacgttgatggggccggcggaagccaagggcgtgcagatccagatcttcaacaattcggctaccagcaccacgaagataccgctgggttcggtcgaggcttccccgcagaaggcaaccatcaccaagaacacggcgaccctgatgtacaaggcctcctacgtttccacggagaagaccgtgaccgcaggcaccggcctgtcgcatatccgctacgtcctggcgtaccagtaa

SEQ ID NO: 356728 - DNA, 153 bp, Pseudomonas aeruginosa
atggtcggcaagtcgacggcggcggcggccatcgtcatctggcgggcggtgaccttctacttctacctcgtcgccggcggcccggtgttcgccgtgctcgccggccgcccgctgctgaagaagctgatcagcagtcgcgaggcttcttcctga

SEQ ID NO: 356729 - DNA, 900 bp, Pseudomonas aeruginosa
atgagtcgaggctggttgctgctgttcggtttgatcggtgcctcgctgattccgctggtgctcggcggcagcgacatgttcccgcgcttgcgcgccttcccgctggacagcctgctgctgatgttcggcatgatcgtagtctgctggttcatcaacggcctgcgcctgcgcttgctcctcgccgggcgggccggaaagctcgggcaattgcagagcgtcggcatcatcatggccagcgaattcgccttctgcgccactccgggcggcagcggcgggccgttgaccctgatggcgctcctggcccggcgcggcctgcgcccggcacagaccagcgcggtgttcgcggtcgaccagttggccgacctgacgttcttcctctgtgctctcggcgcgatcctgatctatgccctcagccattcgctgagcccgaacatggaatcgagcctgatcttcagcgcggtattcctggtcggcctgttcgtcggcgcggtgatgctgatccgctacctgcaccaggtgatccgcttcaacgggcgggttctggcacggctcggcgtatcatcgcgcaagcgcctgcactggggccgcaagatcctgcatttccgcattgccctgcacgacagcctgcgcctaccgaaacgacgcctgctggcggtctttctcctcagcagtacgcactggctgctgcgcttcagcgtgctcgacctgaccctgcgcggcctgggagtggacatccagtgggcctggaccttcctgatccagatggtttcgctcagcgccggacagctctcgctgatccccggcggcgcgggcggcaccgagctgacctcggcggcgctgctggccccatggtcggcaagtcgacggcggcggcggccatcgtcatctggcgggcggtga

SEQ ID NO: 356730 - DNA, 237 bp, Pseudomonas aeruginosa
atggctggcgaaaaccgtgcagaaacccttgccgtcccccagcagcagggcgatggcctgcatctggaacacgccggaaagcgattcgagaatctcctggaccgcttccgccaggtgcccatgggaaacatggcgcaggcgcgacaggaccagcttgcccaggctcaggctctgcaactggtgcagctggctgtcggactgccagttgaggtcggagatatccatgcccagcagtag

SEQ ID NO: 356731 - DNA, 963 bp, Pseudomonas aeruginosa
atgaagttcagggtttcattcaccgcggccttgctcgcagcagcattgccgctgatgcctctccaggccgcgccgttgcgggcggtgccggccatacaggcgagcaatgccacgcaggccaccatgctggccgccggctgggcgggggcgcgcatggtggccgtgggcgaccacggtgtcgtgctgttgtccgacgatcaaggcctgcagtggcgccaggcgaggtcggtaccgctgtccacaccgttgacgggcgtgtcttttgtggatgccaaacgcggctgggcggttggccactggggcgcgatcctggccaccaccgatggtggggagtcctggcaggtccagcggctggccaccgaagaagaccgacccctgttcgccgtgcacttcttcaatgcccggcagggcgtggcggtagggctctggtcgttggtgctgaccaccgaggatggaggccggacatgggccgagcagccggtgcaggccccgcccggtgccaagcgcgccgacctcaacctgatggggctgtttgccgacagccgcggcacgctgtacgccacggccgagcatgggcaggtgctgctttccgaagaccaggggaaaaactggcgttacctggataccggctacgaaggcaccctgtggtctggcgcggtgctggccgatgggcgtctgctgctgggtggccagcgcggcactctgttgcagggttcagcggacggcaagggctttcgccgagtgccaacgtcaagcaagggctctgtcacttgcgtagcggtagcgggctctcgtgtgttggcggtcgggctggatgggctgagcgtgcagagcagcgatggcgggcacagtttccaggaaacgcagaccgctgatggcctttcactgacggcagcgttgttcaacgccgaaggcgtacctgtgttgttttcacgccgaggggtaatgccttaccaggagtga

SEQ ID NO: 356732 - DNA, 252 bp, Pseudomonas aeruginosa
atgccaccacacccgcatcccatcctgctcctctgcctttgcctgaccctgctcggcgagaccgaccgcagctacagccttgccgacggcgcgccggccacaggcatcagcctccagcgcgacgaccgctcgccgttgcagcgcctgcgggactgcgaacgccagggttgcagcgagcggcagaagatcgacccgttcacccccgatcctgactacctgcgcgcggaaggccacgtcccgctgtcctggtaa

SEQ ID NO: 356733 - DNA, 903 bp, Pseudomonas aeruginosa
atgctctatagagccatcttcattcttgcggccctgttcggccacgtcggggcgagcctggctggcgacatctacgccttcggcggtcgcgacgtcgccgtcccctctattctgccgtcgggctcagtcatgtcgcgttatagcttcacgccgatgcagatgtgcggacagcccagctgcgacattacccttatcgcgctctacaacaagggcagcgtgtggagcccagcagacgggccggacctggagaccaacgtctcgggcctctccgtgcgcctgctgctcgatggcaagccagccaacagcaaattcaagggaagcttctcgcaaattgcggaactccagctgttccgcaattccatgccaatctctggcggccagtttgcgagtggctcgttcaactcgtatttcctgatcacctacaagagcggcttcatctcgaccgctacggctgcggtcaggctgacgggcagcgcaaccacgatcgatgcgacatgccaggtgccggatcggaccgtaaaattggcaccgatcactgcgagcgacctgcgcggtatcggtacgaccgcgtcgccgacgtcgttcgaccttgtcgtgtccgtatgtccgcgcggattcaaccgcatcggctacatgattctcccggtaggcggcgcagtatcggacggatcgggtacgctgccgctgctatcgggctctaccgctgccggagtgtcgatccgggtgaccgacgcgtccggcacgccgccgcagctgggagtttcattgcctgtaaccgagtacgacaagaataccggcgggttctacctgattccgatgagggcgtcgtacgtgcagaccgccgagagaatcaagggtggttcggtcctcgccgcgatggtgatcctgctcgactaccagtga

SEQ ID NO: 356734 - DNA, 126 bp, Pseudomonas aeruginosa
atgcagaccatcgagtccagcgcccaggagaacgacaaccagaccacccccgtgaccggcatcctgcgggagaccggcaagagcgccgagcacgtggcgcgggtggtgtcgagcccgttcaagtga

SEQ ID NO: 356735 - DNA, 795 bp, Pseudomonas aeruginosa
atgcacgcagaacagcgccgggcatccgtccaccgccgcgttcagcgccaggatcggcgatggcggcgcagcgctgtcgtcgtatccggacaaggcggcgatgctcggcttctggatcaggtcgcgcagcttcaggctgaagcccagcttcttcagggcacgggccttggccaccacctgcatgctgaggatggagtcgccacccagttcgaagaagttgtcgtgcacaccgatccttgcgatgccgagcacttcctgccagataccggccaggaccagctccagttcattacgcggcgccacgtaggcctcgctggcggcgacgtcgatgtccggcagcgccttgcggtcgatcttgccgttcggcgtcagcggcatcgccggcagcagggccaggtgcgccggcaccatgtactccggcagatcgcgcttgaggcgctcgcgcaagcgctcgagcaggcccgaggcgtccacgccgtcttccgcgaccacatagccgagcagttgcttgccactcgccgcgtcgcgggcaaccaccaccgcttcgcggacctcgccggcatcctgcaggcgcgcctcgatctcgcccagttcgatgcggaagccccgcaccttgacctggttgtcgatgcgcccgaggtagtcgaaggtgccatcctcgcgctgacgaaccaggtcgccggtgcgatagagacgctcgccggcacggctgaacgggttggcgacgaagcgctcggcgctcaaccccggccgctgcaaatagcctcgcgccaggccgacgccaccgaggtatag

SEQ ID NO: 356736 - DNA, 729 bp, Pseudomonas aeruginosa
atgacgcagaacatctacgatcgcgccgacttcttcgccggctacagccaactgccgcgctcccgcgaagggctggccggcgcccccgaatggccggcattgcaggccatgctgccgggcttggcgggaaagcgggtggtggacctgggctgcggattcggctggttctgccgctgggcccgcgagcagggcgccgccgaggtgctggggatcgacatctcgcagaacatgctgggcaaggcgcgggccatgaccgacgatccggctatccgttatctccgccaggacctggagaccctggaactgccggcggcgtccttcgacttcgcctacagctcgctggcgcttcactacatcgacgacctgcgccgcctgctggccaatctgcacgccgcgctgctgcccggcgcggctttggtgttttccatcgagcacccgatctacatggcgcccagccaccccggctggcagctggacggcgagggacggcgcacctggccgctggaccgctattcgatcgaagggccgcgtaccaccgactggctggctagcggcgtggtcaagcaccaccgcacgctgggcagcctgctcaacctgctgatcgagctcggcttccgcctcgcacgggtggaggagtggagccccagcgacgagcaagtggccgcccgcccggaactggccgaggagcgcgagcgaccgatgctgttgctggtgtccgtgctgcgctga

SEQ ID NO: 356737 - DNA, 852 bp, Pseudomonas aeruginosa
atgagcttgccgaaacgtaccagggaacatcgggtcgacgagaaggctgtctcgatgatcgggggcatgctggtcgacgattggctggtgcgaagccaggagggtcgggattacggcatcgacttgcaaatggagcgatacgacggagagaggcccaccggggacttcatcttcgtgcaggtcaagggaacggaagcggctttttcgtcagagaatgagaaactctccggttttcccgtgaagaccgtcaactacgcgatgctgttctcggtgccgttcttcgtgttctacgcctcggtgtcgagccggcgggtcaaattcgtctggttgcagaagtacgtggaattcgtactcgagaagaccaggccgggttggcgcgaccaggagagcgtaacgttggagtttccccgggagaacgatctggattccggcctggagaagctcgtcgacatcgctgccaaagagcgctcgatgcgcttcggataccgctacctcatgctctacgagcgcttccatactttcgccgggaaactcgccgaaggcgaattgaaagccacgcgtgtttgcgccaggacgcttgcggagatcatcaggatggggggactcgaggaatacaaggccatcgacttcatcgccatggaggctgaaatgctgggatgtgaacccagcgtactcctccaggactatcttgcggttttcgaacgtatcgagcatggcggagcggcgagcgatgaagacatgaacaaaatccgcagaatcgatgtgctcctgagcctgggcaagccgcatatcctcaacgtcgataccatggatgtgatatccgcctggatctccgggtccgttccttattga

SEQ ID NO: 356738 - DNA, 138 bp, Pseudomonas aeruginosa
atgacggcctcgcgcgcggacgacgcggggtcgtcggtcctggagaattgcgaatccggcttcgacggcaagcaggcgggcctggagcggcgcaggtgggcggccgtcagcggctgggaagatctccgcttcttataa

SEQ ID NO: 356739 - DNA, 231 bp, Pseudomonas aeruginosa
atgctcgcctgccccctccctcccgacgaagccctgcgccagcaggcccgggaagacctggcgctggtcgacaccccgccggacacttgcctggacgccctggtggatctggcacggaaaaccttcgggatgaagaccgtgcagatcagcctgatcgatcacgaccgccaatcgcatccgcgaattgatggaagcgaccgatcgactgtgccggcacatccgtgcaggtga

SEQ ID NO: 356740 - DNA, 834 bp, Pseudomonas aeruginosa
atgcgcccaaccatcccgttcctcgcgtctctccagcaatccgccacgacaaccgtcctggctgtcctctgcatagctctgccggcgctgaccagcagcccttcggcggcagccacggaactgcgtgtgatcgcatcgggcggtttcagcgccgcctatcgccaattgggcccgcgcttcagcgaaaaaaccggcaacacgctgcacagcgaatacggcccttcgatgggcgacaccccccaggccattccgcaacgcctggaagccggggaaaaggccgacgcgctgatcatggtcggctacgccctcgacgagttgatccgccagggcaaggtgcgcgccgactcgcgggtcgaactggccgactcgcgtatcggcctggtggtacgcaagggcgcggcgcatccgccgatcggcgacgtcgcgcaactgcgccaggcactcctcgccgcccgctcggtggcctactccgacagtgccagcggccgctacgtgcgtgagcagttgttcaagcgcctgggtatcgaacggcaaatgcgcgacaaggcaacgatgattccacgcatcccggtcgccgaagtggtcgccggcgggcaatacgaactgggtctgcaacaggtcgccgaactgttgccggtgccgggcgtcgagttcgtcggccgcctgccggaggcggtgcaatcggtgacccgcttcgccggcggcatcccggtgaacgccgaacatccacgagaagcccgcaccctgctgcgctacctggcctcgcccgaggtacaggaggtggtccgcgccagcggcctggactcgctcggacaatcgccgcacggagggtga

SEQ ID NO: 356741 - DNA, 207 bp, Pseudomonas aeruginosa
atggcggccgagcggctagcctgtccgatggtcctcggcctggagatgccccacaagccacgcctgctgcgcttcttcaccgcgcttcaaaccgatgccctgaaagacgggcgtcgccagcacgtgtcggtattgcgcgaacgtcgcaacgacgcgcgcctggaacaggtcccaggcaaaaagccgaggggaggcggatatagatag

SEQ ID NO: 356742 - DNA, 378 bp, Pseudomonas aeruginosa
atgtccacgcgcctgtcttcccgcggtttcaccctgatcgaagtgctggtggcgctggccatcgtcgccattgccctggccgcggcgatccgcgcggtgggcctgatgaccgacggcaacggcctgttgcgcgacaagtcgctggccctgctggcggcggagaaccggctcgccgagctgcgcctgctggaggacggcgcggttccggcagacagcgatttcgaatgctcccagggacgcctgcggctgtattgcgaacagcgcgtcgaggccaccgacgatccggccctgttatgggtggagatccgcgtgcgtgcgcagcgcggggagggactgccgctggcacgcctgaacaccctgctgagccgcgcccggtga

SEQ ID NO: 356743 - DNA, 240 bp, Pseudomonas aeruginosa
atgagcctgatcgactgccccgagtgccagcaacgcatttccgacagggcctacgaatgcccgcaatgcggcaatccgatgaacgagcggtcgaacggcgggcgcctgctatcggagaagaacatcgggcagatcgccggtgccgccggcatctggctcactgcgccctggctggcgcgcctggtcgtggccctggcggtggtgatcgccgtggccacggtgatcgtcctgcgtggctag

SEQ ID NO: 356744 - DNA, 1143 bp, Pseudomonas aeruginosa
atgcatcccactcccggcacctgtggctacccaatactcgcccccagcgacccgagaatccccgcaggcttccagcatgacggcctccagcgcatcgagtgtttgttgaatctcgctctcgctcagggttggatggaccaggaacatgaggctgtcttcacccagcgtcatcgcgttgggcaagcgcacttccggtcgccagcccgtagaatcgaacgccttttcaaggtaaatctcggagcaggagccagaaaagcacggcacgccgcgggcgacgatttcggacaggatacggtcacgcgtccacccctcggccaaacgcgacggctccacgaatacgtagcatttgtaagcggcgtgctcgatgccttcaggaatgagcggaactcgcagtccaggcaggttccgggctttctcccagatgcgctgcgcattcgcaagccggcgaacatgccaatcgcccatccggcgcagctggatgcggccaatgactgcctggacctccatcattcggaaattcgtaccgaaactttcatgcagccagcggaagcccggcgcgtgcgcccgctcataaaccgcctcccagctttttccgtgatccttgtacgaccacatgcgggaccagagctcgcggtcgtcggtagtgaccatgccgccctctcctcccgtcgtcatgatcttgtcctggcagaacgaccaagcgccaatatgcccaatggaaccaaccgaacgccctttgtaacgggctccatgcgcctgggcgcaatcctcgactaccttcagcccatgctccccggccaacgccatgatcgggtccatatcgcatggccatcctgccaggtgaacacagatgatcgccctggtgcgctcagtcaggacggcgcggatggagtcaacggtcacgttctgggtatccaggtcgacatcagcgaatactggaacggccccgatattgacgatggaagaagcagaagccaggaatgtccgcgaggtcacaccacctcatcgccagctccgatcccgagggccttcagcgctacatccagggcaacagttccattagcgagagcgacagcgaacctggaatcagcccaggccgcaaattctttttcaaactcgcggcactcctggccggtccagtaa

SEQ ID NO: 356745 - DNA, 312 bp, Pseudomonas aeruginosa
gtgatcctcggcggacgcctggcctggtacaaggccaacgccgataccgacagctacaaggtcagcgaacggatcgacacgcggctgaacttcaacaacctgtccggcaagtcctgttacagcggcatcgacttcggcagcctcaactacggcgagccgcgcaacctgatgtccacggtgaagtacaggctccggcaccgggccgccgccgtgcctccacaggcgcggcggcgctgttcgaacatcccttccaaccgcctcagcaaggccggtagcggcgctcgaactcgctcgccagctgctccagcgtaa

SEQ ID NO: 356746 - DNA, 1083 bp, Pseudomonas aeruginosa
atgcggcatacggaaacccaacggatcgtcatcgtcggcgcaggcatcgtcggcgcatcgctcgcctatcacctcgcccggtgcgggtttccggtcactgtcgtcgagcgcgaccggccgggccgcggggtcaccgcgcagtcattcgcctggatcaacgccagcgccggcgacccgccgctaagcggcctgcgcagccacgctgtggcggactatcggcgcctggaagccgagctgggccagtccttcgtccattggcatggcgccctctgccacggcgtgccgctgtcggcgcggcaactggcgagcagcgagagtctcgagcgcgcccagatcgcacaacgggagccggactggctgaagccgccggagcaggcccgtttctttgccgaagaaggcgccttcgacgccgtcgccctggtccacctgttgctgcaacgggcacgccactatggcgcacggatactggaggaaaccgaagtgctggggttccgctacgacggcggggcactacgcggcgtgctcagttccgccggccccatcgccgccagcgcggtgctggtggcggcgggcgtaggcgcgctggggttgctggagaccctcggcgtccgcctgcccctggcgtcctcgccgtgcctgctgctgcgcctgcgcacgccgcggcagctggtgcgcggactgatctccaacgaacggatggaggtccgccaggccggcccgggtatcctgttggcggccgaagactatctggaagacagcggcgagcgcggcccgcaggccatcgccgaacagacgctggaaagccttcgcggcgccttccgcgacggcaaggaaatcgcgctggaacgggtcgaggtcggccagcggccgatgcctcgcgacggcctgccgctgatcggcttctgccccgaccaccccggtgtctacctggcgctgatgcacgccgcggtcaccctggcggcgaccctcggccggctggtcgccgaggagttcgccagcggtcgggaagcggcggagctgagcgccttccgcccgactcgcgaacgtctcggcggtttccagatagagtctgcccctggctga

SEQ ID NO: 356747 - DNA, 369 bp, Pseudomonas aeruginosa
atgctcaaggcccaccgcgccatcgagtcgatcaccctggaccgcgaagtggcccacctgaaagacgagctgatgcccaagtacgccagcctgatctacaccggctactggtggagcccggagcgcctgatgctgcaacagatgatcgacgcctcgcaggtcaacgtgaacggcgtagtgcgcctgaagctgtacaagggcaacgtcgtggtggtgggccgcaagtccgacgactcgctgttcgacgccaacatcgcgaccttcgaggaagacggcggcgcctacaaccaggccgatgccgcgggcttcatcaagctcaacgcgttgcgcatgcgcatcgccgcgaacaagggccgcacgctgtcctga

SEQ ID NO: 356748 - DNA, 195 bp, Pseudomonas aeruginosa
atgttttctctgcatattccgaacatgacctgcggtggttgtgccaagaccgtcacacaggtcctgcaaagcgtcgatcccttggcgcgcgtcgagaccgatccccctcgtcgcgaggccagggtcgagagcgctctggacaagagcgcattcctgccagcgctgcgcgaggcggggtatccggaggggcgctga

SEQ ID NO: 356749 - DNA, 240 bp, Pseudomonas aeruginosa
ttgccgctgccgtcggcggtggtttcgccgatcgggttgccgttgccatcggtgagaatcaccctggcgccggcctccgcggtgccgcttatttccgaaccgttgctcggattgaccaccggcgcggccggcgccaccgagtccaccgtggtcgcggcctgcgggccggtattgccggtcgggtcggtggccgtggcgacgatcaccgtgccgttggccagcggggtggacggggtgtag

SEQ ID NO: 356750 - DNA, 825 bp, Pseudomonas aeruginosa; identical to SEQ ID NO: 355845

SEQ ID NO: 356751 - DNA, 336 bp, Pseudomonas aeruginosa; identical to SEQ ID NO: 330329

SEQ ID NO: 356752 - DNA, 2625 bp, Pseudomonas aeruginosa
atgaaaagcgctgaaatccgtgaagccttcctccgcttcttcgaagagaagggacacacccgtgtcgcttccagttcgctgatcccggcgaacgatccgaccctgctgttcaccaacgcgggcatgaaccagttcaaggactgcttcctcggcctggaaaagcgcgcctacacccgtgcgaccaccagccagaaatgcgtgcgcgccggcggcaagcacaacgacctggaaaacgtcggctacaccgcgcggcaccacaccttcttcgaaatgctgggtaacttcagcttcggcgactatttcaagcgcgacgccatccattacgcctgggagttcctcaccggcgagaaatggctgaacctgcccaaggaaaagctctgggtcaccgtctacgccaccgacgacgaggcctacgacatctggaccaaggaagtcggcgtgcccgccgagcgtatggtgcggatcggcgacaacaagggcgcgccctatgcgtccgacaacttctgggcgatgggcgataccggaccctgcggtccctgcaccgagatcttcttcgaccatgggccggagatctggggcggcccgcccggttcgccggaagaggacggcgaccgctacatcgagatctggaacaacgtgttcatgcagttcaaccgcaccgcggacggcgtcatgcacccgctgccggcgccgagcgtggacaccggcatgggcctggagcgcgtcagcgcggtactccagcacgtgcactcgaactatgagatcgacctgttccagaacctgctgaaagcctccgccgaggccatcggctgcgccaacgacgacgcgccgtcgctgaaggtggtagccgaccacatccgttcctgcagcttcctgatcgccgacggcgtactgccgtccaacgagggtcgcggctacgtcttgcggcggatcatccgccgcgcctgccgccacggcaacaagctgggcgccaggggcaccttcttccacaagatcgtcgcagcgctggtcgccgagatgggcgatgccttccccgagctgaagcaacagcaggcacacatcgagcgcgtgctgaagaccgaggaagaacagttcgccaagaccctggagcaaggcctgaagatcctcgaacaggacctcgccgaactgcagggcagcgtgattcccggcaacgtggtgttcaagctgtacgacacctatggcttcccggtcgacctgaccaatgacatcgcccgcgagcgcgagctgaccatcgacgaggacggcttcgagcgcgagatggaggcccagcgcgagcgcgcccgcgcttccagcgccttcggcatggactacaacagcctggtcaaggtcgacggcgagacccgcttcctcggctatcagggcgtctccggcgccgggcagatcgtcgcgctgttcagggacggccaggccgtcgagcgcctggaggagggcgaggagggcgtcgtggtcctcgaccagacgccgttctacgccgagtccggcggccaggtcggcgacagtggctacctcgaggcggctggcgtgcgcttcgacgtgcgcgataccaccaaggctggcggcgcgcacctgcaccatggcgtggtcgcccggggcaacctgagcgtcggcggcgcggtcaaggccgaggtcgacgcctcggtacgccaggccaccgcgctcaaccactccgcgacccacctgctgcatgccgcgctgcgccaggtactgggcgaccacgtacaacagaagggctcgctggtggacagccagcgcctgcgtttcgacttcagccacttcgaggcgatcaaggcggaacaactgaaggccctggaggatatcgtcaacgccgaaatccgtcgcaacaccgaggtcgagaccgaggaaaccgatatcgacaccgccaaggccaagggcgccatggcgctgttcggcgagaagtacggcgaccaggtgcgcgtactgagcatgggcggcgatttctccgtcgagctgtgcggtggcacccacgtatcccgcaccggcgacatcggcctgttcaagatcaccagcgagggtggcgtggctgctggcgtacgccgtatcgaggcggtcaccggcgcggcggcgctggcctacctgaacggtgccgaggagcagctcaaggaagccgccagcctggtcaagggcagccgcgacaacctgctggacaagctcggcgccctgctggagcgcaaccgctcgctggagaaggagctggaacagctcaaggccaaggctgccagcgcggccggcgacgacctttcggcggcggcggtggaaatcaagggcgcgaaggtactcgccgcgcgcctcgatggtctggacggcaaggcgctgctggcgctggtcgaccagttgaagaacaagctcggccgcgcagtgatcctgctcggcggcgagctggacgggaaggtcgtactggtcgcaggcgtgacccaggacctgaccggccaactgaaggccggcgagcttatgaagcaagccgcggcggcagttggtggcaaaggtggcggacgcccggatatggcccagggcggcggcaccgatgcagcgaaattggacgaggccctggccctggcccagcgcttcgtcgagcaagggctctga

SEQ ID NO: 356753 - DNA, 1005 bp, Pseudomonas aeruginosa
gtgcctgtcatcgacctgcgcagcgacaccgtcacccagcccaccgccggcatgcgcgaagccatggccgcggccgaactgggcgacgacgtctatggcgaggaccccacggtcaaccgcctggaggccgaactggcggcgcgcctgggcttcgccgcggcgctcttcgtaccgaccgggaccatgagcaacctgctcggattgatggcccactgcgagcgcggcgacgaatacatcgtcggccagcaggcgcatacctacaaatacgagggcggcggtgccgcggtgctgggctcgatccagccgcagccgatcgacggcgaggccgacggatcgctccacctggacaaggtcgcggcggcgatcaaggccgacgatttccacttcgccaggacccgcctgctggccctggaaaacaccatgcagggcaaggtgctgccgctcgactacctggccgcggcgcgcgccttcactcgcgcgcgtggcctggccctgcacctggatggcgcgcgcctgtacaacgcggcggtgaagctgggcgtagacgccagcgagatcacccgacacttcgactcggtgtcggtgtgcctgtccaagggcctcggtgcgccggtgggctcggtgctttgcggcagcgtagaactgatcggcaaggcccgccgctggcgcaagatggtcggcggcgggatgcgccaggccggcctgttggcggctgccggactgtacgccctcgaccaccaggtggcacgcctggccgacgaccacgccaacgccgcgcgcctgggcgacgggctgcgcgaactgggctatgcggtggagccggtgcagaccaacatggtctatgtcgatgtcggcgagcgggcggtcgcgctgcgcgacttcctcgccgagcgcggggtgcggatcagcgcggcggcgcgtttgcgcctggtcacccacctggacgtttccgccgagtccataggacaagtactggatgccttcgcggcctttcgtcgctcataa

SEQ ID NO: 356754 - DNA, 999 bp, Pseudomonas aeruginosa
atgctcgccctcggcaaactgctcgacttgaccctggccggccgcgagccgaccgagaagatccagctcaccgccgacggcacccgcctgcactggctggccgagggcgcgctggaagtcacgccgatcggcgcccgcgataacggcgtcgacctgttgctctcggccggtatccacggcaacgagaccgcgcccatcgaactgctcgaacggctgatccgcaaggtcgccgctggcaccctcaagcctgccgccagggtcctcttcctgttcggcaaccccgaagccatccgccgcggcgagcgctacgtcgaacaggacatgaaccgcctgttcaacggtcgccacgaggagggcagtggcaacgaggccttccgtgccgccgagctggagcgcctggcccaggtgttcttcagcaagaccgagcgagtccacctgcactacgacctgcataccgcgatccgcggctcgaagatcgagcagttcgccctctacccctgggccgagggccgccagcattcccgcagcgaactggcccgcctgcgcgacgccggcatcgaggcggtgctgttgcagaacaagccgggcatcaccttcagcgcctacacctacggccagctcggcgccgaggcctttaccctggaactgggcaaggcacgtccgttcggagagaaccaggaggtcaacctggagcgcctggagcggagcctggagctgctgatcgacggcagcgaggaacagccggacggctcccggctcgacggcctcaagctgttcagcgtgtcgcgcgaggtgatcaagcacagcgaccacttccgcctgcacctcgacgacgacgtggccaacttcaccgaactttcgccgggctacctgctggccgaggatatcggcggcacgcgctgggtggtggacgaggtcggcgcgcgcatcatcttccccaatccacgggtgaagaacggcctgcgtgccggaatcctggtggtgccggccaagctctga

SEQ ID NO: 356755 - DNA, 291 bp, Pseudomonas aeruginosa; identical to SEQ ID NO: 318559

SEQ ID NO: 356756 - DNA, 1347 bp, Pseudomonas aeruginosa
atgaatgcccatgaagtgaatttcgacggcctggtcggcccgacccacaactacggcggcctgtcctacggcaatgtcgcttcgcaaagcaacagccaggcggtgtccaacccgaaggaagcggcgaagcagggcctggcgaagatgaaggcgctgatggagatgggtttcaagcagggggtactcgctccgcaagcccgcccggataccgctgcgctgcgtagcctgggcttctccggcagcgacgaggaggtgatccgccgtgcggcgaaggaagcgatgcctctcctcgccgcctgcagctcggcttcgagcatgtggaccgccaatgccgccacggtcagcccgagtgccgacaccgccgatggccgcgtgcatttcaccgcggccaacctgaactgcaagttccaccgatccatcgagcatcccaccaccagccgcgtgctggcggcgatgttcaacgacgagcggcatttcgcccatcacgcggcgctgccggcagtgagccagttcggcgacgaaggcgcggccaaccacacgcgcttctgcaaggactatggcgatgccggcgtggagttcttcgtcttcggtcgcagcgccttcgacagtcgcttcccggcgccgcaacgctatccggcgcgccagaccctggaagcctgccaggccgtcgcgcgtctgcacgggctgagcgaggccggagtggtctacgctcaacagaacccggcggtgatcgaccagggcgtgttccacaacgatgtgatctcggtgggcaatggcgaggtgctgttccatcacgaggacgccttcctcgataccgagaaggtccttgccgaactgcacgacaagctgggccgccgcggcggccgcttccgcgccatctgcgtgccgcgcgaccaggtcgcggtggaggacgcggtgaagtcctacctgttcaacagccaactgctgtcgaaggccgacggttcgatgctgctggtggtaccggaggagtgccggaacaacccgcgggtctggaactacctggaccagctcaccggcgacgacggtccgatccgcgaagtgaaggtcttcgacctcaagcagagcatgcagaacggcggcggtccggcttgcctgcgcttgcgcgtggcgctgcaggaacgggagctggcggcggtgaatccgggggtgatcatgagcgccggcctgtacgacacgctggtagcctgggtcgaccggcactaccgcgaccgcctgagcgagaccgacctggccgacccccaactgctgctggagtgccggacggcattggatgaactgacgcagatccttaaactgggctcggtttattccttccaactcgattga

SEQ ID NO: 356757 - DNA, 1464 bp, Pseudomonas aeruginosa
atgagtacccattacattgccggccagtggctggcgggccagggcgagaccctggagtccctcgacccggttggccagggcgtggtctggtccgggcgcggcgctgacgccacccaggtcgacgccgccgtgcgcgccgcccgcgaggccttcccggcctgggcgcggcgcccgctggagcagcgcatcgagttgctcgagcgcttcgctgcgaccctcaagtcccgcgccgacgagctggcccgggcgatcggcgaggaaaccggcaagccgctgtgggagtcggccaccgaagtgaccagcatggtcaacaaggtggcgatctcggtgcaggcgttccgcgagcgcaccggcgagaagtccggtccgctggccgacgccaccgccgtgctgcggcacaagccgcatggcgtggtggcggtattcggtccctacaatttccccggccacctgcccaacgggcatatcgtcccggcgctgctggccggtaactgcgtggtgttcaagcccagcgagctgaccccgaaggtcgccgagctgacgctcaaggcctggatcgaggccggcctgccggccggcgtgctcaacctggtccagggcggtcgcgaaaccggcgtcgcgctggccgcccaccgtgggctcgacggtctgttcttcaccggttccagtcgcaccggcaacctgctgcacagccaattcggtggccagccgcagaaaatcctggcgctggagatgggcggcaacaacccgttggtagtggaggaggtcgccgacctcgacgccgccgtctacaccattatccagtccgccttcatctccgccggccagcgttgcacctgcgcccgccgcctgctggtgccgcagggcgcctggggcgacgcactgctggcgcgcctggtggcggtcagcgctaccctgcgggtcggtcgcttcgacgaacagccggcgccgttcatgggcgcggtgatttcgctgagcgccgccgagcacctgctcaaggcccaggagcatttgatcggcaagggcgcacagccgctgctggcgatgacccagccgatcgacggcgccgccctgctgaccccgggcatcctcgacgtcagcgcggtggccgagcgaccggacgaagagttcttcgggccgctgttgcaagtgatccgctactccgatttcgctgcggcgatccgtgaagccaacgccacccagtacggcctggccgccgggttgctgtcggattcccgcgagcgtttcgagcagttcctcgtggaaagccgcgccggcatcgtcaactggaacaagcagctcaccggcgccgccagcagcgcgccgttcggcggtatcggcgcgtccggcaaccaccggccgagcgcctactacgccgccgattactgcgcctatccggtcgcctcgctggaaagccccagcgtgtcccttcctgccaccctgactcccgggatcagcctatga

SEQ ID NO: 356758 - DNA, 1023 bp, Pseudomonas aeruginosa
atgatcgtacgtcctgttaccagcgccgacctgccggccctgatcgagctggcgcgcagcaccggcaccggcctgaccaccctgccggccaacgagcagcgcctgcagcatcgcgtcagttgggccgagaaggccttccgtggcgaggccgaacgcggcgacgccgactacctgttcgtcctcgaggacgacgccggcaaggtcgtcggcatctccgccatcgccggagcggtggggcttcgcgaaccctggtacaactaccgggtcggcctcaccgtgagcgcctcgcaggaactcaacatccatcgcgagatccccacgctgttcctggccaacgacctgaccggcaattccgagctgtgctcgctgttcctccacgccgaccaccgcagcggcctcaacggcaagctgctgtcgcgcgcgcgcttcctgttcatcgccgaattccgccacctgttcggcgacaagctgatcgccgagatgcgcggcatgtccgacgaggaggggcgttcgccattctgggaaagcctcggccggcacttcttcaagatggaattctcccaggccgactacctcaccggggtcggcaacaaggccttcatcgccgagctgatgccgaagttcccgctctatacctgcttcctctccgaggaggcgcgcggggtgatcggccgcgtccatccgaacaccgagccggcgctggccatgctcaaggccgagggcttcagctaccagggctacgtcgacatcttcgacgccggcccggcgatcgaggccgagaccgacaagatccgcgccatcgccgagagccagaacctggtgctggcggtgggcactcccggcgacgacgccgagccctacctgatccacaaccgcaagcgcgaagactgtcgcatcaccgccgcgccggcgcgggccgccgccggcaccctggtggtcgatccgctgactgccaagcgcctgcgcctgtcggccggcgcctcggtacgcgcggtgccgctgtcggcgcagaagcgcggttga

SEQ ID NO: 356759 - DNA, 1017 bp, Pseudomonas aeruginosa
atgttggtgatgcgccccgcccaagcggccgacctgccacaggtgcagcgtctggcggcggacagcccggtaggcgtcacgtccttgccggatgacgccgaacgcctgcgcgacaagatcctcgcttccgaggcctcgttcgccgcggaggtgagctacaacggcgaggaaagctatttcttcgtcctcgaggacagcgccagcggcgagctggtcggctgctcggcgatcgtcgcctcggccgggttctcggaaccgttctacagcttccgcaacgaaaccttcgtgcacgcctcgcgctcgctgtcgatccacaacaagatccatgtcctctcgctgtgccacgaccttaccggcaacagcctgctgaccagtttctacgtacagcgcgacctggtgcagagcgtctacgccgaactcaactcgcgcggtcgcctgctgttcatggccagccatccggagcgcttcgccgacgcggtggtggtggagatcgtcggctacagcgacgagcagggcgaatcgccgttctggaacgcggtcgggcgcaacttcttcgacctgaactacatcgaggcggaaaagctctccgggctgaagagccgcaccttcctcgccgaactgatgccgcactatccgatctacgtgccgctgttgccggatgccgcccaggaatccatgggccaggttcacccgcgagcgcagatcaccttcgacatcctgatgcgcgaaggcttcgagaccgacaactacatcgacatcttcgatggcggcccgaccctgcacgcgcgcacctcggggattcgctcgatcgcccagagccgggtggttccggtgaagatcggcgaggcgccgaagagcgggcgtccatacctggtcaccaacggccagttgcaggacttccgcgcggttgtgctggacctggactgggcgcccggcaagccggtggccctgagtgttgaagccgccgaggccctgggcgtcggcgaaggtgccagcgtgcgcctggtagcggtctga

SEQ ID NO: 356760 - DNA, 1221 bp, Pseudomonas aeruginosa
atgtccgctccccatgcgcaggtagaacgtgccgatttcgaccggtatatggtccccaactacgcccccgccgccttcattccggtgcgaggcgagggatcgcgcgtctgggaccagagcggccgcgaactgatcgatttcgccggcggcatcgccgtgacctccctgggccacgcgcatccggcgctggtcaaggcgctcaccgagcaggcccagcgcatctggcacgtttccaacgtcttcaccaacgagccggccttgcgcctggcgcgcaagctggtggacgccaccttcgccgagcgggtgttcctcgccaactccggcgccgaagccaacgaggcggccttcaagctggctcgccgctacgccaacgatgtctacggcccgcagaagtacgagatcatcgccgccagcaacagcttccacgggcgcaccctgttcaccgtcaacgtcggcggccagccgaagtattccgatggcttcgggcccaagttcgagggtatcacccacgttccctacaacgacctggaagcgctgaaggcggcgatctccgacaagacctgcgccgtggtgctggaaccgatccagggcgagggcggcgtgctgccggcgcagcaggcctacctggaaggggcgcgcaagctgtgcgacgagcacaacgcgctgctggtcttcgacgaggtccagagcggcatgggccgggtcggcgagctgttcgcctacatgcactacggcgtggtcccggacatcctctccagtgccaagagcctgggcggcggcttccctatcggtgcgatgctgaccaccggcgagatcgccaagcacctgtcggtcggcacccacggcaccacctacggcggcaacccgctggcgtcggcggtggccgaggcggcgctggacgtgatcaataccccggaagtgctggatggcgtgaaggccaagcatgagcgcttcaagtcccgcctgcagaagatcggccaggagtacggcatcttcgacgagatccgcggcatgggcctgctgatcggtgcggcgctgaccgacgagtggaagggcaaggccagggatgtgctcaacgccgccgagaaagaggcggtgatggtgctccaggccagcccggacgtggtgcgcttcgcgccgagcctggtgatcgacgacgccgagatcgacgaaggcctggagcgcttcgagcgcgccgtggccaagctggtccgcggctga

SEQ ID NO: 356761 - DNA, 261 bp, Pseudomonas aeruginosa; identical to SEQ ID NO: 343289

SEQ ID NO: 356762 - DNA, 1113 bp, Pseudomonas aeruginosa
atggagcgtatcgaccacctgctgccgtggagcaccctgggaagcgagaagcgcctgagcgtgttccgcttcggctgcggcgcgcgcaaggtctacatccagtccagcctgcacgccgacgagctgccgggcatgcgcaccgcctgggagctgaagcagcggttgcgcctgctggaggcggaaggccgcctgcgcggcaccgtcgagctggtgccggtggccaatccggtcggtctcgggcagatgatccaggcgctgcaccagggacgcttcgaaatgagcagcgggcgcaacttcaaccgcgatttccccgacctgctggacgcggtgatcgacagcgtcggcgagcgtctcggcagcgatccggcggccaatgtcgcgctggtccgccaggccctgcgcgcggcgctggacgccctgccgccggcgacctcggaactggagggcatgcagcgcctgctgtatcgccacgcctgcgacgccgacctggtgctcgacctgcattgcgacttcgaggccgccatccatctctataccctgccgcagcaatggcccgccttcgcctccctggccgcacgcctgggcgccgctgtcgggctgctcgccgaggagtccggcggcggttccttcgacgaggcctgctcggtgccgtggctgcgcctgtcgcgcctgtatccgcgcgccgagctgccgctggcctgcctggcgaccaccgtcgaactcggcggccaggccgacaccaccgtgcagcaggccgaggccaacgccgcggcgatcctggccttcctcgccgagcagggcttcgttgagggcgaatggccggcggcgcccgaagcctgctgcgaaggcttgcccttcgagggcaccgaatacgtccacgccccgcataccggcgtggtgagtttcctgcgccggccgggcgaatgggtggaggcgggcgaaccgctgttccaggtcatcgatcccctggccgaccgtgccagcaccgtgtgcgccggggtttccggcgtgcttttcgccatcgaacggatgcgctacgcgcagccgggactctggctggccaaggtggccggtcgtcaaccgatccgtcagggacgcttgctcagcgactga

SEQ ID NO: 356763 - DNA, 1134 bp, Pseudomonas aeruginosa
  misc_feature (371)..(380): n is a, c, g, or t
atgtacgaattttcagtagagcaagccgcaaacaaaattcatgaccacagatcgaaagagtactttggagaggtgctgaataattacttcaatgggaactatcgatcctccgtggtgatgctttggacggtggtaatatgtgatctggtgtacaaacttcagtatttaaaggacattcataacgacgagaaagccaccaccattcttgatgagatggtcgagtttcaggcaaaaaacccggcaaatcctaagtgggaggaaactctactaaaggagatatcctccagaacaaatttgctggaaagtcacgagctagactctttgctggttttacagaagcatcgtcacctttcagctcaccccgtcatcannnnnnnnnnatacttctcaaatcttaatagggagatatctgctcaactttttaagtccctgtggaggattgcatttaagaccgataacgaaaaatgcaatgaaaatagggagataaatgttcgcgccttacgtattttatttgagagagatcgggaattctttgctgggtgcgtacgagatagctcggcttactatagcgaaattggcgacaactcacctctgcggcacgccatattcttccttggtgactatcctcatctattcaatctccttacagaggcggctagagagttcatcaaggcaaaatcccaaacagacattgacctgctaacagtttcatacttcttaagcagcaatatatccgagcacattgatatgctggtaaagcatatcaatcaatatcacaaacttgcatttggcggcgcccacaacattcatcggaaccacatcaatgatctcaggcagcatgcatcctcagccggaataaagaatgatataaacaagcttcttgtgacaatgtatgtcaactccttgaatttcgatgccgccgacgtacttttcgctcagttcattaagccctttattgaaaacttctcagcagaagacgttgagttgctaataataggaattggcgaaaacaatcagacacattggcgaggtcgcgcgaacgaagaccataaagcagtggtggctaaggccagtgaactaataaaagatttcgatcccagtaaattcagctatctaccgaagattgcgaagtaa

SEQ ID NO: 356764 - DNA, 1092 bp, Pseudomonas aeruginosa
atgcccgattccgtcgctgccggcctgcgcctggcgccagaagaactgacccgcccgttcgctcccgagcaattcgccttcgacaccaccgatgacctggagcccttccgcggcgtgctgggccaggagcgtgcggtcgaggcgctgcagttcggtgtggcgatgccgcgtccgggttacaacgtattcgtcatgggcgagccggggaccggacgcttctccttcgtcaaacgctatctgcaagccgagggcaagcgcgtcgccacgccctccgactgggtctacctgaacaatttcgacgagccgcgcgaacctcgggtgatcgagctgccgccgggcagcgcgaccgaattcagcgccgacatcgaccgtctgatcgacaacctgatgtcgaccttcccggcggtcttcgagcatccggcctaccagcagaagaagaacgccgtcgaccgcgctttcaaccagcgctacgaccgcgccctggactcggtggagcggcgcgccctggagaaggacgtggcgctgtaccgcgacagcgccaacgtcgccttcaccccgatgaaggacggcaaggccctcgacgaggccgaattcgcccagttgcccgaagccgagcgcgagcgtttccacaaggatatcgccgccctcgaggagtacctcaacgaggaactggcgagcctgccgcagtggaagcgcgagtcgagcaaccagttgcgcgagctcaacgaggaaaccatcaccctggccctgcagcccctgctggcgcctctggtggagaagtacaacaacaacccgggcgtctgcgcctacctgcaggcgatgcaactgaacctgctgaagaccgtggtcgaccaactggtcgacgacagccgcaccgacgcccagcgcaagcaagggctgatcgagcagtacgcgccgaaccaggccatcgtccaccacgcgaccagcggcgcgccggtggtgttcgagtcgcacccgacctacgacaacctgttcggccgcatcgagtacagctcggaccaggggcgctctacaccagctaccggcagttgcgtccgggggcgctgcaccgggccaacggcggcttcctga

SEQ ID NO: 356765 - DNA, 1008 bp, Pseudomonas aeruginosa
atggaatttaaggatgcagggaagcgtaaaaatggcggcggatcagacacactctactttaacgcctacacagaggacttatttatctgggaaaacgatctagatggagacagcgcccgtcatctcaagcttaaccccaactctagatttttcaacggaattaaggacctctcactagatgagaccatcgccggctatctcaaccgttataccgatttcgattttgatatcgattacgatgaatggaaagtttcgttccgcaaagacgatgctgagaacataaaaatatccagaggagagcaaaatatcttcatctggtgtctatttatggcaatctgcgagcggatgctagatggtcacgtttcgtaccaatcaaataaatacctctacattgacgacccgatttcttcgctcgacgacaacaatgctatcgctgtcgcgtgcgacttggcagagcttctccggcgtgctgccagccgtaaggacgagaacggagctgccgcccctatcaaagtcgttttttcatcccaccatgcacttttcttcaacgtgatgtgcaacgagataggcagggcaaaagaggatcaacccaaggtagctcatcggcgttacttccttcaccgcccgagcggcgaagggatatatacccttcgagccaccgaagacactccattcttccatcacgtcgcgactcttgcggaactccaaatggccgcagacccagccaaaggtaagctatatacattccacttcaacgccctgcgcagcattatggagaagaccgcctctttctttgggcattcggatatttccttctgcctcaaggcgatcaacaacgaggaagacagagctctgtacaaccgagcgctcaatcttcttagtcacggcaagtatgccatccatgaccccgttgagatgggcgaagacaataaggatttgtttcgccgcattctccaggatttcttgacggagtttaaattcagcttgccgagtattgtgaaaccatga

SEQ ID NO: 356766 - DNA, 1206 bp, Pseudomonas aeruginosa
atgcctaattttggatttcatatagcacccgcccatcctgtggcagggcgcctgatttatgattctaaaaaattatcagaaaatatattaaagcagcagagcgatgaacgggttttttcaagggcgcaagagcaaaaaaggctttctgaaggtgacgtagtcggtggtgcgccttgctgtaaagctatccatattacacttggttttgatgggactaataataacgataaggctgatggttcatcggtttctccatcttgcagtaatgtcgctaggctaattcatgcaagtattgggagcggcgatgatataaacagtagggggatttttaagtactattgcccaggtgtgggtacggtgtttccggatattaaagaatttacgccttcaaacatgggattaattggtgctgagggaggcgaaaatcgaataaactgggggctggttcagttagttgatgctcttttctatactttattaaaaagtaggcttaaactaaatgaggttcagggcctagtagaagaaatgtccactaactggaccgtcagtacgctcactggtggtttattggaaaacggcgagaaaaaacgccgaactgccttggagccaaaactcaaggaactggaagaaaagcttcgacagcgtcagaactctggacagaaaccgcatatcctggccatgcgcttgtatgtctacggattctcccgtggggcggcagaagcacgagcctttgccaactggctgcaggagctaacccgggtcagcgatgccgatggtcgggtggaatatcgctttgccggtctgccgatctcgatcgagttcctcggccttttcgataccgtggcggcagttgggctggcggatagtgcgccgttcgctgccgggcatatggattgggccgatgacaccatgcgcctgcccgatgaggccctctcccagtgcctgccgaccatcctgccggaagactgttcttttctgaaacgttgcgtgcatctggtttcctgtcatgagcagcgtgccagttttccactcgattcgatccgccgtcgtgacatggatgccaacggacgtcggacggggccctcctgctaccggaagtggacggtggaatatgcttatcctggtgttcactcggatgttggtggcggttatggcgtcggcaaccaggggaaagctgtgggaggttcggaatttctactatcctag

SEQ ID NO: 356767 - DNA, 1020 bp, Pseudomonas aeruginosa
atgcagcaggtagaagaacatcggcgctccgccgaacgccaccagggccttgccgcgaccgctccagtccaggcgttcgaaccaggccaggagcagcaggccgattcccagggtgagggcgaggaacagcagcgacggcggatacttggtgacgttgaagaagcccatcagggtgatcgccggcgtctcgccgaaggcccagggtttctcgccatagccgttgagcaggcgcagcaggatgaagccgagcagcagcccgccaccgcccgccaggaggtagcgtcggcgcgtggttgccggcgtggcgccgctgaaccagttgcctgcggcatagcccagggcgatcacaccgatccacggcagcagggggtaggaggtgcgcaggcgcagggcgtcgcccgcttcgatccagccgcggtcgtggagcaccgcccacggcaggtgccaggccgagccgggagcgaaatgcagcggatcgagcaggttgtggccggccaccagcagcacgccgagcgccgcgagcagagggcgcggcaaccagagcagggcggccagggcgagcatgctcaggccgatcgcccagatcacctggaggtagatcaccgtcggcggcaactggaaggtccaggcgaagttcaccagggtcagttccagcgccaccaggaacaacccgcgcttgaacaggaacgccgagaccgcccggcgtccctggtgcttctcgccgtagaggaatgccgacaggccggtgaggaagacgaacaccggcgcgcacaggtgcgccagggtgcggctgaggaacagcgccggctcggtgctggcgacgtccatcgggtcgccgacctggcggtgcaggaaaaaggtctcgcggacatggtcgagcagcatgaacagcatcaccaggccgcgcagggcgtcgatgctgtgcaggcgggaggaattggagacggagttgggcatggctgggctggtcgtcggaaaagagggatgagtatcacagcctggcggcgagaagcgagatag

SEQ ID NO: 356768 - DNA, 258 bp, Pseudomonas aeruginosa
  misc_feature (177)..(186): n is a, c, g, or t
atggcccaagcgatgagcccctataccgtaactagcggcgacaaggctaagaagatcctgaagcaaatgctctcaggaactacgctgaaataccgaacggtaggcatcaatcaggcagcctcgaccaccggcacccgtggcggccaccacaactcggtgacccgcgtggtgctcaannnnnnnnnnggtgaagtgctcatcgatccatcgctagccgagtcactaaagcgaatcgggatcagcccatcctcgctgtag

SEQ ID NO: 356769 - DNA, 297 bp, Pseudomonas aeruginosa
atggtcgtccacccgttgcagctcctctgtaagccttctggaatcgatctcatcttcagtcaacgcattagctacgcaatcgacaatacgctggtaggttcgccgatagccttccgccataccctcacgtcgatccagctggagcacccgcaccgtgctctcccctttggcagagggcgcatcatgctcaacatcataacgggcagtcaggtttcccgtatctggatcaaaatccagatattcccacggatcctcaatgctcgggtctaccaacatgggaagaccggcgtccgataa

SEQ ID NO: 356770 - DNA, 609 bp, Pseudomonas aeruginosa
atgcctccctgcacagcatcgcgagcctggccaattaccggcagatcagcctcggcagccgctccgggcagcattcgaacctgctgcggccggtcagcgacaaggtgctcttcgtggaaaacttcgacgacatgctgcgtctggtggaagccggcgtcggatggggcatcgcgccgcattatttcgtcgaggaacgcctgcgcaacggtaccctggcagtcctcagcgaactctacgaaccgggcggcatcgacaccaaggtgtattgctactacaacaccgcgctggaatccgagcgcagcttcctgcgctttctcgaaagcgcccgccagcgcctgcgcgaactcggccgccagcgtttcgacgatgcgccggcctggcaaccgagcatcgtcgaaacggcgcagcgccgctcaggcccgaaggcgctcgcgtaccgccagcgccttgttgcgggtttcctcggcctccagccgtggatccgaatccagcaccacgccggcgcctgcccggacccgcgcgataccttcgcggacctcggcggagcggatgacgatgctggtatcgaggttgccggcgctgtcgagaatgccgatcgcgccaccgtag

SEQ ID NO: 356771 - DNA, 363 bp, Pseudomonas aeruginosa
atggatgacatttgcacgaccttcatcctctgctgccagctcggcacactctgtgggcaggcgtcgattaaggacctcccagggtgctgggagcacaaggtggacgaggactggagcatatcgttcaacgggcacagcgaagaggtccgcgactccaccgggtcgccggtgccgccgctttcaatttgggtcaaacacagccgctatttcgccgacggcatcatcacgccattcggcggaatgatcgtcggtggacgcgaggcagaagatgacttgatgtcagcgcttgaggcagccattcgcgccaaaggcggcacaccagcgactgaagccgagcaggctcagggaggtcgcgatgactga

SEQ ID NO: 356772 - DNA, 402 bp, Pseudomonas aeruginosa
atgactgatatcgacgcaatggcgacccgcttcgctgagctgtacatggcaaagctggaagagcgcgggcagtgcatcgtcgcgaaggctgacatcgagcgcctagccgccgaggctcaggcgctaagggaggaagtcgcagcactgcgcgcaagggtggtggttgtaccggaaccactgaacgaaggcgatgctcggcgggaatgcggggaatacggagtagccatgcagcgtgggtacaacgcatgcctgcgcgaactggcgcgcatcaacggcctgacggtcagcgaggggcttttgcgcaggctgatcgagccactgctttcgcatgctgattacgtcgtagctcgcaacgaactccgcgccctgttcaacgaggacaaggagaacggcaatggctga

SEQ ID NO: 356773 - DNA, 378 bp, Pseudomonas aeruginosa
atgaccgactacgcaaagctgcggaggctggctgagcgggctgatgccttgtacggaatgcctagcctagagcacgaatacgccatatccaagttcagggttgcctccactcccaagaccatcctcgccatgctggacgagatcgacaggctgagcgacgaactatccgcatgcaccgagcatccaggcggatgtgggtattggcgcgaggcagccaagcgtagaactgaagaacgcgatcagttcaaggaggagaacgacgccctgcgcgagagcctgcaagcgctgattcatatttcagacgctacaggctgggaagaccatacctgcggagagatagccaaggcgcgagcagccctggaaggagccaagccatga

SEQ ID NO: 356774 - DNA, 330 bp, Pseudomonas aeruginosa
atgaacgaccgcacactactcgaactggcggcgcgggcggcgcgggcggcggggattgatccagtcttggctgaaccgatcaatttcagtactggggttgaatattactggaacccgctcaccgacgacggcgacgcgctgaggcttgctgttacgcgcggactcgtagtcaccccagaccgagataaccagcggaccctggtatcgaactcagcaggtcatgaatactgcgcgatctattgggatcagctaggcgagatggcggcaaccaggctggcaatcaccgaggccgccgccgagatcggcaagaatatgggaggtggggagtga

SEQ ID NO: 356775 - DNA, 882 bp, Pseudomonas aeruginosa
atggcgcgtgcgatctggaaaggcgcgatcagcttcggcctggtgcatataccggtgagcctgtcggcggcgacctcgtcgcagggcatcgatttcgactggctcgaccagcgcagcatggagccggtcggctacaagcgggtgaacaaggtcaccggcaaggagatcgagcgcgagaacatcgtcaagggcgtggagtacgaaaagggccgctacgtggtgctgagcgaggaagaaatccgcgcggcgcatcccaagtcgacccagaccatcgagatcttcgctttcgtcgatagccaggaaattcccctgcagcacttcgataccccgtactacctggcccccgaccggcgcggaggcaaggtctacgcgctgctccgggagaccctggagcgcaccggcaaggtcgccctggccaacgtcgtcctgcacacccgccagcacctggcgctcctgcggcctctgcaggacgccctggtgctgatcaccctgcgctggccgtcgcaggtgcgcagcctggatggcctggagctggacgaaagcgtcaccgaggcgaaactcgacaagcgcgagctggagatggccaagcgcctggtggaggacatggcctcccactgggagccggacgaatacaaggacagcttcagcgacaagatcatgaagctggtcgaggaaaaggccgccaagggccagctgcacgcggtggaggaagaggaggaggtggctggcaagggcgccgacatcatcgatctcaccgacctgctcaagcgcagcctgcgttcccgcgccggcggcggcaaggacaagggcagcgaaaaggccggggccgacgcgaagggtcgcgccaagtccggtgcctcgcgttcgcggcgcaaggcctga

SEQ ID NO: 356776 - DNA, 1293 bp, Pseudomonas aeruginosa
atgagccaaggcgtttccggctcgcttcaggacacgcctatcggagccgtcacatccgactgggaaatgggcgtaattggagactttgtcaccgcgctgcaagcaggtgttagcgtcaatgctgttgaaactgactctggatgtgcagagggtgaaattggcgtgctgaaaagcagtgctgtactccaaggtaggttttatgcgagtcagcacaaagtagtcgtctcggacgatataggaagagtggcaacgagtgttgtcgcagaccgtatcatcattagccgaatgaacacaccagcgcttgtgggggagtctggctatgtaacaaaggatgaacccaatctgttcctgcccgaccgcctatggcagacggaaccttcagacctaccacactcacagcgctggctgtcttactggttacagcatccgggcattcgccgattgattgctgctggtgcaactggcactagcaacagcatgaagaacatctcgaaagagactgtactgtcgttgcccgttccgcgtactccactccctgaacaacaaaaaatcgccaacatccttaccgctgtggacgaaaagctagacgttgttgatcgccagattgaagccacccgggcactcaagcagggcctgatgcaagcactgttcagtcagagcgttgctgattggccaacggtttcgctacaggaggttgcggaaattcgtactggtgttgcgaagggcaaaaaggggctgaaggagcctatcgaaatgccttatctgcgcgttgccaatgtgcaggatgggcatatcgatctcactgaggtgaaaaccattgcagtggaggccacccaggttgagcgctatgcgattcagcctggtgatgtactgatgaccgaaggtggggatttcgacaagctaggccgtggagatgtttgggaggggcagatatccccgtgccttcatcagaatcacgtctttgctgtacgaccagtcccttccaaactgaactcctattaccttgcggcgttagcggcgagtgattatggccgccaatacttcctctcatgtgctaagcgcactacgaacctagctagcatcaactcatcccagttaaaggccttcccagtgcttttgccacccctggatgaacaagtccgtattgctgatattgttgctgcgtccaatgctcgtattgaaatattgagcacgaaaatggcccactaccaaaccctcaagcggggcttgatgcagaagcttctaaccggcgaatggcgggttaagctcgatagccccagcagtagaggctga

SEQ ID NO: 356777 - DNA, 567 bp, Pseudomonas aeruginosa
atggaattacctgaggggcactacgccgaaaccaaggctgcgctcaaggagctggtcgacctgcgtaatgagttggtgcaccactttcttcagcgtttcgacctttggagtgtcgatggctgtatagccgccgagtcttatctcgatgaaagttacgaaaccatcgacggccactacctgacgctgcgcgactgggccaaatccatggatgaggctcgccagctgatggtgtcctttatgcagaccccggagtacagggatttcgttatcaacggcattgggccggatggcaccgtacattgggctagcagcggtataaccaactgcttacgtgaagcggaaaccaagctggctcaggaggggtggacaccacttttcgaggccattcactggatagccaagacctaccccgagcagacgcccaagcgctatggctgcggaagctggcgtcatgtcatccatgcgtctcagcagtttgaaattcgtaagcaaagccaagccgatactggagctactgtagtttggtatcgcagtcgtccgagggaaacctccaaggaacaggagtaa

SEQ ID NO: 356778 - DNA, 1533 bp, Pseudomonas aeruginosa
atggaagagaaaacagcgtgggagtcggcggtcgaggttgaggctaaaacagactctgagcgttatttggcaaagctggcccgcagagcgttcctcagtctttggagctattccaatgtgcacaccgatgaggggcgtacgcagggaaagggcgatggcaaagagttgtgtgatctcttggttgtctttggcaatcatgtcctgattttttctgacaaagcctgcgcgtttcccaagcatccagatacaaaggtcgcctgggggcgctggtacaaaagcgcagttgaaaaatcagtacgccagctcacgggggcagagagttttttaaaatcccatccagggcgtatttttctggataaagattgctcagttcctttccccttccagttgcctgatccagcctccgcaacatttcatctgattgcggtgacgagagggtctcatgctgctgctcatgcattctgggagaagcaaagttctggcagcctgatgattgataccagccttgatgggcgtgcgcatttgcaggtgccgtttcgtattggctggcctgcggggaagaagcgttttgtccatgtgctggatgagatggcgctggacataatccttgaggaattcgacaccgtccctgacttgatcgcgtacttcaaggccaaggaacgctttttaacctctgtaccgatagtcactgttgcgggtgaagaacaactggttgctcgttatcaaatgagcttcgagggcgggcagcatgtcctacctgaagtcccagatggggttgatttcgtagccctagtggaaggtgactgggagcagtattgcgtcagccaggagcgggctgcccgttgccaggccgatgcggctagctatatgtgggatgcgcttatcgagtatcagagcggtttcattcggtctggtcaggcggcatctccattcttcgagagcgcttccgttgatgaccacgaacgtgtggtgcgagcgatggcgagcgagacgcgcttttccaggcgaatactttctgaggcatttaggtatgcactgaaccagtctaaccctgggcacaaatttgccaggattatgcccagtgctgcctaccccaatcgcttgtatgtgtttctgacgctcccaaggggggcaacgctcaattatcaggactaccgtgctgctcgcgtggatttgctgatgacctactgccatgggttaaagctgaagtttcccgacactctagaggttgtaggtatcgcttctgaaccattggttgaaaatgcatcctcgcaggattttctgttcgtttcgttagaccagcctctggggccagaggaagaactagagcttagagaggcatgcgatgagctgggtatttttcaagacgcaaccatggtggcgaagccattccaagcgtttgagtatccgcaagccgctcgccccactatgtcagcggatctggagcagccagcatttatgaatcgcgcaatgcgcagggcttatgaaagccagcagaagagagcaaaaggtaagcctaagagggggcgctga

SEQ ID NO: 356779 - DNA, 288 bp, Pseudomonas aeruginosa
atgcatgctaggcttgccgaaacgatagcccagcttcaggctgcaaaatcctccattcggtgcgaggagcttgcggcctctttgcgcgaattgggcttcgtggtgcgtgctggcgaagcaggccacaaggtcgtgacgcatcccggtctcaaggggttctattcggcggcctacaactgtggccatggaaagaaccccgagataaagccagcgtatatcgggaaaatactccgcattttgcggcagtatgagtcggaactcgacgagttcctgaaggagcagaaatga

SEQ ID NO: 356780 - DNA, 492 bp, Pseudomonas aeruginosa
atgatcgatcctaatgcctatagcattgaaattagacgcggaacctttgagggcgaagtctgctttcaagcgcgtgtgctggagctgccggatctttatgaatatgccgacagctatgatgaagcctatagcctgctcatagaagcgatctccatgaccgccgaggcgctcgcggagcagggcaagcagatgcctgcgccattcgagcatgtcgaagagttcagtggccgtgtaacgctgcgtctacccaagtcgttgcatgcgtcgctagctcgccgcgcggactgtgaagatgtaagcctcaatgcactgatggtttcgattttgtcggcctatcgcggtttcgatttgggcatgcagaactcgcacgacgaatgggaaaggttggtgcagccaatgccgtctccgattcaggtggatggtgtctccatggcccggcgtgagctgccgaaactgagtgtcgttggctgggacgttgcggacgccgcatga

SEQ ID NO: 356781 - DNA, 519 bp, Pseudomonas aeruginosa
atgaaccttgaagcacttcagcgggccaaagacggcctgcaaattcaagatgtgttcttgaagtcgtcaagctcaaagctggccgaaggtttcgaccctaagttcgatccgcgcctggagagcttgcagttagagttgcgcactacccctaagcgctcctacctcattgaaggcgttcaccagggcgagaacatctcgatcttccgagtggagatggatctgggggccagacaggtatgtccctttgagggcgaggaaggtgaagaagcccagccggatgtagtggtgcagatcgacgctacttttatggcggattacgtcattgccaatcctgagctgaaagctgatcgcgaagcactggatgcttttgccgtcgccaatgctggttatcatgtctggccttattggcgtgaatacttttccagccaggtgtcacgcatgaatttgcccaaagtcatgcttccgatgatgcagttcaccaaagcaagctcggccagcactgcgaaaaaaccggagtag

SEQ ID NO: 356782 - DNA, 1179 bp, Pseudomonas aeruginosa
atggccaaaacgacggacagcccccgccccgtgaggaggaaaaagtattcgtctcagccgctaagaaagctcagtggttggttggcatggatgaggtacacgacagcttttgaagcttatacgcgtgaaccgggggccgaccccactgagtctgtgcgcgtcgttgggtggctcagctcacctaatgcggcagaacctgatgattcgttgatccgacggttgtatgtgctggatcccgaggacttggctgagttctccttggatgagttgttgctagcctggcagcaccgccgtgagacctgcggctcactggcggcagcagccgagctgatggcgctgtaccgcgttgctactggtgaggatgaatcgtatagcggcgcgggtcattacctgtcgcacccggaggtgctcgcggtttttgaaccgctacctgatccctgccagccatcgcacagcaacgcagatgttgcttcggctattgagagtgcttcagaacctacaccgctactttcgctggcggatgtacgaggtttgtcagctgcccacttgatgcaggcttgggaaggccggcccgatacgtttgcttcgcttgaagcggcagcagaaacgttggcttcgctgcgttggctcagttccggaaacgccgagaaaacaagcttccaacactttctcaatcatgcactgattcaagatctggaagatcagcttccacgggagctggatgtcagtccggtagccgtctctgctgagcgtgaaatagagctgctaacggaagatcgtcgagtcgtccgggcccaattgacggtcgtgcgaacagggcagcgtgattttcggacattgctgtgggagcgctacggtggtgcttgctgcgtgactggatgcacgatagagcgcttagttgaagcggctcatattgttccctatcgagggagccagacggatggagaggacaacgggctgctgttgagagtcgacattcatcgcttgttcgatgagcacttagtgagcattgatcctgaccggctgatttttgtcgtatcccaaaacatcaccgatccgacttaccagagcctgcatggaagcccgatgtttcgactgagtcggaagccacggaagatttttctggaggcccattatcggagctttctcagggtggagaatcagcgctcctgccagtag

SEQ ID NO: 356783 - DNA, 2484 bp, Pseudomonas aeruginosa
atggctgacgtaaagatccggctgaccgctgacctcgatgatgcgctgcgcgaggtgtcaggcttccgcaaggaatatgccgaactggtcaggcaggtcgcgcaacctctcaagcgtttaaacgatttcactgctctcgaaagcaccctcgaggacacgcaacgccaggcgcgctcggcgcgcgagcagatccgcacgctcggcaacgagctggcatcgacgatcaggccaagccgcgaattgcagcaggcgtaccgggactccatttcggacttgcgaagcctggagcgggcagagaccgtccaggtagccaagctcggagcgatgcgccgggagttgaagcaggcgggactggatacgaggagcctgacatccgaacggcagcggctccagcgtgagctggatcgaaacctccaggcgggccggaatgatgcggccaccaccagcctccggcaacaggccgcagcgatcaagcagagcgcgatcgaacagcgccgcttcaacttggagcaagcgcgcagcagcctgggagtagccagggtgcgcgaactgcaggctgccatcgggcagttgaaccagcaatatcgcttgcttcggtccagcggaacgctatccacaagggagcttgccgttgcgcagcgggcgctcaagaagcagatcgcggagaccaagagcgaactcaactcgcttggtgccggctcgcggctgtcgagcatcggctctctccgcgggagcggcccggcactggcggttgcaggtctcgccgccgcggtaggcgctgcaacggcgaagctagcgaacggggccgacactgttggccggcttgattccaggcttcgcctggcaacccgctcgcaggaagagttcaacaccgcgcagatcgaactcgaccgtatcgctgatgatgtgcagggcgatgtcggcgacctcatcggcctttattcgcggttgcagcgcccgctccgggatgcgggcatggatcagcgagccgccctcgaaaccgtagaggcggtatcgctcggcctgaaaatcggtggggcatctgccgaggagtcggcctcggtcattacccagttctcccaggccatcgccagtggtgttctgcggggcgaagagttcaataccgttctggagtcctcggatcgcattgctggcgccctggcggactccttcggggtgactgttggccggcttcgtgagatggctgccgccggtgagctgacgtcggagcagatcgttatcgcgctgcggaaggaacttccgaagctccgcgaggagatggcttcgtttgcgccggagatcggcgcggggctgaaccggatcttttccgaaacccagaaatattgggggcgcagagcgaagaatacaggcatcgtcgattgggttgcgaaccagttgaacgatgttgccaagtcgatcaacacggcgactacgctggtgaaaaagggcgagggcagcctcactgccaccctcgccgccgagaaggcgcgtcaagagcagatcgtgaagcgccagaacgatgccctgaagcgggctcgggatcagaacgtcgccgatctccagtctgaggttgttcggaccaaggccctccttgaacagtccaccaagaacctcaacgacgcgctttcgcgccaggcagatgtccgtaaggagtttgccgacctggtgaagggcatccaggcgacgcccacctccggaatgcagaccttcggtgatgccactgcggcccaggcctcggctcgcaacgcgctgaccgccggcaacaatcaaaaggcgatcgaggaggcgcgccgcgcgctgcagatcctccagcaactgaaggacgctggcgcgaacagctacggcttcgaaggcgtggccaaggaggtggagcgcatcgccaacaaggccgcagaggtcgaggctggtaatgccaaggctgcggatgacgtcaaccgcctgaacctggccgacctcgaggagcgcatcaaggctgtgcaaaacgtcgaggtgtcgttcggaatggacttcgaaagcgcggagaccttgaagcaacaggtcgccgacatcgccgccggtttggctgagcagcttgtgatacctatcacgctggttccgcctccggagatgggcttgcctggcgtgcccagcatcacccccaagatacccgggtttgccactggtacgcagagcgctccccctggtatggcgtgggttggggagcgtgggccggagttgatgatgatgcgcggaggagagcgcatcttcaacgcggtgcagtcgctgcagatgtcgcagaggtatcaacgaactctccccgagatacccgagattccgactgcggcgcttcagcaggcgaatccgccggcagccatgcaaaacctgggttcgctgaccctcaacctgggcggagacgatgccggtttcaccgttttcgggacacacgacacgctccgcgatatacgcaaggccgcctcgaagttcgggcggacacgcccaaaatga

SEQ ID NO: 356784 - DNA, 657 bp, Pseudomonas aeruginosa
atgctggcctcgctcaccttgctggcgctggggatcttcggccctggcatcgccacgggccttgtgtccggtgcgccgcagctcggcgcgggtgcgatggcaggcgctgccatcggcgcagccgggacggcggtggctgttggtgctgccgcgacgggcgtaggcggtgccgtggccgctggcgcgcgcatggcaccggctgccgccaagctggccggcgctggtgcgcgtgcggccacgtcggcggctggcagtgcgaaatcggcgttccaggccggctccgccgccgcaggcggtggtgcgaaaggcgcaatcgcgggcctgggcaacgtcgccaagaccggcgcgcaggcagccgggcgaggcgctgcatcccgcgcctccgctgccgggcagcgcatggccgctcccttccgcgctggctggaatggcgctgccgccgatggtggcgcaggtgcggcatccggtcagggtgccgcaggcgaggccgcatccggcgccgctaccgcgcagacgcaggaacagcccgcctgggccaagcggctgcaccgccgccagcaacttacccatgccgcgaccaccgccgcccacacgctgcgcggtggcgatggcggcggttccggccaggggccgagcctgcgcgattccgattcataa

SEQ ID NO: 356785 - DNA, 900 bp, Pseudomonas aeruginosa
atgcatccccagcgcgttgagagcttgagccacgcccagcgcgagcggctggcctacatcgacttccggctctacttcttcggtgagattggccgccccgacctgatcgaccgttttggcgttgctccggcaggggcgacacgcgatttggcgctgtaccgggaaatcgcgccgcagaacatcaccttcgacggcagcaacaagatctaccgcatcgggcaggcgttctccccgctgttcgaccacgcatcgcagcgcgtgctgtcggcgctggctctgggcttcggcgatggcgtgaccggcgcaacgcagccgctgctgccgtgcgagtcgcctaccgctctgagcaaccccaggatggatgtgttggccccggtctgccgggcgatccacgccaagcgacccgtcgccatccgctaccactcgatgagcagcggagagtccgagcgggtcatcgtgccctttgccctggtggacaccggtctgcgttggcacgtccgggcctttgatcgcaagagcggggagtttcgggactttgtcgtcacgcgcatcgaagcgccgacccttcttgatgaggagccgcaggcgaacgagcgtccggacaacgacatccagtggacgcgcatcgtcgagctggacttcgtgccgcacccgcgccttgagcgccccgagatcatcaagatggactacgggatgaccgacggctcgatccggatgcgtgttcgcgccgccgtcgcgggctacatgctgctgcgctggagcgtggactgctcgcccgaccatcggctcaaggaagaacagtaccgcctgtggctcagcgatccgctggcgctgtacggcgtcgagaacgccaagctggctccgggctaccaagccccaatcagcccaaagaaacgatag

SEQ ID NO: 356786 - DNA, 1719 bp, Pseudomonas aeruginosa
atggccaagacacttgaagcccacgacaaactgatccgggagatcttcgaaggcagctaccagttcgagattccggactaccagcgcccctacgcctggacaaccgagcaggccacagagctgttcgatgatctgtactcggcgatgcaggacgcgcgtgtctcgggggccagcagccaatacttcctcggcagcattgttctgatcaagaacgaccgggacccgaagtcatcggtggtcgacggccagcaacgcctgtctacgctcacaatgctgttcgccgtgttgcgcaccgtgatgccggacgcggcagacgacatcactgatttcctctacaaaaagggcaaggtcagtcttggcgagaaaaacgagtaccgcctgactgcccgcgaggaagatgccgacttcttccgctccaatattcaggagccgggtggcatcgcacagttggtcgccagtacggacaagctgaaagacagccgtctgcgttaccgtgaaaacgccacgctgctgctcgaaaaggccaaggcgcttccgcctgccgacctcattgcgctgtggcagttcctcgccaacgactgctcgctggttgtcatctccacgcccgacctcgaagccgcataccgcatcttctccgtactcaacaaccggggactcgacctcgcgcctatcgacatcatcaaggcgcaggtccttggcctgatccgcaccacggcaggcgacgtcaagagccgcgcctacgccaaagagtggagccggatcgaaagttcgctgggccgcgacgccttcggtgacctgtttggccacatccgcagcatctacgccaagaagaagcagaagtacatcctggtcaaggagttccaggagcacgtcaccgagtacaagacccccatcgacctcgtcgacaaggtcatcaaaccctatgccgaagtgtgggacttcgtgcgcgatgcagacttcgaggccaccgaacacgccgagacgatcaacgaacacctgtcttggctcaaccgcgtggacttcaaggactgggtgcccccggcactggtctacttcaagcgcttccggcagcaacccaaactgctcgcagagttcttccagtcactggaacgcctgacctatttcctgttggtcaccaaggtgggcatcaacgagcgcatcgaaacctacgccgcgctcaccaaggaaattgaaccggaggccttcaagggggatctggctgcgctcaccacgctgacactgacagacgcgcaaaagcgcaagttcgtcgcggcactcgatggagacgtttacgacgatctgcccaaggcacggatggcgctggtcttgcgccttgagtccttggtgcgcgcccccggcgtgcagcttcaagatgccgtgtctctggagcacgttctgccgcaaaccccgccagacggttcggactggatcaagtggttcccggatgaagacgagcgcgacggctggacgcaccgtctggccaatctggttccgctggataggaacaagaactcgtctgccagcaactatgactttgccaagaagaaggacgcctacttcaagggcaaaggcaaggcgtcgcccttcgtgttgacgcaggaagtcagagcagaaaacgagtggacgcccacgcttctggccgaacgccagaaacgccttgtgggcgtcctcaaagaccattggaatctcgccgtcgacacaggcacagcggcgagctga

SEQ ID NO: 356787 - DNA, 2391 bp, Pseudomonas aeruginosa
atgcagaagaagcaacaacaagaccaaagccagatcaagtggatttccgacttcatctggaacatcgctgacgaccgcctgcgcgacgtttacgtgcgcggcaaataccgtgacgtcatcctgcccttcaccgtgctgcgacggctcgatgccgtacttgaagccacgaaggacgcagtgctggagcgcaagaagttcctggacacccacaaagtggccgagcaggacggcgcgctgcgcatggcggcaggccaagccttctacaacgtctcggaattcacgctggccaagctcaaggccagcgcagcaggccagcgcttgcgcgatgacttcattgcgtatttggacggcttttcgcccaacgtgcaggagatcctcaccaagttcaacttccgcaaccagatccagaagctggtggattcccacgtccttggttacttgatcgacgacttcctcgaccccgaggtcaatctcgcgccgctacccgtgaaggatgccgacggccgcatcaagctacccgcgctggacaaccacggcatgggcacggtgtttgaggagctgatccgccgcttcaacgaagacaacaacgaagaggcaggcgagcacttcacgccgcgcgacgtggtgcagctcatggccaaactgctgttcctgccggtggccgaccggatcgagtccagcacctattcgctctacgacggctcctgcggcaccggcggcatgctcaccgtggccgaggaagcgctacacgaactggccgaccagcacggcaaggaagtatccatccacctgttcggccaagaaatcagcgacgaaacttacgccatctgcaaggccgacctgctcttgaagggcgaaggagcggaggccgagaacatcgtcggcggcgcggacaaatccaccctgtccgccgaccagttccgcagccgcgaattcgatttcatgatctccaacccaccctacggcaagagttggaagaccgatctggaccgcatgggcggcaagaaggaattcaatgacccgcgcttcatcgtcagccacgcgggcaacgccgaattcaagctcatcacccgctccagcgacgggcagctcatgttccaggtgaacaagctgcaaaagatgaagcacaacacgccgctgggcagccgcatcgcgctggtgcataacggctcagcgctgttcaccggggacgcaggccagggcgagagcaacatccgccgctgggtgctggagaacgactggctcgaatccatcatcgccctgccgctcaacatcttctacaacacgggcatcgccacctacatctgggtgctggccaacaagaaggccgaagcgcggcgtggcaaagtgcagttgatcgatgcatcgcagtggttccagccgctgcgccgcaacctcggcaagaagaactgcgaactctcggacggagacatccagcgaatcctcgacctctacctcggcgaggcgcaggaaaccgcccagtccaaatggttcgacacccaggacttcggctactggaagattaccgtcgagcgtccgctgcgactgaaaagccaactctccgacgaacgcatcgagcccctgcgttttgccaccggcgatgaggcgctgcgcgccgagatctacgccacccacggcgaggcgctttataccgagttcgccaagcgcaaaccggccatcgaggcgtggctgaagggtgaggacgagaacgaagacgacgacagcgaagacggcgacagcggcgatgaaagtgaagcacccgccgcacgcaaggccgtgcctgccaagcgccgcaagaagctgctcgacgtatcgacgtggcagcgcgacaaggggctaatggaggtagcgcaacgggcgcagcaggccctgggcagtgctgtgttcgacgaccacaatgagttccgcacccgcttcgatgctgccctgaaggcgcagggcgacaagctcggcgcgccggagaaaaaggccatctacaaggcggtgagctggcgcgacgaaaccgcgccgccggttatcgccaagcgcagcaagctcaaggcaggggaacacttcgagcccggcttcgacggcgcgtacctggaaaccgtgggcaaggatcgcttcatggtcgagtacgagcccgacagcgagctgcgcgacaccgagcaggtgccgttgaaggagccgggcggcattgacgccttcttcgcccgcgaggtgctgccacacgcaccggacgcatggatcgccacggacaagacccagatcggctacgagatttctttcgcccgctatttctacaagcccacgcccctgcgcacgctggcagaaatccgcgccgacatcgtcaagctggagcagcagactgaaggcttgctagacaagatcgtgggaggcgtgcccgcatga

SEQ ID NO: 356788 - DNA, 1035 bp, Pseudomonas aeruginosa
atgagccaacgtatcgaccttttggcgtccatcgccaacacgattcaggactatcggggcgggtcgctcccgcggcccatccccgaccacatcgagcattgggtgcagcaattcgacgctgctgtgcagctgcccatcctccaagagatcgaccacgtactcaagaaaatctatttctcgaaagaggacgtggccaagttcctccgtggcgcgatgcgcactcagaagctcaccggcgacagacccgacaagttctggcgatccgccagcttcctcgatattcagggcggcggcagcagccaaaccgacatgctcgccctgttctccgagcaactggaagatgagcacggattcggcatcgacgactgcgggcaaggtgacgaagtcttcatctatttggatgacggcattttcaccggcaaccgcgtgcgacgtgatctggaaggatggattggtggcaacgcgcccgcgcaggctaaggtgcatgtgatctgcatcgcagagcacagtggcggacggtattacgcgaacaccaagattcaagaagtcatccgaggttcgggaaagaatatcgatatcacgtggtggcacgccatcgagctggaggacagaaagacctacagcgcaacgtcagacgtgctgcgcccgacggcgatcccgaacgatcctgcggtgcaagcccatgtggctgccatgcggtacccgcccacgctcagagccgctggcaaccccggcgctgcgggtctgttctccagcgacgcggccaaaattctgctggaacaggagttcctgaaagccggtgtccacattcggcagatttgccccaacctcagtgccgtccagcgccccctggggcacatgacgctggaaacgctgggcttcggctcgctcatcgtcacctaccgcaattgccccaacaacgcgccgctggcgttctgggtggatgcgccgtggtatccgcttttcccgcgaaccacgaacacgcagacggcgatgagaaggatgtttgccgatctgaccggaggcgacctctga

SEQ ID NO: 356789 - DNA, 2076 bp, Pseudomonas aeruginosa
atgagcggaagagatcagagtcgcacttacagccgcaaggacagcgtcgtcttcctcaagaccgacgaaccgtttggtggcctatccaacatggcggggggctacccgatccatgttaatggggtacggatactaacctccgaggcgctgtatcaggcctgccgctttccgcatcttcccgacgtgcagaagctgatcatcggccagatcagccctatgacggccaaaatgcggagcaagccctaccgtaaggattcgcgcccggattgggatcaggtgcgcgtgcgcatcatgcgctggagcctgcgcatgaagctggccaacaactggaacgccttcagtacgttgctgctgaagactggcgagcgacccatcgtcgaggaatcgcgcaaggacgatttttggggagccaaggtcgttgacgacggcgacacgctggtcggcatgaacgttttgggcaggctactgatggagttgcgcgagcaggtgaagcagcaagggcgcgacgcagccctggacatcgcaccgccggacattccacagttcctgctgttcgggcaggcgattgaagtggcagtgggactgccaacgccgcaggccgccgaagtacaggagcagggctccctattcggtgcggacacagccatcgcagtcgaggctgtagctgatccggcaccggttgttccagccaagacggtaaatcaaacctttcgcgcatcggggcttccttgggtaccgcacatacctgaaagctggcaagtgctgcgcaatggccgcctattcggtcatcgcgtcgaaatgggcttccccgatctacccattctggaagtgtcgctgcgcaccggcgtgcgtgtgcgtgacatggaaaacctgaagcgcaagcaggtgatgagccagaaggagaagtacaaacgcgcagccaaaggcgacatcgcctacaacatgatgcggatgtggcaaggcgcggtcggacccgcgccagttgacgggctggtcagcccggcctatgtcgtggtgaaaccctacgacgaggccaacagcagctactacagctacctgttccgcacggcggcgtacatgcaggaggtcaacaagttctcacgcggcatcgtggcggatcgcaaccggctgtattgggagtcctttaagcagatgccctcgctcgtgcccccgcgccccgagcaagaccaaatcgtcgcctacctgcgcgcgcaggacgcgcacatcgcccgcttcatcaagaccaagcgtgatctgatcaagctgctcaccgaacagaagctgcgaatcatcgaccacgccatcacgcgcggccttgacgcatcggtggcgttgaagccgtccggcatcgaatggctgggcgagatgccggagcattggaaagctctcaaactcaagttcgctacgaagcgaatcgttggaggctccacgccgaaaagcgacgaagcgtcctattgggatggcggcatcgtctgggtgacaccacgcgacatcagcaaaaccgattccttgcacacgtcgctacgaaccatctcggccgctggcttgcagtcttgtgcgtctacgcttgtaccccccggaagcatcgttatcacctcacgcgcgccggttgggaacgttgcgattgcgcgagttgagctttgcacgaatcagggttgcaaggccgtagtgcccgcgccagatatcgccatcagcgacttcttgttcctgttgttgcttcgtatgaaggaacggctacaggttctcgctaacggtacgacgttcgcggagatcggcacttgggtgctcgccaatgagttcattccagttccacctgtctccgaacagcaagccatctgccgctggatcaccgaagagtgccagccgttggatgacgccatcgcccgcacggaagacgaaatcaagctgatccgggaataccgcgaccgcctgattgccgatgtggtcaccggtcaagtggacgtgcgcggctggcaacccggcccggacgacgtggtggacgacgcggcgctggccgcgctgggcgatgaaaacgaagatgtgaccgaagaggaggatggcgatggcgaagactga

SEQ ID NO: 356790 - DNA, 3072 bp, Pseudomonas aeruginosa
atggcgaagactgacaccagcgagcgctggttcgaggcgcgcgtggtacgcggcttgaccggtgtgccgcagcccgagtacagccatgcgctggctcccaccgacttcgccgccacccacaacggctacgtgcagggcaagcccaccgactacaaccgcgacgtggcgctggatgtggcgcagttgctggcctttttgcaggctacccagcccaaggcggtggacacgctggaactggcggcggacggcatcaagcgcacccagtttctgcaccggctgcagggtgagatcaccaagcgcggcgtcgtggacgtgctgcgcaagggcgtgagccacgggccggtacacgtcgatctctacaagctgctgcccacgccgggcaatgccgccgcagcggatgccttcggcaagaacatcttcagcgtcacccggcaggtgcgctacagcaacgattccggcaatgagctggacttggctatcttcatcaacggtctgccggtactgacgttcgagttgaagaattcgctgaccaagcagaccctggccgacgccatcgtccagtaccaaaccacgcggagcccacaggagctgctgttccagttggggcgttgcgtggcgcacatcgcagtcgatgacgcggaggccgcgttctgcactgagctgaagggcaaagcctcgtggttcctgccgttcaaccagggctggaacagtggcgcgggcaacccgcccaacccggatggtttgaagaccgattacctgtggaagcaggtgctgacccgcgagtcgctggccaacatcatcgagagttacgcgcaggtggtggaggaggaagaagcagacgccagcggcaagaaacgcaagaagcgcaagcagatcttcccgcgcttccatcagttgcgcacggtgcgtgcgctgctgcgccgtgcccataccgatggggtgggcaagcgctatctgatccagcattcggcaggcagcggcaagagcaacacgattgcctggctggcgcaccaattggtggagctgcgccgcgcggacgacccgatgacggcgcagttcgactccatcatcgtcatcaccgaccggcgcgcgctggacacgcagattgcccgcaccatcaaggggtacgaccacgtggcggcgatcttcggccactccgacaacgcgcaggagctacgtgagtacctgcgccggggcaagaagatcatcgtcaccacggtgcagaaattcccgttcatcctcgatgagctgggcgacctctccggcaagagcttcgcgctgttgatcgacgaagcgcattccagccaaggcggcaagaccacggcgcggatgcacgaagccctcggcggcaaggttaccgaggaggagttcgaggaggacagcacgcaggatgcggtcaatgccgaaatcgagaagcgcatcgcatcgcgcaagctgctggtcaacgccagctactttgcattcacggccacacccaagaacaagacgctggagttgttcggcgagaagactctcgtcggcgacaaggtgcagttccgctcgcccgaagaactgacctacaccaccaagcaggccatccaggagaagttcatcctcgacgtagtggagaactacaccacctacgacagcttctaccaagtggccaagacggtggcggacgacccggaattcgacaaggtgaaggcgctgaagaagattcgtcactacgtcgaatcgcacgacaaggccatccgccgcaaggccgagatcatggtcgaccacttcatcgcgcaggtggcgggcaaacagaagatcggtggcaaggcgcgggcgatgatcgtgtgcaacggcatcgcgcgggccattgactactggcgcgaggtgtcggactacctcatgcagatcaagagcccgtacaaggccatcgtggcgtactcgggcgacttcgagattggcgggcagaagaagaccgaggccgatctcaacgggtttccgagcaaggacattccggccaatctcaagcaagacccgtatcgattcctgatcgtcgccaacaagttcgtcaccggctttgacgaacccttgctgcacacgatgtacgtggacaagccgctggcgggcgtgctggcggtgcagaccctgtcacgcctgaaccgggcgcatccacagaagcacgacacctttgtgctcgacttcgccgacaactccgaagcggtgaaggcggcgttccaggattactaccgcgcgaccatccagaccggcgaaaccgacgccaacaaactgcacgacctgaaggccgaactcgatgggcagcaggtgtacagctggcagcaggtggaagacttggtggcgctgtacgtgagcggcgcagaccgggacaaactcgatccgatcctcgatgcgtgcgtggccgaatactcggacaagctcggcgaggacgatcaggtcaagttcaagggcaaagccaaggccttcgtgcgcagctacggctttcttgccgcgattctgagctacggccacccgacgtgggaaaagctgtcgatcttcctgaacttcctcattcccaagctgcccgctcccaaggaggaagacctctccaagggtgtgttggagaccatcgacatggacagctaccgggttgaggccaaagcagcgctgaagatggcaatggacgatgccgacgccaccgtcgagccggtgccgcctggtggtggaggcggcaaaggcgaagccgacatcgacaggctctccgcgatcatcaagaccttcaacgacctcttcggcaacatcgagtggaaggacgaggacaagatccgcaaggtcatcgccgaggaaatcccagcgcgggtagcgcaggacaaggcctaccagaacgcgcaggcgaactccgacaagcaaaacgccaagctggagcacgacaaggcactcaaccgcgtggtgctggagctgctgtccgaccacaccgaactgttcaagcagttcagcgacaaccccaacttcaagcgctggctgacggacaccgttttcgatgcgacctatcagcaggggacggttccgccgaaggctccgccacaggctggagcgtcagcatga

SEQ ID NO: 356791 - DNA, 591 bp, Pseudomonas aeruginosa
atggacgaacagtccgatattgattacatggtggtcttcagcgatggcagcgccacgccgcagacttacctgaataggttgaagacatttgtcgaaaaacggtacggctcatcggaaatctatcagtccagcccgaccattgttctcgagttgaaccacatcaagttcgatctggtgcccgcgacaaaaacgtggctcggcgagctccagattcccaacgggtcaggtggttggatgaccacgaatccgaacgacttcaacgccacgcttgaagcaaagaacaaggacaacaactctttgatcaagccaactattcgtctgatgaaatattggaatgcggccagcggatttccattcgattcatttgcgatggagaagtggatttgtggtcagggcttctggttccagtcgaatcaaaaggactacctgttttcggtaatcgacaatctcagcaccgactcgtcttactcgcaacgagtcaataatgaaatcacgcgtgcaaaaactattgtggccaaggtcaggcaatgcgagaaagaccagatgccagtaacggctgagaatgaggtcaagaagttgttcaggctctga

SEQ ID NO: 356792 - DNA, 948 bp, Pseudomonas aeruginosa
atggcattaaatctcgcaaaggccgtcatcggctacctgaaggaacgccccgaggaaaagttcaccgctcggcaagtcgccgaatggatctttgccacctacccggatgagtgtcaggaaaagcgggccaatagtcgcggcgattacatcaagtctgatgcggatttggtgcagcagctcgtcgcagaaatcagctcgcagcgcccgcgcatgcaaacgaagcacccagaactgaagacgaccgagggacggccccgcaggtactactactcggagcgctcggacagcgccgaagtggcggcagtcgaaagcgagggtacgtcagcggctgcggatgtgagtgcattaaagattgacgagcatgcgctgtacccactgctgtcgcaatacctgtgggaggaattcggcgtgttctccaagcgcgtcgacgagaagcgctcgtccaacaagcgcggacccaacggcaaccgctggctgtacccggacgtggtcggcatggaggacttgggcgcggactggcaccaggaggtgcgcgactgcgtcaaccagtattccgacaaacgcactaagttgtggtcgttcgaggccaagctactgatcaaccgttcgaacgtgcgcgagtgcttttttcaggctgtgtcgaattcgtcgtgggccaatttcggctatctggtcgcggcggaaatcggtggcacagacacgctgaaggagctgcgaatgctgttcgccgcccacggcatcggtttcatcaaactggacgtggacaaccctgccgacagtcaggtgctgattcctgcccgcgagcgtgacgaaatcgattgggacatggccaatcggctggccacagagaaccgtgattttctcgaatacgtgaagctggtgaagcagttctaccagaccggcgaggcgcgcccggcggactgggatgttcccgagacgggggactga

SEQ ID NO: 356793 - DNA, 291 bp, Pseudomonas aeruginosa
atgagtaaccgattcaagcacgccgtcattgacgacgtgacctcgcgcaacatcgacgccagcctgcaagaacatctgctcgacctgttcgaatcggccatgaagtcggtggccacgacgctggtgcgcgaggccaaattcgacaccaccgacttcgccaccgccaaggggcgcggctgcgaggggttcacgttgctggtgagccgcacgcgcgccgactcgcgcgatggctggttcggggcgtttcagcgtggagatgaacgcctcgacgtgatcggccatctggaataa

SEQ ID NO: 356794 - DNA, 498 bp, Pseudomonas aeruginosa
gtgagcgtgattccgtggccgtaccggctgctgaccctcgcggcgctcagcgtcgccctggtcggcttcggctggatcaagggtgcgagccacgttcaagcgcaatgggatgccgccatccagcaacaagccctgcaagccgccgccgtccgcgaacggcaggcgcaagccaccgtcaaggtcgttacgcagtacgtcgaccgcgtccgcgtcgtccgcgagaagggcgacaccatcatcaaggaggttcccgtctatgtgcccgttcaagccgatgctgcttgcactatcaaccgtggctttgtgcgcctgcacgacgctgccgccgcaggtgacctgcccgagcccgcccgagatgctgatgcggccgccgcaggcattgcgctctctgccgtcgccggaacccttgccgccaactaccaaacctgccacgaaaacgccgagcaactgagggcgttgcaggcttgggtcagcgagatggcatccaccaccaagtag

SEQ ID NO: 356795 - DNA, 207 bp, Pseudomonas aeruginosa
atgagcaccagcgtgatcgtcactatcgacgacgtgcgcgccgtcggcctgtgcgtgaacggctcgcgtacatggttcgagcggcatggcctggacttccgcgcctttctgcggaagggacttgatgccgaaaccctgctggccacgaatgacgcgatggcgctgcgcgtggtcgagcacgcgcgtacccggcaggagatgcactga

SEQ ID NO: 356796 - DNA, 1563 bp, Pseudomonas aeruginosa
atgacggatcgcgtcgtcgttcaagacctcgcggaggtttccagcaagccgacgcctggaagcgaactgcccgccttccagggtgaagtgctctcgcgcgccaccttcggggcgagcgcagccagcttcacgccggaaacagctgtcgctccgctgccgcccaatctggcggccagcctgctggcggaatccttggcgggcccctggccacccatcgatgcaccgagctttctggtcgaagtgttgcgccgggatacggcctcaagcgccatcgtcgccaccggtatggatgccttcggcgaccagccttggccggatgcgcaacgcggcgtgtttgccttccgtcatgattggatggagccccttgtggaacggctggagtggcagaccagcgtcacacggctggccagtggcaacgaatcccgtcaggcacgccgacgtgttcctcggcgctggctcacctacaaggtgggcaacgcccgacagaccgatgccttgattggcgactggctggccgatcatctgggccaggccgcgtggtggccactgccacagtacgccgttcatctcactgagaacgctgaggagggcgcgctgactctcggggtgtcggaggctgactggcggcgctttgtcccaccggctgctgcgctgcggctgacctatgacggcgtgcagggctgggacagcgacgaacgctgggtgctgatcattgcgcccgagggctggcaagtcgcccaactcagcgacgtggaaaccgatctgctgtggctggccgaacccttggcgcgtgctgccggagccggtagcagcgtgatgccgctggtgtggggctgcgctgtcgatccggcggacttgacccagtgggtgccggggatggtcggcgggagcgtcaccacgactgtcacgcccgcgcaaacgccggacatggatgcactcgacgacccgtggctcgacgagattccggtctggcccgatggcaactggcgtgacgatccgacagccgccgcgcaagccacgatcacccgacaagacttctcgcctgcagatccgtgggtgcgccgggacgatccgtgggcgacgacgactttgcagcggcgctatctggccagctcactcgatgaaatcgagcactggcgtgcgcggttgtggcaaacccaaggccgtctggaagccttctggctgcccgatggcttggccccgattctgtgggtgagcgtcgaagccgatcccgaggatggcttcctgcgcgtggatggcaaagacatctcggcgttctggcatcgccccgccgcctgcttgatcgtgcatccagacggctatcagcagtacgccctgacggcgacctgccatctggatcaaggcggtgtgctggtgctgcgctcgggcctcgacgactgggtgcccacgggcagccgcgtcattcgcctcgtgcgctgccgcctcgaccacgatgccatcgatctgtactggcacagcccgacgctgctggagatcactctgacagcgcgtcagttgcccgagccacgcggtaatgaccgtcaaacctacgagggagagtaa

SEQ ID NO: 356797 - DNA, 336 bp, Pseudomonas aeruginosa
atgcaactcgttcatctggcgtcccgcctctacgggacgccgctcctcattgcgcgtcccaaactcgacgtgatcctctccgtgctgggttcccgcatcggcttgccggatctggacatggcgatgccgctgcccatgccgcgccaaagcgccacaccgggtcaggctggcattgccgtcatcccggtggtcggcacgctggtcagacgttcgatgggtatcgaagccgcctctggcctgatgtcctacggcgagatcgaagcccgactggacgccgcgctggccgacccacaggtggcgggcatcctgctcgatctggattcgcccggcggctag

SEQ ID NO: 356798 - DNA, 225 bp, Pseudomonas aeruginosa
atgaaaacgcccgccaccgaacgggagcaggcgctgcgttggctgattgccaaccggcgtccagacgtctccatcgagcaggctgtgcgcgtcatgtgcatggcactgccgcgcgatctcaccaccctgaaaatcctgcggcgcgtcgctgaggaagaagaggccaagcagcctggccagccattcaactggcgcacaattcctggtctgctgcctcgcggatag

SEQ ID NO: 356799 - DNA, 264 bp, Pseudomonas aeruginosa
atgcaaaaacaccctgcacctgttcaatccgcgcggaccttctttccgccgctgccagagggtgagccactgctcgcgctcaacgagttcgaactcgccgcccgctggcgtctgtccgtccacaccttgcgtcggtggcgtcaagaccagctgggcccgatcttctgcaaggtcggctcgcgcgtcacctacctgatctccgagatcgaggccttcgagcggcgtgttgcgcgctactcgaccttcgcccgtgcgtatcagtga

SEQ ID NO: 356800 - DNA, 462 bp, Pseudomonas aeruginosa
atgaacgctcccgccatccccaaaaccctgccttctgccgaagacattgccctggcccgagagtccggccgggcgctgtcgaccgtcctcaagacccgtgctgatacccagcagatcgacttccatgacgaccagggcgcagtgcacaccgtgtcgatcccgacgtcggccctgcgcctgctgcttgatgtgctgaccgagatcggccagggcaacgccgtatccatcattccgatccatgcggagctgacgacgcaggaagccgccgacgtgctcaacgtctcccggcctttccttgtccagttgctggagaaaggtgacatcccgttccacaagatcggcacccatcgccgcgtgcgttaccaggatgtgatcgcctacaagaaccgcatcgatgcggaacgccgcaaggcgctggatgagttggcggcccaggcccaggaactcggcatggggtactga

SEQ ID NO: 356801 - DNA, 573 bp, Pseudomonas aeruginosa
atgagttcgcacttcaccgtcgtctatgacgcctgcgtgctctacccggcaccgttgcgcgatctgttgatgcatctggcgctgtcggatctgtaccgggcgcgctggagtgacacgatccacgacgagtggacgcgcaacgtgctggccagtcggcccgatctcacagccgagcagttgaaccgaacacgccagctgatgaacagccatgtccgcgacagcctggtcaccgggtttgagtacctgatcccgtcgatccaactgcccgacgcggacgaccgtcatgtggtggccgccgcgattcactcgggcgcgagcctgatcgtgaccttcaacctcaaggacttcccgcctgaggcgctcaaaccctacaacctcgtggcccaacaccccgacgacttcatcgtcgacttgctggatctgttcccggcgggtgtgttggaggccgtagctcaccatcggcgctcactcaagaacccgcccaagacagcagatgaatacctggacaccctgcaggcgcagggcctgactcaatcggtggcggtcatgcgccaatggactgtggccatgtaa

SEQ ID NO: 356802 - DNA, 2253 bp, Pseudomonas aeruginosa
atgggcaagaagaccctgaccaacgcgcactgcctgctcgaactgatcgagaaggcgcatgtgaccaacctcaagcgcttcagcggtctgcaggagtgtcaggcactggcccgaggatttgactggtcgcaagacgcggagacactccccaccgcactgatcgagcacgtccggcaccttcgcaaagagcaacgtgaccccgccgaacgcgaggcactgcgcatcctgcgcctggcttcgcccagaggtgcgcagattctcaccaccgtcgcagaccaattgcacgacaacgagctgatcgctgcctttctggccgaagacggcggcgaaatcggtcgttcggtctggatgcgcacccactccgatgacgcggcgcgactgtttgatgttgccgaatcgatcctgaacaccggcgacatccggggcaacaagcgcctttttgatgcctttgacatcccctgcgatgacgcaccaccgttcatctggaacgacgccatcaagaaggatctggagtcgcagctcaccagcaccatgcggctggccgagccctgcgaggtcatccatgtgcagatggccgaagaaaagaaaaacggcgacacccagctgacgcattacctggtggtgcgttttgcgggtgaccaggtcacggctgtgcagatgctcaaccgcagccgcaagagcttctgctacttccctgcgcgggacgcgacccttgtctacgcccctgaccgcaaggtggtggaggtctatgcgcacaccctgtcgacacgggccccactggccaatgtgctgtccaaacacggtttcaaggctccgctgtcgagccgaccgctcaatcgctcacggtatgacctgtcccgcttcgcgctgccactgaaagacacgaaacccaaactcgatggcgtgcgcgtcgagcgcctttatctcactgaagcgaaggccttgctcgggcacgcgaccgataccgtctcgctgcacatcgacagctgcgcggaactgcacgaagtcatccatgaacattggagcaaccacccgttctcgcaacccggtgccatccttggcgtgaccctggtggccgacttggtgttcgatggcgaaacggctgaaacgccgctgtccatcgtgctggccgagcccggccgatgcagtctgcaaggcgagaaagacgcacgcttgcggcaggctgggacgcagttgctcgaagccttgggcgtgctcaagcccctgcacccggggtcaggaatcgatgacccgaaactggtggtgcaggtcgcacgcctgctggagtacgccaccaacacgatggacggcttcgccctggcgcaacttggtatcgacatcgaccgcttcgaggacgagggcatcatcacggagggtgaccggatcatcgagaaggtcgtcgaactggcaaacggtgagcacaccagcgtcaaactggagcgctgtgccgatggcaatcaggtacgttaccgcgatccactgacgggggcggatgtggtgctgcccgccaagcacgcccggcgctggaaggtgcacctgaactggctgcgcgaggagatcatcacggcgctgggcactgcactgcagagtgtgcgtggcaagcaccaggacgaagagccgatttttctgggggagcttgatatcgatggccatgacattgcgctgtacttcgcggccaagatgtccagcgagcgccagtacgccaaggtcgataccgccttgcgcctgcgtccacgcagcgtccccggcatcctgctgaccacggcatcggaaccctttccgtttgccggaactaacgtggtgatacccatcgaggacgtgctgtctgctgctggtgcaacgacggccatcgacttggcgcagttgaagctggcctatcgccacgggcaactggctgccatgggcggcacctcggttgcgctgaagctctctccggatgggtatgccgccacgctatacctccctggacaagcaccgtggaaggtgacgaacaaagccaagatcatggtgctgcagcgtttggtcgatgcccatgcagcgggctcgccgcacgtgaacaccaagaagctgatggaggacacgggctgcgcttcgccatccaacctgttcaccagtaaaaactcaccgtggcgcaactacctcgttcgggtcaaaggctcgcatgcctggcaattgaatctgccgaccgttgacgcccctgtcgaggacgatgaccagccagaagccgcctccgaagtcatggaggatgcatga

SEQ ID NO: 356803 - DNA, 1218 bp, Pseudomonas aeruginosa
atgaccggcgtcgcgtacaaatggcagttcgcatcacggtttcggcggcatgccttcggctggcgttcggacacgcccatccagcgcatcaaggaggccttggccgagatcaagcaggtggcccgcaaggagccggtgctggccgccgagggtgccgttaccttgctggagaagatctcgcccgcactggagcaggtagacagctcctccggggcgctgggctccgccgtgaacaaagccatcgagaccctggtgcccctcatcgtcaaggccaacgtcgagcccaaacagcggcaacgctggctggatcggttgtggcaggcgttgcaggacgatgaaataccctacatcgaactgctgggcgaccactggggtgaactgtgtgtgacgccggacatggcctcgcgctgggccgatgagttcatccctgtcgttgaaagcgtgtggagtccgagcgcatctgggcatggctactgcaagggcaccagcgcctgtctgtccgcgctgttcgcggcaggtcgtcatgacgagttgctggccctgatcgacaaggcgcggttcaagtggtggcacgaccgacgctggggggtgaaggccttggccgcgatgggcaagaaagccgaggcgatccgttatgccgaggactcacgcggactcaacgatccgggctggcagatcgctgaggcctgcgaggccatcctgctgtcgtcaggcttggccgatgaagcctaccggcgctatgccatcgaggccaaccaaggcaccacgaacctggccacctttcgtgccatcgccaagaagtacagccacgttccaccggagctcatactgcgggatctggtcgccagcacgcccggcacagaaggcaaatggttcgctgcggccaaggatgcgggcctgtttgcgctcgccgctgaactcgccaatcaaagtcctactgatccccggaccttgacccgcgccgccagagacttcgcagtcgaccaaccgcagttcgccatccatgccgctctgtcagcgttgcgctggattgcgcgtggccacggttatgagatcaccggcgcagacatcctggacacagcccatgccttgcagcaggcgagcacgcaggcgggtgtcgatcagcagccactgtcagccttgcttgcaccgattttggctgaggcgccgccacgccatcttctgcatcaggtgctgtcgccattcgtcaaagcgtag

SEQ ID NO: 356804 - DNA, 192 bp, Pseudomonas aeruginosa
atgaagaacctcgaactcgcatctccctcggagatgagcgccagcgcccgtgctggcgaaatcgccgccatccttgcggccgccatcgtccgcaccctcgtcgcggatgagccaaaacagagagcagttggccttggcttcctgcccgaccagcgcgttcatacaaccccctatcaagaggagaagttgtga

SEQ ID NO: 356805 - DNA, 951 bp, Pseudomonas aeruginosa
atgcgcgccgcgccgtacctccagcagcgggttgtaggcggccgacttcgcatcggtggggttgaacagcaggcaatgcgagaagcgcgaacgccagccggcggtaatctgccagttctcgcccttgatgtcgtggatgacggccgatgctggccagctcaacaaggtgggcaccaccaggcccacccccttgcccgagcgtgtgggcgcgaaggtcaggacgtgttccgggccttcatgccgcaggtactggcgatcgtgctggcccaggaacacgccggcaggctgtgtgaggccagccttgcgaatgtcctgcgcgttcgcccagcgtgcagaaccgtaggtggtgacgaggcgcgcttggcgcgagcgccagaccgacatggcgatggcaacgcccacggcgaccatgccgctggcgccggcaatggcgccgccggtgtcgaaaacctccggcgcataggcaccgaagaagaaccaccactcaaacagcttccacgggtggtagatcggcgtgtcaagaagatcgaaccagggcgagccaaggcgtacttgatagccaagggaggctgctgtccattgtgtggcgccccacacgccggcgatcacgatgccgaacaccacggcgatctgaccgaacagcacgttcgtcccttgcatgacctggcctccgatttctcctgcgctgttttctcatggaaagagcggcacaagggcgtgccgcaagcgtcaggatcggtgccgggtcagtgccggtcaaagaccgttttcagcagaaaggtcgagcaaaaagacagaattagtgtgacggcgagccaaagaaaaacgccgcaagcgaaggcgcattgcggcgtgtcgaacagaaaaatgaaggcgatgcggcgaatcgccaacgatcagaacttgggcggttcctttggcggcgtgtacggcgtttcgctgtcgccatag

SEQ ID NO: 356806 - DNA, 426 bp, Pseudomonas aeruginosa
atgccggcgcggcaggaaggcttcacgctcctggaggcggtggttgcgctgacgctcctggcagtggtcggcggtgcgcttttcgcctggctcaacagtgcctttcggagcatgcagcgggtcgaggcggccgagctgcgcatcgagacggcttgggtggcgatggcctatctggagcgcatgaaccctgcgctcgaacccgcaggcagggtccggctggggcattaccggctggagtggcgaagttcgccgctgtccgcgtcgaaagcggcggtgggccgccatagcggcagtccgggcatctacgacgtgaccttgttcagggtcgtcgccagcatccgggccggcgatggaacgccgcagacgctgcaactggagcttcccggatacgtggtcatcccagcgcgactgggtgatggaccatga

SEQ ID NO: 356807 - DNA, 270 bp, Pseudomonas aeruginosa
atgtcccagaactccctgctcgacctgtacgcgcacccgacggtggtggcccgcttcagcgaaatggcagcgcttcatccccatcgcgaagccatcagggaccgtttcggaagtgtcgactatcggcaactcctggatagcgccgaacaactttcagactatcttctcgagcattatccgcagccgggagtttgtcttggagtgtacggcgaatattctcgggaaagcattacctgcctgctcgccatactgttatccggccatcactag

SEQ ID NO: 356808 - DNA, 384 bp, Pseudomonas aeruginosa
ttgcccaagaccttttcggccaggaacgaggtcttgttccaaagcgcgaacggcaccagcacgaagcccgcgagcgtggtcagcttgaactcgatcagcgtgatgaatagctggatcgccagcacgaagaagcagagcaccacgaccagccaggcgaggaacaacaccaagatggcatcgaggttcaagaacacctcgggaaatcccatcatgtcgtcgagctggaggaagatcggcccgcccgcgtcaaggccggttttcgccagccggcccggctgcaagaagttctccatcgtgatggcagagccggtggcggtgatgcccaatcccgcgaacgagcggaagacgatgctcgccagccagttgaagttgttgatgatgtag

SEQ ID NO: 356809 - DNA, 1308 bp, Pseudomonas aeruginosa
atgagttggctttattcgctggcgctggtggaggcattctcggcggccacctcctcggatggcgcacggtatgcgctgtcgagttcgagccctacgccgcaagcgttcttgtcgccagacaaaatgacggaattctcccgcccttcccgatctgggatgacgttcggacctttgacggaagaccttggcgaggacttgttgacgtggtttctggcggattcccgtgtcaggacatatcagctgccgggaatggagccggaatcgacggtgagcgatcaggcctttggcgagaaatggcacgaatcgtcggtgaggtacgaccgcgattcgtcttcgtggagaactcaccgctccttgttcgaagaggacttgccgtggtcctcggtgaccttaccgagttggggtatgacgctagatggtgtgttatgggagccgccgacgtcggggcgccccatcagcgtgatcgcatctggattgtggcaaacgccagtggcagacgatgcagcgaaccgagcagacggcaagtggaacagccgcggcgaaccgaagctgagtgctcaggtgaagctatggccgacaccaactgcatcgctcgggacgaagggtggccgtgtcactccgcaaaaaggcagagagggcgggacgctgatagaagcaatcagcaatcagcaatcgccgtggccaacgccaatctgcaacgatgcaatcaaacgaggggatttgaggaagacacctcaatacctcgcaggatcggcacaggttgcagacggcaaggttggccagttgaacccgacgtgggtcgagtggctgatgaactggcccatgggctggacgtcattggaggctattactcatgagcacttcaaacactggcaggaaagcggcgcagcgtatctacgcggcgaccgagtgcaagaactgtggttcgaccaagacccttcagagacaccacaaggatcggaatcctctgaacaatgctccagagaatatcgagatcctctgtctgacttgccacaagaacgagcatttgaaagacgggacatggggtcgtggattggttgctccagcaatgtgcgagatatgcaaagcaccatttcagccaaaaagaaatcgtcggaaaggtcgtgtgctttgcggggatccgaaatgtctgagcgagattggaaggcgcgcggcgttaaagagatggtcagcaagacagaaactggaatgaattcccgagttgaccgcattaaagcccttgggaatggtcaggttccgagagtggcttcaacagcattctcctacctcgcttctgactggatctga

SEQ ID NO: 356810 - DNA, 354 bp, Pseudomonas aeruginosa
atgaacatgctgaagcacaaggacggctgcccgctccaaggagacccagccttctacaccaacgatctgcattgcacatgccgttctgagcagaatgggcgaatcggcttcaacatctacaagcactggttcgttgcccaatgcccgaacgatggcgagcagatctactacaaactccagatcagaaccaccaagaccatcttcgtcgagcacataaaagctgcaacggccctgatcaaggctggcatccaggagcagatagccgatcagcttcatgacaagtttggcggtgaactgcatctctttggcacccatcagggcgttgagttggagagcgtgaggctggacgaatga

SEQ ID NO: 356811 - DNA, 726 bp, Pseudomonas aeruginosa
atgatcgcctaccacggcacgccagttggtggcggccggctcgacgcagcaaagttcttgcagggccgccatgcgcttgtgccattcccccgccaggacgatatagggattgttgccgaggtctgtcagtccttcgtgttcgataacggcgccttcagcatctggacgaagggtgggaagctggatgttgagggctacaccgcatgggttgagcaatggtatcggcacccaggctttgattgggcgctgatccctgacgtgattgacggagacgaagccgacaacgaccgcctgctagaacaatggccagagcaccttcccggcgtcccagtctggcacctacatgaatccatcgaacgacttgtcaggctcgccagcaactggaaaacagtcgccttcggcagttccggccagtggcgatcaccaggaacgtccgcatggtggaagcgaatggcagctgcgatggatgcgatctgcgacgaccacggaaggccgcagtgcaggctccatggtcttcgaatgctggaccctgcaatcttcacccagctccccttcgccagcgccgacagtaccaatgcagcggttaacggcggcagcatcagccggttcgggatgtatgcaccgcctaccgcaggccagcgcgccgcagtaattgcagaccgtatcgagtcacacaccagcgctccgatctggcagcgcgaaacacagattgaactagcaatctaa

SEQ ID NO: 356812 - DNA, 1407 bp, Pseudomonas aeruginosa
atgaacaaagcgaatgaatgcacctgcccttctggcgacggctccctcgtccatccgtgcccggcgcatcctgcggtagagcaggaaggcggggatgagcgcgcggcgtttgaactcttcgtgcgcaagcactgcggcatgccggagcacatcgccgtaaactgggacgccaagttcaccaatgatgcatgggaggggtggcaagcccgcgccgccctggcgcaaccctccccagtgcgctcgagtctcttgatcaacggataccagttgcgcgccgccctggacttcattgcgccggatggcactgccgagcaactggaaagcgaggcctgcatcgagtggcgccagcaggatgccgatttcctcgaagcaggcctatacgccttctgcgctgagtatcccgaagaaggcggcgtcttgttggatgaggagccaaccactgcgcaaccatccccgttgcagtccgagcaggcagaggcggagcggccggaggttgtggcgtaccggactatcgggcgacatacaaagcaccagcatccccactacgcactgaactactacaagcagaacgcggaagatcaagctgcccactggcgtgagcgcggctgcgaggtgagcgaggacgaactgatgaccgtcgcccagcatgagcgcatcgtcggggcgctgcgggcggagatcgcagaatggcaagaagccgccgggagatctcgttctgatgtcgtggcgtacatcgcggagcgcgcaaagctgctggaagagcgcgacgccgccctggccgaagtcgagcgcctgcgcgagtccaaaggcgaccctgtcggcagcctcgaaaagtgcatgaaagtgatgtacgagcgcgacgaacacgctaagcggctggaagccgccctggccagggtggcggagctggagaaagaactggcgatggcacgcgacgcagcagcaaagggtgatgctgctcgccagcaatgcggcggaatggagatggagatcgaggaacttcgcgctgaactagcggaactgcgctcaagggcggtggttgtgcctgatgccgccaacgaccggagaaagagcgcgcactattgcagaggctggaacgcctgcctcgacgaactggcgcgcatcaacggtatgacggtcagcgaggggcttgtgcaggggatggccaagttcgcgcgcgagatcatctgcggagccctcgatggcggaagcttcgatggggcagacatacaggaaagcgctgaacgccatggactgatcgccaagcaggtgatgaacgagccgtgccgcggcccagaagagtactgcgcctgcgcctggtctacctcgttcccggctgaatgctaccgggtaactccgaagcttcgcgccctactcaacgaggacaaggagaacggcaatggctga

SEQ ID NO: 356813 - DNA, 186 bp, Pseudomonas aeruginosa
atggcgacgcgaacagttcactacgacgagtgggacggcggcacagaagcggacagtgaagaaccatatgacgtcttctgtggcaccgatggcgacttcgaggagaagaacttctcccgctaccgcgaccatatcacctgcaaacgatgcctgaagttgctggacaagaagaaggaggctgcctaa

SEQ ID NO: 356814 - DNA, 288 bp, Pseudomonas aeruginosa
atgtcggcctgctggccactccagggcctgacgccggcgcagaaggctgtgctgatcagcctggcggataacgcgaacgacgagggcgtgtgctggccttcggtggcgaagatcgccgagcgcacctgcctgtccgaacgtgccgtgcagcaggccatcaaggtgctgaacgagtgcaaggcgctgagcattgaagcgcgccaggggcgctcgacgatgttcaccgtaacccccgcagcatttgcacccccgcagaaggttcaccccctgtctcttatacacatctga

SEQ ID NO: 356815 - DNA, 288 bp, Pseudomonas aeruginosa
atggctgacgcattgagaccgctggcctgggcaactatctacagccagccgggcagaaaagatatcgtcgagatcggagatgcagatccggtaagagagcgcgacgcagaaacctggggatggaggcaccggagagtccagcttgtagagatcccggcaggccatgtggtggtcagcgaggggctgttgcggcggcttgtcgatttcgcagcggcacacccgagcgggaaaggcctggcggctgaagtcggcgccctgctgagcgagcaagagggagggaaggcatga

SEQ ID NO: 356816 - DNA, 423 bp, Pseudomonas aeruginosa
atggtcgccggcgcctactgtgtgatgatgggctcgatgttcgccggtaccgaggaagcgccgggcgagatcgagctgttccagggccgttcctacaagtcctaccgcggcatgggttcgctgggcgccatgtccggctcccagggctcgtccgaccgctacttccaggacgcctccgccggcgccgagaagctggtgccggaaggcatcgagggtcgcgtgccgtacaagggtgccctgtccgccatcgtccaccagctgatgggcggcctgcgcgccgccatgggctacaccggcagcgccgacatccagcagatgcgcacgcagccgcagttcgtccggatcaccggcgcgggcatggccgagtcccatgtccacgacgtccagatcaccaaggaagcccccaactaccgggttggttga

SEQ ID NO: 356817 - DNA, 759 bp, Pseudomonas aeruginosa
atgacacagatggatctacccgtcataccccacatcgtcgaaggaaatctgattcatcagcgcgccgctgacggctacattaatgcgaccgcaatgtgtcaagcggccggtaagaagttcagccactacaacaccgtcaaggggaatatcgactttatcgaagcgctatcgaggtctctggtgcttccaccgaacatccttgttcaatccattaagggaggtaattaccagggtacctgggttcatccacaggttgctgtccatctagcccaatggctttctccagagtttgcggtgcaggttacgtcctgggtcgtggaatggatggcaggtggaatgtcgccccagacggcgagtcgggtacccgtccatctgcaaagatacatagctaaccgggctcgcattcccaacacgcacttctcaatgctcaatgaactcaccctggccctcatagccccattggaagcagagggctatgttcttcctgagcacatgatcccggacatatccagcggaagaatgttctctgattggctgcgcaaggagagagggatagacccgtccacttttcctacctatcagcaccagtacctagatgggaggatcgtagacgcgcggctctacccgaatgagcttctaggtgagtttcgagcgtatttttacagcacctggatgcccaagagatgccatgcctactttgcagagagagacacggcggcacttaaattcctacccgccctgcttgaaaaactctcgtaa

SEQ ID NO: 356818 - DNA, 1212 bp, Pseudomonas aeruginosa
atgagcatgcccagccttatcaacctgcccaacgggccgaaaatgcgcgccactttcagcgtggcggagatgaaccgtcgcctggccatgctgcgcgtccagatgcaggcgctgcagctggacacagtggtgctgacctcgatccacaacgtcaactacttcggcgactttctctactgctccttcggccggagctatgcgctggtggtgacccaggaccgctcgacgctgatcaccaccaacatcgacggcggccagggctatcgccgcagcctgggtgacaacctgatctacaccgactggcagcgcgacaactacttccgcgccgtgcgcgaggcggtgccgcagggcgcccgccgcgtcggcctggagttcgaccacgtcagcctcgatcaccgccgcaagttcgacgtcgcgctagaaggtatcgagttcctcgacgtggcgccggccaccatgcgcatgcgcatggtcaagtccgccgaggaaatcgagctgatcaagatcggcgcggcagtggccgacatcggcggcgccgcctgcgtcgaggcgatcgccgagggcgtgccggaatacgaggtggcgctggccgccaccacggcgatgacccgtgagatcgcccgccgcgtgccgcacggcgagctgcgcgacacctggacttggtttcagtccgggctcaacaccgacggcgcacacaacccggtcaccacccgccgggtgcagcgcggcgacatcctctcgctcaactgcttcccgatgattgccggctactacaccgcgctggagcgcaccctgttcttcggcgagccgagcgagcgccatctgcagctgtgggagatcaactgccaggtgcataagcgcggcctcgaactgatccgccccggcgtgcgctgctgcgacatcgccgccgagttgaacgagatctaccagcagcacgacctgctgcagtaccgcaccttcggctacggccactcgttcggcgtgctcagccactactatggccgcgaggccgggctggagttgcgcgaggacatcgagacggtgctcgagccgggcatggttgtatcgatggagccaatgatcatgctgcccgaaggccaggctggcgccgggggctatcgcgagcatgacattttagtcgtgcaagcgcatggcgccgagaacattaccggcttccctttcggcccgcagcacaacatcctcggggcctaa

SEQ ID NO: 356819 - DNA, 933 bp, Pseudomonas aeruginosa
  misc_feature (772)..(772): n is a, c, g, or t
atgcccccatcccgtgccttgccgtctctcgaaggtctgcgctacttcgaggccgctgcccgccacctgagctttacccgcgcctcccaggacctgttcctcacccaaagtgcggtgagtcagaagatccaggccctcgaacagcacctcggctacccgctgttccatcgcctgccgcgcggcctgcgcctgaccagccatggcgagcgcctctacgccggggtggcggaggccttgagtctgattggcgcgaccctgcaccagattggggacgaggcgctggcaggcaccctgaaagtgcgcgtaatgccctcattcgccaccaagtggctgttgccgcgcctggccgcgttcaatcgggctttcccggacatccagctgcaggtggatgccaacctggccccgcccaacttcaagggcgacgaggtcgacctggcggtaacctcgatctggaccgacgatgcccgtctggcccagcgccacctgttcgaggacctgatctacccggtggccagcccggcgctgctggcgcgctgcccgctgcacgactacgccgatctggccggcaccaccctgttgcacgactcgatgccgcatgcggcctacagcaccaactgggatgccttcctgtcgcgccagggtcgctacgacgtcgatacccgtggcggctgcggctattcacgtgccgatctggtgctgcaggcagcctgcagcgggcagggcgtggcgctggtgcgccattcgctgtgcgccgacgacctgcgtcagggcntcctctgccgccctttcgccgatgtgctgcacgatggccaggtctggctggtctgcccacaggactacgtggagcgcccccgggtgcaggcctttgccgagtggcttcaggccgaggttggccagcacctgcaggatcgccaggcgctgctgggcgcctga

SEQ ID NO: 356820 - DNA, 852 bp, Pseudomonas aeruginosa
atgaaagcgtttcgctccctgtttgctcccctgctgctcggtgccctactgccactgcacgccgccactgcccatgccgacctgctcgccgacatcaggcagcgtggtgagatcgtgatcgccaccgaggcgcgctatgcgccttttgaaatgctggagaacggcaagatcgtcggctacggcaaggacatcctcgacgagatcatgaaggagctgccgggggtcacgctcaaacagctcgacgtgccgttccaaggcatcctgccagggctgtccagccagcgcttcgacttcgtcgccacctcgctgaccattacccaggcacgcacggagagcttcgccttcaccgtgccgttcgccaccgccagcgtggcggtgctcaagcgcaagggtgatgagcgcatcgccagcgccggcgatctggtcggcaaggtggtcggcagccagtccggcgcgccgcagatcgaggtgctcaaggcctacgagaacgaggtgctcaagccgcagcacggcgccggggtgaaggagatcaaggcgttcatggactacaacgaggcctacgccgccctcgcctcgcgccgcgtcgatgccgtggtgcagtcgctacccaacctggcgccgctggtcaaggagcgtgccgacgtgttcgagatcgtccagccgcccttcggtccggccacctactacgcctgggccgggcgcaaggatgccgacagcgcttcgctggtgcagttcttcagtgacggcatcgcccgcctgaaccagagcggcaagctggccgagctgcagcgcaagtggttcggcttcgagatgccggtgccagccgaccaggtgcccaccccggccaactga

SEQ ID NO: 356821 - DNA, 651 bp, Pseudomonas aeruginosa
atgttcgacttcactgccgtcattccccacctgccgcagctgctggtcggtctggccagcaccctgctggtctcgctcagtgccatcgccctggggctggtgctcggctgggcgatctgcctgggcctgaccggccaccgagcctggctgcgtcgcgtctgtgcgatctatgtcagctttttccgcggcacgccgctgctggtgcagctgatcctggtgttctacgccctgccggcggtaggtatcagcctgccgccgttggccgccgcggtgctggcgctgaccctcaacagcgccgccttccaaggcgagatcctgcgctcgggattccagatgctgcccaaggggcaactcgaagcggcgcgcgacctcggcctatcgccgctgcagaccttgctgcatgtgcagatccctcaggtactgcgcagcatgctgccggcgctgaccaacgagaccatcgacatcatcaagaactccgcgctggtctccgcggtggccgtgcacgaactgatgcgcactgcgcagaccctcgcctccaccacctaccgcccgatcgagttcttcgccgtggccgggctgctctacctgctggtgaccctgtgcaccggacgcctgggcagctggctcgaatcccgactgcgcaccgcctga

SEQ ID NO: 356822 - DNA, 660 bp, Pseudomonas aeruginosa
atgatcgacttcaacctgcttgccgaacaccgcgaggcaatcctcgccggtgtctggatgaccgtgaagatgagtgccggcggcatttccctcggcctgctgctgggcctggcgctgcacggtctgcgccagctcggcggaatctggctggtgccgctgtaccacgcctacgtcgctctatttcgcggcacgccgctgctggtgcagctgttcctggtcttttacggcgggccgtacatcggcctggagtggagtgccgaacgggtcggcctggtcggcctggcgctgtacggcgccgcctacttcgctgagatcatccgcgccgggcgcgaggccatcccgcgcggccagatcgagtccgcgcgcgacctcggcctgagcccggggcagatgttccgcgtggtgctctggccgcagatgctggcgcgctgcctggcgccgctggtgggccagacggtgatcctggtcaaggagtcctcagtgctgtcgatcatcaccgtggccgaactgaccaacgtggcgatgaccatcgccacccagagctattccatgctcgaaccctatgcagtgctggccctggcctactgggccatcgccattgtcgtggccgccatcggggcgcgcctggaacgccacttcacccagtatcagtgccgctga

SEQ ID NO: 356823 - DNA, 798 bp, Pseudomonas aeruginosa
atgtcccaaccctacgccatcgagatccgcgacttgcacaagcactacggcgcgcaccatgtcctcaagggcatcgaccttgatatccgccccggcgaggtggtcagcatcatcggaggttccggctcgggcaagtccaccctgctgcgctgcatcaacttcctcgaggagtacaccggcggagaagtactggtgaacggtcggatgatcggctacggcagctcggtcaccggcgaaccctaccgcctgcccgaacagacgatccgcgagtcgctcaccgacgtctgcatggtgttccagcagttcaacctgtggccgcacatgagggtgctggacaacgtcgccgcgccgctgcgcctggtcaagggcgtgcgcaaggccgaagcctatgagcgcgcccaagcacagctggagcgcgtcggcatgggccacaaagccgccagctaccccggccagctgtccggcggccagcagcagcgggtggccatcgcccgtgcgctgaccatgcagccgagcatcatgctgttcgacgaacccacctcggcgctcgacccggaactggttggcgaggtactcaacgtcatccgcgacctcgccgatgccggcatgaccctggcgatcgtcacccacgagatgggcttcgccgccagggtctcggacaaggtggtcttcctcgccgagggccgcatcgaggaacagggcgctccccaggacctgttcaatacgccgcagagcgcgcgcctgcagcagttcctaacctcctggaacgaacgacagaacagcctggccatggcctga

SEQ ID NO: 356824 - DNA, 960 bp, Pseudomonas aeruginosa
atgaaacaaggtgttttctacggcagcctggccggcgccgcctgggggctggtgttcctctccccggcgctgctcgccgacttctcgccgctgctgctcagctgcgggcgcttcctcatgtacggcgtcatcgccctgctgatcggcctgccgctggcgcgcggtctgctgcgcaagctcagcctggcggacttgctggcgctcacccgcctgtcgctgaccggcaatattgtctacttcgtcctgctggccgccgctgtgcagcgggtcggcatcgcggcgacctcgctggtgatcggtgtgctcccgctgaccatcaccctactcgggcgcaacgaggccgatgcccctgccctgcgccggctgctctggccgctgctggcggtgctggtcggcatcgtctgcatcaacctggaggcgctgctgggtggcagcgggcagagccagccgctggacgagcgggtgcagggcatggtctacgcggtgctggcactggcctgctggagctggttcgccaccgacaatgcgcgctgtctgaagcgccagacccacttcaacagcaatgagtggtcgctgctgacgggcatgatcacgggcctgctggccggctgcatctggctggcagccgagctgctcggccttaccgcggtgcagatcgagctgcctgccgagcgctggcagagtttctggctggtcaacctggtcctcgccgtggtggcctcatggctgggctacaccttctggaacgccagcacccgccgcctaccgctgaccctgtcagggcagatggtcgtcttcgagaccttattcgccctggtctacggctttgtttacctacaacgcctgcctactctgctggaaggcttcgccatactcctgctgctgggcggtgtttgcgccgccgtggcgcggcatggtaagccggccgttacggcaccggtgaacgtcactttagggtag

SEQ ID NO: 356825 - DNA, 1746 bp, Pseudomonas aeruginosa
atgctctatcagaagaactatttctccgccctcaccgacaacctgagcacccgcagcgagcgtgccgcccagggcctgctcagcctcggcaatccgcagctgcgccagtttctgcatgaccagctaaccgccgcccctggcactccgggcgcctggctggccgatccggtcttcgagccgaccttcggctggcaggaaagtgctgaaaccatgggttcactggccggcggcaacctgctgcactggcgccttgccgatacgatggcacacccgcccaaaaaggaagacggagaaggccttatagatccttttccaaaagaccgtagattgtttacgcatcagttagcagcgtgggagatcctcaaccgtgcggagccgcaatcgcttgtggtgaccagcggcaccggctcaggcaagaccgaatgcttcctggtgccggtcctcaaccagttggccaaggccatcgacgcgggcgaagacccggaaggcgttcgcgccctgttcatctacccgctgaacgcgctgatcaactcgcaacagaaccgcctggatgcctggacccacggattcggcggacagattcgccattgtctatacaccggtgccctggagaacgaacgcaggaatagagaccagcagtacgatggccaggtgatcgaccgcaagagcctgcgcgccagcccgccgcaactgctggtgaccaacgcgaccatgctggagtacatgctcatccgtaaggatgatgagccgatcctgcagaagtcggccggcaagctgcgctggatcattcttgacgaggcgcacacccacatcggctcccaggccgcggagatagcgctgctgctgcgccgggtaatgctggccttccaggtcaagccgcaggatgtgcgcttcgtggcaacctcggccaccttcggctcggatacccagaccatagagagcctgcgcaccttcctcgccgatatcggcggagtggatccgcagcaggtgcatgtcgtgcagggtcatcgggatatcccggcgctgctgaacgccaccccggatgccgagcaggacacccctgaagccatcggcgccatcgaggcggaccaggagcagtcgacgctgcgctaccagcgtctggaagccagccccaccgctcggcggctgcgcgccctgttcatgcctgatggccaggtgaaaccacaaagcctgcaagggctgatccgtgagtccggtctaccctcggcgcaggtgctcgcctggctggatctgctgtccggcaccaagagtgccgaggggctgtccttcctgccgctgcgcgcgcacttgttccataacgtgattccagcgatccgtacctgcgtggaccgcaactgcagccacaaaaccggtaccgcgctggcacacgccgactggccgttcggcatggtctatctggaggagcggactcactgtcgctgcggcgcaccgctgatgccgctggtgtcctgcgaggagtgcaacgagagcttcctgcaggcggcgacgaccagccacgggatgctgatcgaccagtcgcagcaacagctcgacgagttcgccctcgatgaagagcctacagatactgacgagccagccgaagacagcgcgctactcagtcagactctgattaccaaccgcccggtcaaccacagctatccggagtttctcgatagagccagccagcgcctgatgttcgatggccccaagaatggctacatcgagctgcaggttttccgcagctaa

SEQ ID NO: 356826 - DNA, 732 bp, Pseudomonas aeruginosa
atgtcaaaagccgtcgcgccacgttggcacggtgataactatcagtcccggttcttttggatccatgccgcgtcgctgctggatccggagaggttggaagtcgttgaggtcacgttcgaagccgatggcccaaaagcattcgatgacgtggtcgttcgctacgatccaggtcgtccgcgcgcgtccggcccaggccgcattactgtcgattatcatcaaataaaatggcacgttgacagcagtgggcgatttgggtttaaggacctgaccagccccgcgttcatcggtgcgacgtcggtttccatccttgagcgcctaaaaatagcgaaggagggagctgaagaaggagcagcctttcatctcatcacgacggaccgagtcacggacggagaccagctcggagagctgatctcgcaggtcgatggttctcttcgtctccagaagctgaaggagggtaagaccgacaacagcaggatgggtaaggtccgccagtgttggcgcgagcatctcgagctgtcgtcggatgaggagctctatgcacttcttgacggcctgcacatcacggaaggacattcgactctcgagcagctacgacacgatgtaagtgtgaagttccggctcgtaggactcgtcggcgctgagagcgagacagcattcatctacgacgaagcggctaggcagctgcttatcaaggatataaaccggtttgatcgggcaagtttccagcaatga

SEQ ID NO: 356827 - DNA, 540 bp, Pseudomonas aeruginosa
atgcgactcttcctagaaacacactcgtccgtagccttcctcgccggatccgcgctccgcttcaaggacggtgcggatgtggagattgtgcagaggggtgatagaaatcccggcatagtatggaactcgaacgacggctgcgatggactgcctccggtgatcacaagcgaaactgtcgggatcgggaaagatatcgcactggcggtgggtcttacgcgtgacccaaccaagatggtgatggactacgtcgctaagtgtttacccgaagtcggcgcaatagtgcacgtcgcacctgctgatggcttcagccaaagggcaatcgctggtgggcagcatgcggcgagtgtggcagcagcgatctcagaagccgttcgggcgatcaggcaacctggcgcaacggtccacatcttcttggttgcgcccaacgccttctcgttcatgctcggccagcaggcagaggcgatgggaaagtgcatcccgtacgaattcgatttcagcggccagatcgatggcagctatcaggctacttttaatatctga

SEQ ID NO: 356828 - DNA, 1134 bp, Pseudomonas aeruginosa
atggagcttcgtccccaattcacggaatttctgcaaaacatccggccgagtgagcggaacaaggaggagtggaagcggggttcgaatactttgcgtgcccgcctcatggctgatcccgacctgtctccactgatcacaacctcttttttgcagggcagtgtccgacgctcaacggccatccggccaacgggcggcaagcgttcggacgtcgacgtggtgatagtcaccaatatcgaccacaacgtcgagaagccagcggcggcaatgaaacggttcgagccgttcctcaatcagcattaccaagggaaatggactcagcaggaccgatcgtttggaatagaaatgtcttatgtcgatctggatctggtcgttacagcactaccgacagagccaagcgcgagggaggctctccagaacctctatagtagccagtcagtccagaccgaccagtcaattgaggagcgcaatgactgggtactgaacaagagctgggatcccagtcagttgaacggcggcttggttatgctgacggaggactcctccaactggcgtgacgctcccctcatgctgccagaccgaccaatccaagactgggggccaacccacccgctggctcagattcagtgggcggccgacaagaatcggcgctgcaatggacatttcgtcaatgtggtcaggtcaatcaagtggtggcgtcacgagcatgccgccgttcttccgaagtatccgaaaggctatccgctcgagcacatgattgggcatgtgctgccggatggaatcaactgcgtggccgaaggcgtggtcaaggcgctcgaaggtatccgggatacatgggctgcttacgctcaagccggcttagtaccgacgttgcccgaccatggcgtgcccagccacgatgtgttgggtcggctgaacgcagacgacttcggcgccttccatgcggaggcgacgaaggctgccaacctcgcacgccgtgcctatgacgaggccgacaaggatgcgagcggcttactttggcaaaaacttttcggcaagtgcttccctctgccgggccctggtggtggcgaccgcggacgtggcttctctgctccgactgccgcagccacgcctcgacagtcagagcgttttgcctaa

SEQ ID NO: 356829 - DNA, 1788 bp, Pseudomonas aeruginosa
atgcctgtcccgccttctctggcagcggccctcgaggcactgccggacgacccgcgcttcgaactcactgacagctgggcggtgagaaaaggcggtatctggtcgttccgcttccgtacgcagcttagcgtgcccgaaactgagcatatgcccaagtggaccgcttggcatttagtcatctctggagagcttaccgatccgaacatcaggatatatccggacgtcgaggcgggtatcgtcgcgacttttccgcatcaggactataacggtggtccagttgaggggcggccgtggcgttcaggaaagccgtgcctcgagaggccggcagcggtgttcctccgtgacggatgggcagatgagccatgcaatttagtagatcggcttgtgtggcgtatcggacgccttctcgcctggattgacgcagcagcgatggggactctcctagagatgggggatgcgctcgagctcccaatatttccggcggttgatacgacgtcggtgcttggatttcttgagacagctgacgacctgaactggcgagttgatcgtggcgagacttggggactcgccacgatctcgcccattcctggcgcgcgcggcacggctgtgatttcagattttatggatcctcagcggcgcagtatccggcgcattcaatggagcgaggcgattccagttgatcagaaccgcgttgatgcggtctggattgtgctgccagcactggtcgtcttcgaaccatggactaccgcaacaacgtgggccgagctcacccaactttgcgctaacgtagccattgacctaccgcggatcctcgctgatgccggggctaggctccggcgaattcagcgacccaagcattcccgcccagtacacctgttaatcggcttcccattggaggagcggatcggagagccgccgcagcgctttcattggatcgcggtgcgtaacatgcgcctgtgcaccagggatgacgtcagggccggctactctgcgagcgctgaggcgcggcgccagcgggacatcgaactcgcaacttcaagtcggcccctcgaatggcggcgaacggcgaactgggcgcccgaccaactgcgaaaacgtggcgaggctgaggacgaggtccgatcaaaatcggtccttataatcggagtcggaacgctgggggctgcagtcgcggaaaatttactccggatgggcgtgaccaaaatggcactgctcgacgatgacaggatgctagtcgggaatctcagccgacatcttcttacaatgtcggatacagggcatttcaaagcggaatgcatggcgaagcgtctaaacatggcgaccccagactccgccgttattgcgatgccattcgcctttccgccacctaatacagaggactgccaatgcctgcgagattgggatgtcgtgatcgactgtactgcttctgatgtcgtacttaaggcaatggcatccttcccttggctcaccgaacgactcttcgtgagtctggccatgacgtgggaggcgaaggggatgtttgcctatgccgcgtctgaggcgagcttcccagctatagatgccatcgaacggttcgcggctgtggcgccgttaccggacgttgatcgtataggcgagatggaaggcatcggctgctggcatcccgtctttcccgcaacggcggatgacgtaaatctatggggcgcagtcggctcgaagtttgttcgcagatcgatcatcactaggcagacgacagctgcgctttatctgcaacaggaggatggcagcgttgagcgtcaagacgcctga

SEQ ID NO: 356830 - DNA, 804 bp, Pseudomonas aeruginosa
atgaacgggccgaccatttggctgatggtgtcgctacttgccaatattggcatggcggttgcactatggcgttttgttcgtaccaatcgccagaggcgtgacgagctgaagcatcgccaacaagcgcaaatcgatgacaagaaacggatcgccatcgccctggagggcgcagggctgggattctgggagtgggatatcgctaccgacagcttcaggctttctgcccgcagtctggcgatgttcggcttgacctccgacgaggaggttggcgccacccatgccgcatggcaagcgcgtattcacccggaggatttgccggtcgttctggcaaaggtgcgcgcttaccaagaaaacccgtcggagcgattggagtgcgagtaccgcgttcgtcatcgatctggcgtttggatttgggtgctggatcgcggccgttggctgggtgacgcgggcaggcaactgatagtcggcactctgctcgacatctcttctcgcaaggaaatggagcagcagttgctgcgtatggcgatcaccgaccccttgaccggcttgtcgaaccggcgggcttttaacgaacgattacagctggaatgggagcgcctcaaacgcagccccgagatacaagcagcacttgtgctctgcgacatcgatcacttcaagcgtatcaatgacacctatggacacggatgcagcgatgaggtgctcaagcactttgcttcacggttgagggaacatgttcgcgcaaccgacatggctgcccggattggggggaggaattcgctgtgttgttggaagcggcatcgatag

SEQ ID NO: 356831 - DNA, 1407 bp, Pseudomonas aeruginosa
atgcaggacttgctcggtacgacgctgattctgctggtcgcctgcagtctggcggctgcgttgacggccaggctgaatatcccgaccttgctgggttatctgctggtcggtgtcttgctgggccctccggtcacggcctggatcatgccgggaccggcgctgaatttcctgtccgagctgggggtggcgctgctgctgttcatggtcgggctggagttctcgctcggccatttctggctcacccgcaagaccgtgctggtggccgggacactgcagctggcgatggtcgccgcaccggtggcgttggctttgctgtggctggggctgccgctcgacagcgccgcactgctgggcgcggcggcggccatgtcgtcgacagcgctggtcagccggcagctggccgatcagggcgagttgaccacacgccacggccgcggcgccattgccgtgctggtgttccaggatctggccagtgtgcccttgctggcgctgctggcgatctgggcgcgcggcgatgctcccgggcttggccgtgtgcttggggaggtggcgggcgtgctgttgctgtttgccgtctcggcggttgcgtcgcgccgcctgttgcatggtttgctgggctgggtggcgcggcaggggcacgaagagtccttcgtgctggtctcgctgagtctggtggtggcggctgcggcagcggcccatgcactgggtgtgtcggctgcgctcggtgcctttcttgccggcatggtgctgggggagagcgatttccggtaccacatggaaaaccacctcaagccctttcgtgatgtgctgtcgggcctgttcttcgtgaccattggcctgcagctggacaccgcgcagatcgtggccgcaccgctggcggtactgggttggctgttggccttggtgcctctcaagatggggctgaactttctggcgctgcgcgcaacccgcctgtcggcgctcgacgcctggcgcgcaggcatcgtgctgggtcatggcggcgagtttgcgctgctgctcctgggcatggtcatgcagcagcacctgatcgccgccaccatggtgcaaccgatgctggtggcgctggtgttgagcatggggttggcaccgctcctgatccgacaccatgaccgatgggcgcgggctttcagctgctcgggcgcactcggtcagccaccgcaggccgaagaaggcgaagtcgccgagcgggcgcggtcgttgcgcgaccatgtgatcatctgtggggcggatgacgtcgggctgctgctgagccgaacgctgcgcctggcaggcataccgcatttgctgctggaatcggaccgccaacgggtcgaagcggggcgtgcgatgggggcgccggtgtcgtatggcgatgccagtcggctcgacaccctggccgccgcctga

SEQ ID NO: 356832 - DNA, 285 bp, Pseudomonas aeruginosa
gtggagcgcagcgacattcctctgctggtcgatttctgggccccctggtgcggcccctgcaagatgatggcgccgcagttccagcaggacgcgcacctgctggaacccaaggtacggctggccaaggtcgacaccgaggcagagcctcaattggccacccgcttcggcatccgcagcattccgaccctggcgctgttccggggcgggcgggagatcgcgcgtcaggccggcgccatgggggcaaaggacatcgtgcgctgggcatcctcggctgtggtgagttga

SEQ ID NO: 356833 - DNA, 1881 bp, Pseudomonas aeruginosa
atggaaaagaagaatcaatggaacaccggctactggatcgtcgccgtattgctgctgctgacgctgcagaactactggcaaacggcaaagaccgtcgagcccgtgccctacagcgagttcgagaaggcgctggccgagggtcgagtggcggaagtgctggtgtcggatcgcagcgtgaccgggcgtctgaagtcgccggacagccggggcaagacgacgatcgtggcgacccgggtcgaacccgatcttgccgatcgcctgtcgaagtacgacgtgccctatgcccgcgtggtggagagcacctggctgcgcgatgtgttgtcgtggatcctgccggcggtggctttcttcggcgtctggttcttcctgttccgccgcttcgccgagaagcagggcatgggcgggttcctcagcatcggcaagagccgcgccaaggtgttcatggagaaaaacaccggtgtgacctttgccgatgtggccggcgtcgatgaggccaaggcggagctggtcgaaatcgtcgatttcctgaagaacccgcaggactatggtcgtcttggggcgcgcattccgaagggcgtgctgctggtcggtccgcccggcaccggcaagaccttgttggccaaggctgtggcgggtgaagcgggcgtaccgtttttctccatttcgggttcggaatttgtcgagatgttcgtcggggtgggcgcggcgcgcgtgcgcgacctgttcgagcaggcacgcggccaggcgccggcgatcatcttcatcgacgaactggatgcgctgggccgggcgcggggtgtcggaggccccatcggcagccatgacgagcgcgagcagacgctcaaccagttgctgaccgagttggacggcttcgatgcctccgtggggctcatcattctggccgcgaccaaccgccctgaaatcctcgatcaggcgctcttgcgcgccggccgcttcgatcgccaggtgctggtggaccgacccgacaagaagggccggctcgacatcctgaaggtgcatgtcaagaaagtcacgctggcacccgaggtcgacctcgaacaggtggccgcgctgaccaccggcttctcgggcgcggatctggccaatctggtcaacgaggcggcgctggccgcaacccgccgccgcgcgcaggccgtggagctgcaggacttcactgccgccatcgagcgcatcgtggccggcctggaaaagaaaaaccgcgtgctcaaccccaaagagcgcgagaccgtggcctatcacgagatgggccatgcgctggtggcgctggcgctgccgggcactgacccggtgcacaagatttccatcatcccgcgtggcatcggcgccttgggttacaccctgcagcgtccgaccgaagatcgtttcctgatgacgcgcagggatctggaacacaagatcgccgtgcttctgggcggacgcgcggccgagaagctggtgtttggcgaactctccacgggggcggccgacgacctgtcgcgggccaccgacatcgcccgcgacatgatcactcgcttcggcatggacgaaggcttgggttacatcgccttcgaagcgcagcgaccgcgcttcctcgacacgcccgagttggccagcggtggctgccgggtggccgaatcgacccaggcgcgcatcgatcaggccatccgcgacatcgtgatgggcgtgttcgagtgcgcctacgggattctctatgccaatcgtgcggtgctggagcgctgtgctcgcgagctcctggcgcgggaaacgctggatgaagccgatatccgtcgcctgaccgaggggctccagcgcgccacctcggctacggcggccgagccggccccacccgcatctacaacccatcccggagtctcgacatga

SEQ ID NO: 356834 - DNA, 1449 bp, Pseudomonas aeruginosa
atgttgggagaggctgccgtgtccgatcccatcggcctggcatgggcagcctccctggcctcgatcgcggtggcggtcgtggccgcgggtcacgcggtcgtctacaagcgtgatccgcggtcggccacgctctgggtgctgctgatcgggatgctgccgctgctcggatcgctgttgtacctgctgttcggcatcaaccgctaccagcgacgggcacgacggctttacccgagcgccagccatccaacccgggcgaccggcccggcgcagggagacgacgcgcagccggcggcgcttgccggtctggctgcattggtcggccgcaccactggccagccgctgacgcgtggcaaccgtatcgatccgttggtgggtggcgaacaggcctacccgaccatgctcgccgccatcgagtcggcccgacacagcatcgtgctggcctcctacatctttgacggcgtgggtatcggcgagcagttcgtcgatgccctgaaccgggcgcgtgcgcgtggcgtacaggtacgggtgttgatcgacgatgtctacgcccgatgggcgcgtcacagcgcctacaagcgattgcagcgttgcggcgtgacggttgccgctttcaacccgacgctgatccctgcccgtctgcatgcagtgcacctgcgcaaccaccgcaagctgctggtgatcgacggcgcgttgggcttcaccggcggcatgaacatcgcctgtccctattggcagcccgatgcacccgcgcaggcttttcgtgatctgcattttcggctgcgagggccggtagtggtgcagctcatgcactgtttcaccaaggattggtgcgacaccacgggcgagcagctcgatgagcgtttctgggccaatgagcccatgtcagtcgaggaggctggaggcagtctggcgcgaggcatcgaggccggtcccgatgaaaccctggaccgcatgcggtggatcttcacgggcgcgctgagcgcggcgcgacattcggtgcgcatctggacgccttacttcgtgcccgatcagccaatcatcgccgccttgaacacagccgctttgcggggggtacgcatcgaggtgctgacgcctgccaatggtgatcacccgggcgtgcagtgggccgcgcgcgcccattactggcaggtgatggaacatggtgcccgcatttttgagcgacccgggcctttcgatcacaccaaattgatgctggtcgatggtctctggtgctgcctggggtcagccaactgggacgcgcgcagcctacggctcaacttcgagttcaacgttgaagtctatgacactgcactgtgcacgcagctggaggcgctgttcgacggggtccgcaatgcatcggtaccggtgttgcccaggatgctgcgggagcgcccgctggcggtgcgattgcgcgatggcttggcacgcctgttcacacccattctctaa

SEQ ID NO: 356835 - DNA, 2850 bp, Pseudomonas aeruginosa
atggccagaaaacaatgccaggtctgcggccaacccgccaccgtgcgggtggaagccaatctcaacgggcgtcacagcaccatgctgttgtgtgacgaccattaccgccaactggtgcgccagcaaaagcgcaccgtctcgccgctggaagccttgttcggctcgcgcagcggcctgttcgaggacttcctcggcagtgatttcttccgcatcggcgacgacgcgacgcccgttgccgccgataccgatgacgtggtcgatgcctcgttcggcgagcccgccgccgcaggttcgggtgcgccgcgccgtcgcggcagtggtttggccagccgcatcagcgaacagtcggaagccctgctgcaggaggccgccaaacacgctgccgaatttggccgctccgaggtggataccgaacatctgctgctggcgctggccgacagcgacgtggtcaagaccatcctgggtcagttcaagatcaaggtcgatgacctcaagcggcagatcgagtccgaggccaagcgcggagacaagccattcgagggcgagatcggcgtgtcgccccgcgtgaaggatgcgctcagccgcgccttcgtggcctccaatgaactcggccattcctatgtcggtccggagcacttcctggtcggtctggccgaggaaggcgaaggtctggccgccaacctgctgcgccgctacggcctgacgccgcaggcgctgcgccaacaggtcagcaaggtggtcggcaagggcgccgaggatggtcgcgccgagacgccgaccaacacgccggaactcgacaagtactcgcgtgacctgaccaagatggcgcgcgacggcaagctcgacccggtgatcggccgcgcgcaggagatcgagaccaccatcgaggtgctggcccggcgcaagaagaacaacccggtgctgatcggcgagccgggcgtgggcaagaccgccatcgtcgaggggctggcgcagcgcatggtggcgggcgaagtgcccgagacgttgcgcgacaagcgcctggtggaactcaacatcaacgcaatggtggctggcgccaagtaccggggcgagttcgaggagcgcgtgcagaaggtgctgaaggaaatctccgagcaccagggcgagctgatcctgttcatcgacgaggtacacaccatcgttggcgccggccagggcggtggcgaaggcgggctggacgtggccaacgtgttcaaaccgatgatggcgcgcggcgaactgaacctgatcggcgccaccacgctcaacgagtaccagaaattcatcgagaaggatgccgcgctggagcgtcgcttccagccggtgacggtgcccgagccgacagtggcacaggccatcatgattctgcgcggcctgcgcgacaccttcgaggcgcaccacaaggtcagcatctctgaggacgcgatcatcgcggcggctgagttgtccgaccgctacatcaccgcccgcttcctgcccgacaaggccatcgacctgctcgaccaggcggccgcgcgcgtgaagctgtcggccacggcccggccggtggccgtgcaggagctggagtccgaactgcaccagctgcggcgtgaacaggattacgtggccgcgcgcaagcagtacgacaaggccgcagagctcggcaagcgcatcgaagccaaggaggccgagctcaagaaactgatcgaggactgggagcgggagcgggcctccggcagtgccgaagtcaaggcggaacatgtggcccagatcgtttcgcgcctgaccggtatcccggtcaacgagttgacggtggaagagcgcgaaaagctgctgcacttggagcaacggctgcacgagcgtctggtgggacaagacgaggcggtccgtgccgtggccgatgccgtgcggctgtctcgcgccggtctgcgcgaaggcagcaaaccggtggctaccttcctgttcctgggcccgaccggggtgggcaagaccgagctcgccaaggcattggccgaatcgatctacggcgatgagcacgccctgttgcgcatcgacatgtcggaatatggtgaacgccacaccgtggcgcggctggtgggcgcgcctccgggctatgtcggttacgacgaaggcggtcagctcaccgagaaggtgcggcgcaagccctacagcgtgctgctgctcgacgagatcgagaaggcacaccccgacgtctacaacatcctgctgcaggtgttcgatgacggccgcctcaccgacggcaagggccgggtggtagatttcaccaacaccatcatcatcgccacgtccaacctgggttcggacatcatccagcggcggctgaaggcgcgcggggcggccggcgaggagtacgaaaagaccaaggccgaggtgatggacgtgctgcgcagccacttccgtcccgagttcatcaaccgcatcgacgagatcatcgtcttccatgcgctgggcaaggaggagattcgccacatcgtcggcctgcagctcgatcgcgtggcacgcagcgccgccagccagggcgtgacgctcaccttcgatcagacgctgatcgatcatttcgcggaagaaggctacaagcccgagttcggtgcgcgtgaactcaagcgcctgatccgcagcgagctggaaaccgcgctggcacgcgagatgctcggcggcggaatcggcaagggcgatcacgccagcgcacgctgggacgacaaggccgaacgcgtggtgttcgaacgccatgagtcaccgcagactccggccgagccagagcagccggatgccgcgaaggcggccgaggcgccgcatggcgacgcgggtaagggctcgcgcaagaagaagtcggcgagcgacgcgtcttaa

SEQ ID NO: 356836 - DNA, 264 bp, Pseudomonas aeruginosa
atgccccctcagcgccgtacctacagcaaatctttcaaggcccaggtcattcaggagtgttctgaacccggtgcctccatcgcaaacatcgccttgggctacagcctcaatgccaacctcgtccacaaatggattcggctgcatacccagaaaaccacggctatccagccagcgttcatcccgttgccttctcaaatgctcggcgcgggatcgcatgctcaagtgcgctgctgcgatcatgagtttgatccagtcggcccgtaa

SEQ ID NO: 356837 - DNA, 699 bp, Pseudomonas aeruginosa
atgaggcgcgatgcggggctcgatctggtcaagtggttggccatgctcagcatgctgatcgaccacctgcgctatttgtggcctgacgcttacggcctgttcatcataggtcgtctcgcttttccgttgttctgtctgagcatcgcagccaacgtcaccagaacccgccccggcgaactattcagcgaaggaaatgcgcgctacctcggctggttgctggtgttctccctgatttcggaattgccgtaccgtgaactctcaccggaaagtgcgacgctcaacgtgatgccgactttgttacttggtctgctggtcgcttggggcgtccatcacgcggaccggaacagcctgctactggctactggagcgctggtccttgcgatacttttccatcatcaactgatgtacggcttagtcggtgtgattttgcctgctgcctttatgcttgggctgcgaggcatgcgttggtggtggctgcctgccgtactagccattctggccaacagtcgtaatcgctggttggaaggctggggggtcacaccggagacggtggcgatgttcgttatggctggtgccgctgcgccatttggccttgccctgttgcggcaatccagctctctccgtccttggcctgttggacgatggggatactggttctatccaggtcacctggcagccatatacctggtgagcccctga

SEQ ID NO: 356838 - DNA, 441 bp, Pseudomonas aeruginosa
atgtgggacttctcagcctacctggggttgttcgtcgcagcctttggggccgccactctgctgccaatgcagtccgaagcggtgttgaccagcttgctgctggcaggcaagcaatctccggccttgttgctggtagtggctacggttggcaacgtacttggctcgatcatcaactggctactggggcgctacatcgagcacttccgccataaacgctggttcccggtagcggatgacaagttgctacgtgctcagcgggcctaccaccgctatgggcgctggtcactgctgctaagctgggcgccgatcattggcgacccgttgaccgttattgccggcatgctgcgtgagccgttctggagctttctgctgatcgtactggtggccaaggcggggcgttacctggcgctggcggcgttggcgttcggggtgttgggatga

SEQ ID NO: 356839 - DNA, 1119 bp, Pseudomonas aeruginosa
atgtcgtcctttgccgaactcttgcaacagggggccagccaggcttggctgtatgttcccaccgccatcctgctaggtgccctgcacggcctggaacctgggcactcgaaaaccatgatggcggcgttcatcgtggcgatccgtggctctgtccgtcaggccatcctattgggtctggctgcgacggcctcgcatacagcggtggtctggctggttgccatcggcggtatgtatctgggtcaaaacctcgacgcccagacgaccgagccatacttccagctagcctcggcggttctgatcatcggcatcgccctgtggatgctctggcgcacctggcgtggagagcagatgtggcgcttcgaacaggaaggtgatcatcctcactcgcatgaccatgcgcacgacgaaacgcgacgtatcgacaccggtcacgggcgcatcgagctgtcaattttcgaggaaggtgtcgctccgcgttggcgattacgtacgatcagcggtcagccctggaaggccacagatgcctggctacagacgacccgcgccaacggccgcatgcggcgcttcgcttttaccgagcgcgatggctatttggagtccgtggatgagatcccagaaccgcacgaattcgacgtgcgattgagcctcggtcatggtggccactcccacgactatgacctggcgtttcatgaacatgcccatgcagacctggacggcttggagctgtcactggatggctatcaggacgcccatgagcgagcccatgccaacgatattcgtcggcgattctccagccgcaacgtgagtactgggcaggtcattctcttcggcctgacgggaggactgattccctgtcctgcggctatcaccgtgctactgctctgcctacaggtcaaggaagtcacgcttggtgcggtgttggtgctcagcttcagtgtcggtttggccttgaccctggtggctgtgggtgtagcggcagccattggcacgcgtcatgcctccaaccgctggccctggttgggtgcggtagcgcgccgcgctccgtacctgtccagcctgctgatcatcggagtgggcatctatgtcggcctgcacgggtgggcagggttgaatacctga

SEQ ID NO: 356840 - DNA, 666 bp, Pseudomonas aeruginosa
atgttcaatagcaaagccccaagcctcaacgaactgccgagcagtcagcagttgctgcgctccaccgtcattgccctgattgtcgccatcgtcctgttggtcaccgtggtgatgccttcggaatatgccatcgacccgactggtgcgggacgcatgctgggcctcactcagatgggcgagatcaagcagcagctggccgaagaggccgctgccgaggtcgccgcgctggtcgtgcaggcgcctgcggtggttcagcccagcacgcagccagcccccgaggtgacaaccgaagttgctcaatcgtccgcgcccgtagcgccggcagcgccggaagtggcaggtctgaagcacgagatgagcattgacttggctcccggccagggcgccgaaatcaagctggagatgatcaagggcgccaaggtcaactacttctggacggccaatggcggccaggtcaactacgacacccacggcgacccctacaacgcaccgcgcgacttctaccacgggtacggcaaagggcgcttcaccccggaagacagtggcgttctggaggcggctttcgacggcaagcacggctggttctggcgtaaccgaacagacaagtcggtcaccgtcactctgcgcacccaaggagattacatcgccatcaaacgcgtgatctga

SEQ ID NO: 356841 - DNA, 972 bp, Pseudomonas aeruginosa
atgcaccgcttactgacccacttctccagcgtgatgctgggattgctgttcgctgcgcctgcctttgcagaagtccgcgtactgaccagtatcaagcctctccagttgattgccgctgccgtacaggacggagtcggcaaacccggtgtactcctgccgccaggggcatctccccatcacttcacactgcgtccttctgacattcgcaacgtgcgagaggcagacttgctctactggatcgggccggatcttgaaacgttcctgccaagagttctggaaggccgtagggcaatgactctggctgtccaggacatcagtgggctgcacctgcgtcgctttggtgaagaacatcggcacgacgaagaacccgctgacgagcacgaagaggagcacactgatgtgcatgacgaagggacagaggctggcgagcacgacgaactacatcgcccaggggcacttgatgctcacctctggcttgatcccgacaatgcacgcaagatcgcttcgcgtatggcgagcgatctgtccagcatcgaccctgcgaacgccgctcgctaccaggcaaatctggcagcattcgatcaacgtctggcggccatggacgaaaagatcgaggatcgcctcaaaccgttggccggcaaacccttcttcgtcttccatgaagctttcgactacttcgaggaggcattcggcctgaggcatgcaggggtattcgctgtaagcgccgatgttcagccaggtgcgagaaaagttgccgatatgcgcaagcgcttggaactggcaggagccagctgcgtgttcagcgagccgcccattccgcctcgtctggcgcagacgctcagcgaagggttgccagtaaggctggccgagcttgatccgcttggctatgacgtgaaggtcgacgcgttgggctatgagcgtctactggaggcgctggggagcaatctggccggttgcctggagcggctttaa

SEQ ID NO: 356842 - DNA, 267 bp, Pseudomonas aeruginosa
atgatcatgacgctgctcatcgccatggagttcaagcattccatcgtgcgggtggccttgcggcgcgacagcatcatccaggtcaagacggtgatcctgatcgggctgatcgccctggcgcgtaaattcgtgatcctcgacccggagaccggccccgccaaggtcgcggcgctcgcaggcgcgacactggccctcggggcgacttactggctgctgcgcgagcgcgatgaccggacagccggggaaagctcagatgatcagtcgtga

SEQ ID NO: 356843 - DNA, 963 bp, Pseudomonas aeruginosa
atgatcagtcgtgatctgcgccacgcgcagaatgtcggcgcgcggcatcgctggctcaatcgcctgcaaaccgcgctgttggtgctgaccctgctcgggattgccgccgtcgctggcagcctgctgttgggtgacggcgggctttggctggcgcttgcggccgcggggttcaccctgctgctcgaaccggcggccgcctccgggctgaccttgcggctgtatggcgcacgccccctgcacccggatgaagcgcccgatctttgggctgtgttgcgcgaactggcggcgcgggccgggctgcctgccgtgccggtaccgcactacgtgcccagcggggtcgtcaacgccttcgccaccggttcgaagcatcacgcggccatcgcgctgaccgacggcctgctgcgtagcctcacgccccgcgagttgaccggcgtgctcggccacgaaatcgcgcatattgcgaacgaggatatgcgtgtcatgggcttggccgattccatcagtcggctcacccatcttctggccttgttggggcagcttgcgatcgtgctcagcttgccagcgctattgcttggagtcacggaagtcaattggcccgcgttgcttctactggcggtcgcgccacagctggccttgctggctcagttgggcttgtccagggtgcgcgaattcgacgccgaccggctcgctgccgaattgaccggcgacccgcacgggctggcctcggcgctcgccaagatcgagcgggtgagccgctcctggcgcgcctggctgctgcccggatggggcaatccggaaccctcctggttgcgcacgcatccggcgacagctgaacgcattgagcgcttgctggaacttgctccgccgcccgcgatgccgccgtttccatcggcccgtttcgtccccgaggtgaccgtatcaccacgtccgccacgctggcgcaccggcggcctttggcgctga

SEQ ID NO: 356844 - DNA, 1152 bp, Pseudomonas aeruginosa
gtgacctaccccgacccctacagccgcccggcgccggatcgattcatccggcgctggctcgtcatcactggctgcatcgccgcactcatgctgctgtggcagttcctgcccgccatcgaagcctggttcagtccccacgaaacgcaggagcgcacggtgacgccgcgcggcgacctggccgccgacgaaaaaaccaccatcgagctgttcgagaaatcgcgcgggtcggtggtttacatcaccacggcacaactagtgcgtgacgtctggtcgcgcaatgtcttttccgtgccgcgcggcaccggctccggcttcatctgggacgatgccggccacgtggtgaccaacttccacgtgatccagggggcatcgtctgccacggtcaaactggccgacggtcgcgattatcaggctgcgctcgttggcgccagtcctgcgcacgacatcgcggtactcaagattggcgtcggcttcaagcgcccgccggcggtgccggtgggcaccagtgccgatctcaaggtggggcaaaaggtctttgccattggcaatcccttcgggctcgactggacgctcaccaccggcatcgtctcggcgcttgaccgcaccctttccggcgacgccagtggcccggccattgaccacctgatccagaccgacgccgctatcaaccccggcaattccggtggcccgctgctcgattcggctgggcggctgatcggcatcaataccgccatctacagtccgtctggcgcctcggccggcatcggctttgcggtgccggtcgataccgtcatgcgcgtggtgccgcaactcataaagaccggcaagtacatccgtccggcgctgggcatcgaggtggatgagcagctcaacgcgcgtctgcaggcgctgaccggcagtaagggcgtattcgtattgcgcgtgacgccgggctcggcggcgcacagggccgggctcgtcggcgtcgaggtcaccgcaggcggcatcgtgcccggcgatcgcgttatcagcatcgacggtatcgccgtcgacgacgtcaccacattacaggcccggctagacgacaagaacgttggagatgttgtggtcttgttagtggagcgggccggcaagactcgcgagatgcttgtggaactacaaccgggagtttga

SEQ ID NO: 356845 - DNA, 3366 bp, Pseudomonas aeruginosa
atgggcgactgtcagggaacatcggcagctagggaagtgccaaagccacttctcctgctctggtttacagacgcaagaggcatcatgttctgtttagtgaaggattccgaaagagatggcctgtgtaagcttgtgcgcagtgagggcacgcgagccttggttgaatatttcgattacccagggagcaatggccggtgccgtagggaggtcccattttcttcaatcaggcccaagcgattgggacgtaacacccgagtcttaacctacgacgaattgagcgaccagtggcgcatcggccgggtgcgcgaggacgatggggagggcgtagaggtccgcttggccgacaaggttgatgtctatctcgactacgatcaggtgttcgtccgatggaagcacccgattcaggatccagtcgacttcctaagtaacttcgttaccgaaaccccgctcttcgccgaggcgcgttccggattcttaaggaattatcttgagcagagaggtagtgcgtttggcatttctgccctgctttcgtcttccattgaattggagtcgcaccaagtcgatgttattcgacgtgttttgaccgatcactcccagcgttatcttcttgcggacgaggtcggcctcggaaagaccatcgaggcaggcgtaattatccgtcaagctgtgctcgacgatttacgtaaccatcgagtactcgtgctggtcccgcatgcactggttacccaatggcaggatgagttgatcattcggtttgggcttggtgaattcatcggcgaatcggtgttcgtactggcgcaggaagataacgctcaattgcgcgatgtgctgcccaacctatctatgcttgtcatcgacgaggcgcatcacttggctgatcctcgtgcaggcgaagctacgcaagagttgtaccgtgtaattagcgatgtggcgcagcgtactgatcgtttgttgcttctatcggcgacgcccattttgcgcaacgagcctggcttcctccggatgttgcatctattggatccagtggtttacccgctagatgacctagagagttttcatgccaaaatcgtcaatcggcaggctctcgctgaagcggttgctgccttagatccaagcaattcatttttcatggatggtgtgcttgatgatttgatcgagcgaattccgaatgactcgcgcttggtgcaattagcaggggtactcaaggagaaattactagagttgccggatgaggatgatccggaattttgctctgctgtacggcacctgcgagctcatatctctgagacttatcgccttaatcgtcgcattctgcgcaatcgacgtagccaggttatagggctaactcccgaacgcaaaggagtccaagtctggaaggtcgaagattctgcaatggcgcgtctcgaatcagttctggaggactggcgtgttagtgcttcattgtcgatctatcaacaagataacgttgccgcacggacgctgggagcgttctactggagcgcggtttgtgctctttttgaagatctaagtggccttcgtcggctttgtttggaacgccaacgtggtatcgggagcgattcgatctcgtcttttgctggagaggagggacttctcgaggcggtcattcgtgcgattgacaacgatgagtggatggcgacccgactcgatcagttgtatagggggatacgattgctgccggagtcgactaaggcggtggtcttctgcagcaatgaaaccgtaacagataaggtctttgcttacctaaaaagcaacggaatctacacggtccgacacaatattaatattgatgaatctactgaggctagttggcgagattttctaactgattcctcgattcgagtcatcgtctgcgaccacaatacggaagagggcatcaacctgcagggcgggaacaaggtcttggtgcattttgacctcccactacagcccaatcgaatcgagcagcgtatggggcgtgttgaccgctatggcgctggcagttcgattcagtcctacgttctgctcaatgaatgtgctcctatgcaaacagcatggtttggcattctcgaccagggatggggcatcttcaaccagtctatttctagcctgcagtatttggttgaggcagagttaggtgatttgaaggaggcaatgattcatggcggcgcagaggcacttggcgcgcttcgtgaacgattgactggccccactggcctagttgcccgcgaactcaaactgattgaccagcaagacgcactggatcagttgtcacctgtgcctgaagcggagttggacgaactgttcgaagtcgactcggactggaggaccatacgtgacacaatgatgtattggattgagcacacccttctgttccgcaaggtagtcgaacagattcgtcccggtacccaacttgtagacgaaccattccgatttcattacttctcgccggatggtgacaaaaaaccgccaaccctcatctcttcgtcagggttcatcggagactttttaggtgccattgactttgatgcacctggcagtcgttcgactcggccgcaatcatatccatacgttgtacaccgtcccactgccgttaggcgcaaggttcgcccgctacgttacggtacagagtttattgaggccatcaaatcgttttctgaagcggacgaccgaggtcgcagttatgcaatgtggcggcaagtgttcgaccatttcccgtcttcagaaattcgactctgcttccgttttgactttgtgatcgaatcttgcctggacgcagcagttgcagttctgactgccaaccaaaaacagtcgagcgaagcagcaagagcagttctggcaagacgcggagattccctgtttggtccaacggtgatgcaagtctgggtggacgaggacggagatgaactgtcggaggattttattgagcgctttttgatgcctgagtacgcaaagcggggcggaaatggctacatcgacaagaatcttgagacaccttacttccgtgcttttcgtaggatggcgccggatactttcactaattggaaggagcgctgcgaacggatgcgtgaccgtgcgctggccatcatgagggctaagccagaattgaaggagcggcagcggagcgcgctggatcgggcactggccgaagatgaagttcgttacgcccagttgcaggctcgtatccagtctttgcaggggagggaggcggaagctgaggctcgccaactcaaactcgagcaggcgcttaacgaagcggttcacggcggcataacgtcaccttcggtgaaggtcgacgtcgcaggcgtggtttttctgaccagcgaacctgtatcaatcatccagcgccacgttcaggaagacgcatga

SEQ ID NO: 356846 - DNA, 951 bp, Pseudomonas aeruginosa
atgagcattctcaatcgcgaaaatgatggcctacatccgatagtgctgactttggccggaatagtcgcccgagaaaaagttatttctcgcgacgagttgatcagcatttgtgtcccgcatgccagttccgaaatggaagccgaaaatgattctgataaggggaggggcaaggcattggctgctcgggcccgtgctacgttggctcgctgggtttcactggggttattcatcgagaatgatgaccaagttcgcttgagcgtcgacctggcgcgcggggaatctactgatgtatttaccgatcgcctgcctagcatttgccgaaggcttgcgttgcagcagatgcatgcactaccactctggccctcagatggcagtatctcggaagaggcagttgggcgcactgctgacttatgtcgtagtttagcttggtgcttggcgcaggatatatacgcgttgccaagtgcgtatgatgaaatcgaaagtttgattacagcccaagtgcagccagggcggttcattttcttgaatagcacccgctggcaggggtttcgaccttgggcgagattccttggttttgctactggtgacgactccagttttttctgcgatccaacagttgcggtgcgcgcagagttgaaagaggtgattcaaaagaacgagacggtgctcgcaggcgagttcgtttcacgcctggcggaacggctaccggtgttggattctggtgattatcgtctcgaggtagaaaaggtgctgaagcctgaaacaggggttgtacccgctgctggtcacttgtcaactgcgctgtcattcgctttgcggcgtttacagttacagggagtgatcagcctagtgtcattggccgatgctggttcaaaactcacacttgttggtcaaggtggacgtgcgtgggaaagcttcacccatgttcgtctactgagggacacattatga

SEQ ID NO: 356847 - DNA, 2436 bp, Pseudomonas aeruginosa; identical to SEQ ID NO: 341508

SEQ ID NO: 356848 - DNA, 627 bp, Pseudomonas aeruginosa
atgctcaccgtgcttggcctgatgcgaattacccgcgaagaccactgtctgttcctgcttgatgagccggacactcacctgaatcctatttggaagctgcgctacttcgatgacatcgaaggtgtgctgacctctgaagacggcacgctagtgcaaggtgattcgcaaatcctcatcaccacccacgacccgatgatggtgggcagccttaaacgcgagcaggtacatatcctgaggcgcaacggtagtcgaacagtagtggatatacccgatatgcacccacaaggcatgggggtgactgggctcctcaagagcgagctgttcggcctgtcgtccaccctggatatcgaaaccgagcgacgcctcttccgtcgcaacgagctgtttgtaaagcagccgcgcacgccagtagaagatgccgagctctcacggctttccgccgagctggccgatttggggttttccaccgccgattttcgcgatcccgattacgcgctcttcgtgcgcaagatggcgcagcaccgccgtttcaggaaaccagcgctaacgccggaagagcaagctgaacaggatgcaattgccgactcaataattgacgaaattctgcgtgaggaggccgctgagtga

SEQ ID NO: 356849 - DNA, 1392 bp, Pseudomonas aeruginosa; identical to SEQ ID NO: 321602

SEQ ID NO: 356850 - DNA, 132 bp, Pseudomonas aeruginosa
atgaatcagcgcttcgcgatccaacccgtcgaaagcatcccagaagtcatcgtcaatctgttccagccccgctggcttcagactcagatccagctcgcccgtgtcatcgtcatccagggtcttgaaacgtag

SEQ ID NO: 356851 - DNA, 1746 bp, Pseudomonas aeruginosa; identical to SEQ ID NO: 356825

SEQ ID NO: 356852 - DNA, 627 bp, Pseudomonas aeruginosa; identical to SEQ ID NO: 356848

SEQ ID NO: 356853 - DNA, 1209 bp, Pseudomonas aeruginosa
atgtccgtcgatatccgccccaccccgccggcgcaggacagcgcccggcagaacgtcaccctgcagatcgtctcggtggtgatgttcaccttcatcggctacctgaccatcggcatcccgctggcggtgctgcccggctacgtgcacgacgacctcggctacggctcggtgctggccggcctggtgatcagcctgcagtacctcgccaccctgctcgcccggccctacgccgggcgcgtcatcgacggcctcgggccgaagcgcgcggtgctctacggcatggccggcagcgccgcgagcgggctgttcatgctgctctcggtggcgatccagggctggccggcgctgagcctggccagcctgctggtcggccgcctggtactcggcgcggcggaaagcctggtcggctcggcggcgatcggctggggcatcggccgggtcggcgcgccgcacaccgccaaggtgatttcctggaacggcatcgccagctacggcgccatcgccctcggggcgccgctaggggtgctgctggtgcagtggctggggctgtggagcatgggcgcgtccatcgtcctgctcggggcgctcggcttcgccctggcctggccgaagttgccggcgccgctggtgcacggcgagcgactgccgttccaccatgtgctcggccgggtcaccccgcacggtatgggcctggcgctgggggcgatcggcttcggcaccatcgccaccttcatcaccctttactacgccagccgtggctgggccaacgcagtgctctgcctgagtgccttcggcggttgcttcatcggcgcccggctgttgttcgccaatagcatcaaccggctcggcggcttccgcgtggcgatcatctgcctcggcgtcgaaagcctcggcctgctgttgctgtggagcgcgccgaatccctgggtcggcctggccggcgcggccctcaccggcttcggcttctccctggtgttcccggcgttcggcgtggaagcggtgaacctggtaccggcttccaaccgtggcgcggcgctgggcgcctactcgctgttcgtcgacctgtcgctgggcatcaccgggccgctggtgggcttcgtcgccaacctgttcggcttccgctcgatgttcctcttcgcctgcctggcctcgctcggcgggctggccctggccgtcgcactgcaccggcgcagccgccggcctggctag

SEQ ID NO: 356854 - DNA, 897 bp, Pseudomonas aeruginosa
atggatccgacgaaatttaccctcagacgcagcgcgttctcgcccggaaacgccattttcatcatcgactgtttaagcgagcgggatctgcaaaccggtctctctcgactgagagaactgcacgatttgcttctcgcgcgcgatcctgagcgatttgaatacaacaagaatttcgcccatcgattcgaggcgggctctgcaaccaaatttgcagaatgcttcgaggaaatcacaggcgcgtgtgagcttggcattcgaccaatcatattcattgatgctcacggccactccgagaagggtcttggaacgccgtccggggagtttattggctgggatgagttgttggacagcttggatagcgtcactcagcggacagggggtgagctgacagttattgtcgctgcctgccattcgatgaaagccgtagaaaatctgagccttcagaagcgccttccttttgccttttactatggatattcatcagaggtaaaagccggagtagtagataaagaaacggaggtgatttacgagagtctctttaatgatggggggcgagccgtgctaaatgcgacgagcctccagcttaagtctttctctgaatacgaccacgttacggatgtgctggcagtcacattgcttagcgccaaggcccccggcgttttagccaaaatgcttccacagttgtcgcgcgccaagctgcgagcgtctgctgatgagacagtcgtaaaaaaagggattcctttgtctgggtcacgcgtgaaggtgaaccatatgctcagttcaggacagctagccatcaagatggtcgagcaattgatgcacgataccccgcgtcgagaaagggttatccaagacatccaggcatacatacagggtgctccaacgcctgctctctga

SEQ ID NO: 356855 - DNA, 252 bp, Pseudomonas aeruginosa
atgccccaggctgagtcggcaattgccctgatcgactgcaactcgttctacgccagttgcgagcgggtgtttcgcccggacctgctgcgtacgcctatcgtcgtgctgtcgaacaacgacggctgcgtgatcgcccgctcggccgaggccaaggcgctgggcatcaagatgggtgagccgtattttcagatcaggcaaaagcttcggcagcacggcatttttgcgttctccagcaactacgcgctttattaa

SEQ ID NO: 356856 - DNA, 318 bp, Pseudomonas aeruginosa
atgatcgggggtatgggcggggaaactggccacgcgggaacccagcggcaggtcgccgacgccggcgccgaccgccagcacctcgccggccagttcgaagccgagaccggacggcagcgcagcctgctccggggccaggttctgacgccagagcacatccttccagctcacgccgatcgcctggacacgcaccaggacttcccctgcggccggcgccggggtcggcagctcttcgcatttgaggacctctggcgggccaaactgatgaaaacggatcactcgggacatcgcaaacctctgcagtgcatcacggggtga

SEQ ID NO: 356857 - DNA, 360 bp, Pseudomonas aeruginosa
atgcacaaccgcatcctcacttcccgtctcgcccagcgcgccgccatggccctgggcgccgccgcgctgcccgcgctgtcgttcgcgcaaggcctgccgcagttggagaacccgacccgcggcaccggcaacggcatcatggaaacgatcaggaactacggctacgacatcatcatgctcgtagccctcctggtcgtggcgtcgatgttcatcggcgtctgctaccacgcctacggcacctacgcggaaatccacaccggccgcaagacctggggccagtttggcctcaccgtcgcgatcggtgccgtgctgctcgtgatcggcatctggctgctcaccgaagccaccggcatcctgtaa

SEQ ID NO: 356858 - DNA, 258 bp, Pseudomonas aeruginosa
ttggagaacccgacccgcggcaccggcaacggcatcatggaaacgatcaggaactacggctacgacatcatcatgctcgtagccctcctggtcgtggcgtcgatgttcatcggcgtctgctaccacgcctacgggacctacgcggagatccacaccggccgcaagacgtggggccagttcggcctcacggtcgccatcggcgccgtgctgctcgtgatcggcatctggctgctcaccgaagccaccggcatcctgtaa

SEQ ID NO: 356859 - DNA, 234 bp, Pseudomonas aeruginosa
atgccgctgccggcgccggacccggatgaagtgatgccggcggacctgcagcaactggccgggtacatgcgccagagctacagcgaggccacgcagtggtgggagttcaccagctcgccggccttgcaggatgcggccttgcccgacgacctgctggacgatgccgctgcggccgagcccggcgcggtggccactggcgccgacgatggctcgggcaacgaggccgtgccatga

SEQ ID NO: 356860 - DNA, 231 bp, Pseudomonas aeruginosa
atgccgcttccggcgccagaccccgatgaagtgatgccgacggacttgcagcaactggccgggtatatgcgccagagctacagcgaggccacgcagtggtgggagttcaccagttccgcagccttgccgcatgcagccttgcccgacgacctgctggatgacgccgctccagccgagcctgacgcggtggccaccggcgccgacgacagcaccggcgaggccgcaccatga

SEQ ID NO: 356861 - DNA, 627 bp, Pseudomonas aeruginosa; identical to SEQ ID NO: 356848

SEQ ID NO: 356862 - DNA, 1008 bp, Pseudomonas aeruginosa
atgagcttaaaagtaggcgctcactacgtacgtgatggggaagatggtactaagttttactggatgtctggagtatccacaaagaccaaagagggtaaggtagattggctagtcacaaagcttacccatgaagcgctagacgttgcggggaaggtcaccgcagagattcgtgccgagctaaatgatagatacagtttggctaagtcggcaagtaatctgatagagatgcatgattatgaagcgcatctcgattctttgttccttgggtggggagggcatgcacataaactccaagtttttgctgcacaaaccattagggcaagattaaagcggtttatgctggctcataatattgactgggaggtcgcaccacaccaatttagaaggacgttcgctcgatatgtggctcgcagtcaactcggtgatgttcgttatcttcgtgatcatttcaaacattggacgctggatatgactgcgatatatgcagaggatcaagttagagataaagagctgtttgatgaaatctatgttgcaatgcgtcacgaaaagatgctggtgcttgaaagtgtttttgaagaagatgcattggtttctggtggtttggcagagaccattcgtatttttcgatcctctgatgaggcgattcggacgtacaaaagccgccgtgaaatggttcagtttgtatcggaggttgtgcatctgagaagtactggtattgcatggtgtactgcagatagtacgggctgctccggtggcagtgtattggataaaactcgatgcggtgattgctcgaaaagtcttatcgatgaatcgcggctgccacattgggtaggcatatatgctcaaatgttggagcttaaagctatcgctaatgactgtggtccaggtgcgggtgcacgaattgacagcgatattcgacggtgtgaagtcgtccttcaagagcttggagctgatattgaggagcttaagctcggtgttttacttgaaggggggcttcgtcatgcataa

SEQ ID NO: 356863 - DNA, 630 bp, Pseudomonas aeruginosa
  misc_feature (559)..(568): n is a, c, g, or t
atgattttggctaagggtgttagctattatcaacaagaagcactgagaaaggctcgtgaaggtcacacgcacctgcctatagcagtcaccgctacacggctaggggacgggacatacaaagtcttaagttacctcgcggatgacgtttggcgattcccaaacgcgatttttccacctgggactgctgaccacgataaatgcattcggttcggtaagattccagagcgttggcgctcagttctgaaaatagttatgcttgaatactatttaaacggcatagagggccgggtgcgaccagtcggatcttcgttaatttcttttttcaaaaacgtatcattatttttgaagtttgctggtgcttatgtcgagtgcttgtctgaaatttcagaatttctgtgtatgcagtatgttaattatttaaaaaatagtagcagtagatctggtaataagttttctaagtcctatctttgtacgcgattgagctcggtgcacacactgcatctgctcagtaaagttactactactcccatggtgcacccttggcctgaaagtagcgcgnnnnnnnnnngagttgtcaggcgcaaatcgtgctcactgggcccaatcaaagaccttgccaattccagataa

SEQ ID NO: 356864 - DNA, 1209 bp, Pseudomonas aeruginosa; identical to SEQ ID NO: 356853

SEQ ID NO: 356865 - DNA, 1137 bp, Pseudomonas aeruginosa
atgaccggggccgtcatgactaaagttgctcatttgacatcggttcactcgcgttatgatattcgtatatttcgaaagcagtgtagaacactctctcaatacggatacgatgtgtatctggttgtcgcagatggtaagggtgatgaagtcaaggatggtgtaaggattgttgatgtcggagtactctcaggtcgcttgaatcgtattctaaaaaccacccgaaaaatttatgaacaggctttggcgcttggggctgatgtctatcattttcatgatcccgaactgatacctgttggtcttcgactgaaaaagcaaggtaagcaggttatcttcgactcccatgaggatgtgccgaagcaactgctgagtaaaccttacatgcgaccgtttttacgccgtgtagtggctgtgttattttcctgctatgagaaatatgcatgccctaagctggatgcagtccttacggcaacgccgcatattcgtgaaaaatttaaaaatattaatgggaatgttctagatattaataactttcccatgttgggtgagttggatgcgatggttccttgggcaagcaagaaaactgaagtctgctacgtcggtggtatcacttccattcgtggtgttcgtgaagtcgttaagagtcttgagtgcttgaagtcctcggcgcgcttgaatttagtgggaaagttttcagagccagagatagaaaaagaagtcagagcgctcaaaggatggaactccgttaacgaacatggtcagcttgatcgagaagatgttcgtcgtgtactcggtgactctgttgccgggttggtgacatttctcccaatgcctaatcatgttgatgcacaacctaataagatgttcgagtatatgtcgtcgggaatccctgtgatcgcttccaattttcctctctggcgggaaattgttgaaggtagcaattgtggtatatgcgtagatcctctaagtcctgctgccattgctgaagcgatcgactatctggtaagtaatccgtgtgaggcggcagcgctgggacgtaatggccagcgggcagtgaacgaacgttataactgggatttggaagggcgcaaactagcgcggttctattccgatctactgagtaagcgagattccatatga

SEQ ID NO: 356866 - DNA, 1392 bp, Pseudomonas aeruginosa; identical to SEQ ID NO: 321602

SEQ ID NO: 356867 - DNA, 258 bp, Pseudomonas aeruginosa
gtgagcaggtggaagcaaagacgcaagctccccgagagtcacagggcgaccctgctccaccagcacagccagggtgtcatgaatcagcgcttcacgatccagcccgtcgaaggcatcccagaagtcgtcatcaatctgctccagccccgcaggcttcaaactcagatccagctcgcccgcatcatcgtcatccagggtcttgaaacgaagacgctcgattgccgggacgccggtaatggctacgccaaccggtggtaa

SEQ ID NO: 356868 - DNA, 213 bp, Pseudomonas aeruginosa
ttgcccatccaacaaccgatcgacgatctctccacggtgagactgctcgctgatgatggactgtcgaagggcgcgatcagcctcgcgccaagagtcttcaacccgtcgaaagtctgcgcgcaggctggtggccaggttatatatctcgcgtatgccttctatcgcctgcgcttcatccagcacgacgacgtggccagcttctacctgcgctag

SEQ ID NO: 356869 - DNA, 663 bp, Pseudomonas aeruginosa
atggaaatgaaagatgaagccaaatgcgctcctggtcgcgtaagtgggcttggcttgtggcgcgcaattaagttcgagagtttgtccttcatagcgataatgtttgctctgtttttcacaaaagggtatgtgtacttagaaacattgaattctaggttgggtgtcccggtaaatagacttggttttgatggacagttgtatgctgtgtacggtggcgtaagcctgcttgttatatttacggcgctaatgattgcgtttgccggggtgtttgttttcacctctgtgatgatgttcttcgagaaccctaagaggcaaagaaaggactttgaggttaatcctgatggatggttttggctgaggctgagacatgcaaaggactttattgttgttgctcttgcaatgacggccttttcagtggctttgtatggattatgggccgttgttgtctctgactcagttggaagtgcggagagggccgcatttaaagaagttcgtgactgtaatgttgctgagataagattgaaaaatacagatgtcgttgctgcgtgcattgttggggaaagcgacgatatgttgtatttagtatataagggcgtggaaaaagatggctctatagaatttgaaaagggcattttatctaagagtttagttggctctgcttga

SEQ ID NO: 356870 - DNA, 1260 bp, Pseudomonas aeruginosa
atgcaccgcaactactgggacaccagcgcccacctgttcgacgaccgcgccgccggtcgcgatcccgggttcgggccctggcaggatatctccatgcaggtccagggcccggtgctggccgacctcagccgcaacttcagcgaggcctgggacctcgagacgccgtggtacaagcgctggttctcgacgccatcgctgaccgccgagcgcgacgccttgccgcggccgaagatcgccacgcccgccagcaacagcgtcgcgcagatttgccgaacccagccgcaggacgacgagcgctcgatcctggagcactatctcaaggccctgggcaatgccaccgactacgtctacatggaaaaccagtacttccgttatgccggcttcgccgagcgcctgcggaagactgcgcaggtgcgcaaggcccggggcgtgcccggcgacctgtacctgttcgtcgtgaccaacacccccgactccagcgacgcctcgaagaccacctacgacatgatgaaaggcctgggccaggagcaactgatgccgcaggtacagcgcgacctggcgcatgacttgcgggaaaagcgggagcagttgaagcaggtcagggaaaacctacatcccgatccctatgtccggcgcggccaggaaaacaacatcgaacggctggagcgcaagatcgaggcgctcgaagagaaaggcgtgacgccggaagtcgagcaacgcctcggcgatctcggcgcgcaggagattcccggactggcgaagaacaccggcgaggacgacaagccctatcaactcgtcgaagtacccggcctcaaggtggtcgtcgccaccctggccaccagcgaccctgcccccggcagcccgccgccagcgcgcctgtccgccgaagccgaggccgccctcggggcgccgccgctgaaggcgcgctacaagcacatctacgtgcactccaagctgctgctggtggatgacctctataccctgctcagctcggccaatatcaatgtccgcagcatgcatggcgacagcgaattgggaattgcccagcccaatccggatttggcgagggcgatgcgggaggagttgtggggggcacatgcttatgaagttgccaaaacgatcgaagacaacttcgaactgtggagtcagaagatggatgataactggaaggcccaagtggcagatgagccttttacctcgcacttgctgcgtttctgggatgtcaccacgccctatagtcccaatcttacggtggactga

SEQ ID NO: 356871 - DNA, 1074 bp, Pseudomonas aeruginosa
  misc_feature (114)..(123): n is a, c, g, or t
atgacgctggacgacgtccagggtgctcaggccgatcgagccggtcgcgccgagcacgctgatccgctgcggtcgactcatggcgcaccccagccggcggcccagagcagggcnnnnnnnnnncatcccggtattcgcggcccagagcagggccgcgaataccgggatggctgccgtcaggctgtcgatgcgatccagcacgccaccgtggccgggcagcaggttgctgctgtccttgattccggactggcgcttgaacatgctttcggtgaggtcgccaacgatcgagacaaacaccaccagcgccgcgccgagcagggccaggagcagcgcgccgagggaccagccgcggtagaggccgaccgccagggtgatcgccaggctggccgccaggccgccgtaaacgccttcccagctcttgccggggctgacccgcggcgccaacttgcgcttgccgaaggccttgccggagaagtaggcgccgatatccgcgccccagaccagcaccatcacggcgatgatcaggccattggccagcggccactgcttgagcaggaccagcccctgccaggccggcaacaggatcagcaggcccatgcccaggcggcgccagcgtccgccccagtagccgacgctttccgggtaggtgagcaccagcacagtggccagcgtccaccagaccaacgccagcagcagcacggctccggcaagctgcggcagatggtagagagcgaccatcagcacggcgaccgtcgccgcgtaggcaacgcggccgaactgttgttcatagccggccaggcgcgcccattcccaggcccccaggctcaccaccgcgccgatgaacagggcgaagaacgccccttcgagaaggaaaaaaccacccagcgcgatgggcaaaagcaccagcgccgtgatgatccgttgtttcagcatgacggacgggcctcggcctcgacttgctcgctggtcttgccgaagcggcgctggcgcttggagaaatccgccagggcagcccgcatcgccgcgtgcttgaagtcgggccagaacaggtcggagaaatacagctcggcgtag

SEQ ID NO: 356872 - DNA, 495 bp, Pseudomonas aeruginosa; identical to SEQ ID NO: 342610

SEQ ID NO: 356873 - DNA, 1185 bp, Pseudomonas aeruginosa
atgccctcacgcaacatactggtgatcaactgcggcagttcgtcgatcaagttcgccctggtcaacgaggcccactccctgtttcccctgcacggcctcgccgagcgcctgggcagccgcgatgcggtgctgcgctggaagcgcggcggcgacagcgacagcctgatgattcccaacgccgaccaccgcgccgccctcgcccagttgctgccgatggtgcagaacgccgcgggcggcaagctccacggcatcggccaccgggtggtgcatggcggcgagctgttcacccatgccacgcgcatcgacgaccgggtggtcgaggcgatccgggccaccgcgccgctggcgccgctgcacaacccggccaacctgcaaggcatcgaggcagcgatgacgctgtttcccaagctgccccacgtcgccgtgttcgacaccgccttccaccagagcctgccggagcacgcctaccgctacgccctgccggaggccctctaccgtgagcatggcgtgcgccgctacggcttccacggcaccagccaccgctacgtcagccaccgcgccgcggaaatggccgggttggcggtcggcgacagcagttggctcagcgcccacctcggcaacggcagctcgacctgcgccatcgtcaacggccagagcctcgacaccagcatgggcctgaccccgctggaaggcctggtaatgggcacccgcagcggcgacgtcgaccccaacctgcacagccacctggcgcggaccctgggctggagcctggagcgcatcgactcgatgctgaacaacgaaagcggcctgctcggcctctccgacctgtccaacgacatgcgcaccctggagcaggagcgcgagcagggccaccccggcgcggccctggcgatcgaggtgttctgctaccgcctggccaagtccctggcggcgatgagctgcgccctgccgcaactggacggggtgatcttcaccggtggcatcggcgagaactcgccgctggtgcgcgccaagaccgccgcccacctgcggctgttcggcctgcgcctcgaccaggaggccaacgcccgctgcgtgcgcggcgtcgccgggccgatccaggccgcggggcatccgcgggtactggtgatcccgaccaacgaagagcggcagatcgccctcgacacgctggccctgctcgactga

SEQ ID NO: 356874 - DNA, 717 bp, Pseudomonas aeruginosa
ttgtactgggccgagccggcgggcagtgccggttcgaaggcggcgcagtataccgcaaaggcaggccgggcgcgcgccgggggctaccgtccgtcccgttttttcgcgccatggcgggaaacttgccgcaactcaatgcgcgcctgccacgagcggccagactggttgtcgcggcgcgctccgagggagcggcggccgcgccggttccgcagcctgtcgccgtgcccgtcaaagacgccgcgacaggcgctcagccccgtccaaggagatgaccatgaccctgccacagaccatgaaagccgcggtcgtgcacgcctacggcgcgccgctgcggatcgaggaagtcaaggttccgctgcccggccccgggcaggtactggtgaagatcgaagcctccggcgtctgccacaccgacctgcacgccgccgagggcgactggccggtgaagccgccgttgccgttcattcccggtcacgaaggcgtcggctacgtcgccgcggtgggcagcggagtgacccgggtgaaggaaggcgaccgggtcggcatcccctggctgtacaccgcctgcggctgctgcgagcactgcctgaccggctgggagaccctctgcgagagccagcagaacaccggctactcggtgaacggcggctatgccgaatacgtattggccgacccgaactacgtcggaattctgccgaaaaacgtcgaattcgctga

SEQ ID NO: 356875 - DNA, 153 bp, Pseudomonas aeruginosa
atgccagacgctgccgtcggcatgctcgacgtgcagatcgaccgcaatcttgccgatgtcgtgcagcagggccgcgtaggccgtgcctgcagtccaggcttcggcctgggccgcctgtgcctccggcgtgacgcccgcaggcagcaggtatga

SEQ ID NO: 356876 - DNA, 432 bp, Pseudomonas aeruginosa
atggagcgcgccgagatcatccgcacctccctggaggggcgcggcgcgctgatccaggtcgccgaccaggcccaggcctgtgcggtcgccaaccgcatcgccccggaacacctggagctgtcggtggccgatccggaaagctggctgccggagatccgccatgccggcgcgatcttcatgggccgctacactgccgaggccctgggcgactattgcgccggcccgaaccacgtgctgccgacctccggtaccgcgcgtttctcttcgccgctgggggtatatgacttccagaagcgttcgtcgatcatcaactgctcggccgagggcgcttcggtcctcggtcgtaccgcctcggtgctggctcgcggcgagtcgttgaccgcccacgcgcgtagtgccgaataccgcatcctcgacgagaaggaggcctga

SEQ ID NO: 356877 - DNA, 1923 bp, Pseudomonas aeruginosa
atgaccctgctcaagttcaccgatgtatcccttgcctttggcaccactcccttgctggacaaggtgtcgtggcagatcggccgtggcgagcgggtctgcgtgatcgggcgcaacggtaccggcaagtccagcctgttcaaggtggtcaagggcgaacagcaggccgacgacggcgaagtctggcgtgctccggcgctgaagatcggcgaattgccccaggaactgccgcgtgccgacgaacggacagtgttcgacgtggtggccgagggcctggcggaagtcggcaagctgctcgccgagtaccaccacctgagcctgaacatccataccgacgacgacctggcgcgcctctcgcgggtccagcaggaactcgaggcgcgcgatggctggcgcctgcagcaactggtggacagcaccctcagccgcctgcagttgccggccgacaagaccctcgccgaactctccggcggctggcgtcggcgcgtgctgctggcccaggcgctggtcgccgagccggacctgctgctgctcgacgaaccgaccaaccacctggacatcggcgccatcgcctggctcgaggaagcgctgctgggcttcaacggcgcggtgctgttcattacccacgaccgcgccttcctgcaatccctggcgacccgcatcctcgagctggatcgtggccacctgatcgactggaacggcgattacgccagtttcctggtgcacaaggaacagcaactggccgccgaagaagctgccaacgcattgttcgacaagcgcctggcccaggaagaagtgtggatccgccagggcatcaaggcccgccgcacgcgcaacgaagggcgggttcgggcactgaaggaaatgcgtcgcgaacgcgccgagcgccgcgagcgccagggcaaggccagcttccagctggaaagcgcggacaagtccggcaagcaggtgatcgtggtggagcacgtcagcttcgcccatcccggcggccagccgctggtacgcgacttctccatggtcctgcagcgcggcgaccgtatcggcctgctcggcgccaacggtaccggcaagaccaccttgctcaagctgctgcttggcgacctgcagccgacctcgggcaagatcgaggtgggcaccaagctggaagtggcctacttcgaccagttgcgccatcagctcgaacccgagcagacggtgatcgacaatatctccgaaggccgcgagttcatcaccatcgacggccagaaccggcatgtgctcagctatctcggcgacttcctgttcagtccgcagcgcgcccgcaccccggtgaaggcgttgtccggcggcgagcgcgcgcgcctgttgctggccaagctgttcagcaagccggccaacctactggtgctcgacgaaccgaccaacgacctcgacgtggaaaccctggaactgctggaggaagtcctgctcggcttccagggcaccgtgctgatggtcagccacgatcgggccttcctcgacaacgtggtgaccagcaccctggtcttcgagggcgagggcaaggttcgcgaattcgtcggtggctaccaggactggctgcgccaagggggcacgccgcgcctgctcggcgtgagcgagtcgaagagcggcaaggccgagctgaataccgcgttggcgcccgccgccgaatccgttccggctgccgcggcgccgagcgaggcgccggcgaagaaaaagctcagctacaagttgcagcgcgagctggaggccttgcccgggcagatcgacgcggtcgaggcggagctggcgggtgtccaggaaaccatcgcgcagcaggatttctatctgcgcccgcaggacgagcagcgcgaaaccctggcgcggctggacgcgttgcagcaggaactcgatgccttgctcgaacgctgggctgaactggaagactga

SEQ ID NO: 356878 - DNA, 468 bp, Pseudomonas aeruginosa
atgaacctttacctactgctgaagaccctgcatatcctttcctcgaccattcttttcggcaccggcctggggtcggcctactacgccctgcgtgcctggcgcagcgggcagttgccggtaatcgcagtgaccttccgccacctggtcaccgccgactggctgttcatcgccaccaccgcggtgttccagccgctcagcggcctggccatggtgcatgtcgccggctggtcgctggcccagggctggttgctgtggagcctgggcctctacgtgttcgccgggctctgctggctaccggtggtgtggttgcagatccgcgtacgcgacatggccgaggcggccttgcgcgaggcgcggcccatcgaaccgctggcgtaccgctacatgaacgcctggttcatcctcggctggccggccttcatcgccttcatggtcatcttctacctgatggtcaacaagccggtctga

SEQ ID NO: 356879 - DNA, 810 bp, Pseudomonas aeruginosa
atggacaacgcgctggtgcggctgacccaggtcggcgtgtccttcaacggccaggcggtgctgagcgatgtcgacctggccatcgagcccggccagatcgtcaccctgatcggccccaacggcgccggcaagaccaccctggtacgcagcgtgctcggcctgctcaagccgcacgtcggcgaggtctggcgacggccgcggctgaccatcggctacatgccgcagaaactccacgtcgacgccaccctgccgctcagcgtactgcgcttcctccgcctggtacccggggtcaggcgcgagcaggcgctggcggcgttgcgcgaggtcggcgcggcgcacgtgctggagcgcccgctgcaaagcatttccggtggcgaactgcaacgcgtgctgctggcccgcgctctgctgcgcaagcccgagctactggtgctcgacgagccggtgcagggcgtcgacgtcgccggccaggccgaactctaccgcctcatcggcaaactgcgcgaccgctacggctgcggtgtgctgatggtctcccacgacctgcacctggtgatgagtgccaccgaccaggtggtctgcctgaaccgccatgtctgctgctcagggcaccccgagcaggtcagcggcgacccggccttcgtcgagctgttcggccaggacgctcgcagcctggcgatctaccaccaccaccacgatcacgcccacgacctccacggcgaggtggtcaaggccggtcccggcgccttgcctccaagcacccgcttcactcctgtccacaagcacggccccgactgcaaccatggctga

SEQ ID NO: 356880 - DNA, 678 bp, Pseudomonas aeruginosa
atgaaagccgtggtattccatgacatcggcgacatccgcctggaagacgtggcggagccgcgcctgcaggaacccaccgacgccatcgtgcggctgaccgcctcggcgatctgcggcaccgacctgcacttcgtccgtggcagcgtcggcggcatgcgtccgggaaccatcctcggccatgagggcgtgggcatcgtcgaggcgctcggcgacgaagtgcgcaacctgcaggtcggcgaccgggtggtgattccctcgaccatcgcctgcggcaattgcgtgtattgccgagccggctactacgcccagtgcgacgtcgccaaccccggcggcagccaggccggcaccgcgttcttcggcggtccccgggccaacggcggcttccatgggctgcaagccgagaaagcgcggattccctatgccaacatcggcctgatccgcctgcccagcagcatcagcgacgaccaggcgatactcctgtcggacatcttccccaccggttacttcggcgccgaactggccggtatcgcccccggcaacaccgcgccgtgttcggctgcggtccggtcggccagttcgccatcgccagcgcgttgctcctcggcgccgcccgggtgttcgccatcgaccgccacccggaccgcctgcacatggcccgccagcaaggcgccgaagtga

SEQ ID NO: 356881 - DNA, 2055 bp, Pseudomonas aeruginosa
atgagtgacgcacgcctggccgaactggccgccgccgtgggcctgcaactcgactggcaggacgccaacggacggccgcagcgggtcgacccggaggtccagcgcggcctgctggaagcactcggctatccggcgcagagtccgcaacagatcgaacagagcctggccgcgctggcccggctgcgcgaggacagcgccaacctcggactgctggtcggcgaatgcggccagccgctggagcaagcgctcggccccgccggcaccccgggcgaactggtctacgaggacggcacgcgggtcgccctgcgcctggacgccgaaggccgcctgccggcgcaggcccgcagcggctatgcgcagctgtcgctggagcagcgggaatgggcggtggcgatggcgccggcgagctgtccgtccctggccagcctcgccccgggtcgctcgcgtcgctgggggctggccgcccaggtctatgccctgcgccgccccggcgacggcggcctgggcgacagcgccgccctcgaggacctgctacgcagcgccgcgcggcatggcgccgacgcgctggcgatcagcccgctgcacgccctcgccgaggccaacggacatgcctacagcccctactcgccgtccagccggctgttcttcaatgtcctgcacgccgcgccggcgagcattctcggcgcggcggcggtggaacaggcgatccgtcgcgccggcctggccgcggagatggcccgcctggagagcctggagctgatcgactggacagcggcggcggacctgcgcatgcgcctgctgcgccaactccaccgcgacttcaccgagcgcgccagtcccttgcgccacgacctcgccgaattccgccgcgaagccggcgaggcgctgctgcaccactgccgcttcgagaccctgcaggcgcacctgggcgctggccccgactggcgacgctggccggagccgctgcgccgccccggcgagccggcggtggccgcattctgcgccgatcacgccgaggaagtggacttccgcgccttcggccagtggctgacccaacgttgcctgcaacatgcccagcgccaggcgcgcgaggccgggatggccatcggtctggtcgccgacctggcggtgggcgccgacggcggcggcagccaggcctggtcgcggcaggaagagctgctcgccgaagtgaatgtcggtgcgccgccggacatcctcaaccagtccggacaggactggggcgtttccgcgttcaatcccgaaggcctgcgccgccacggctaccgggcattccgcgagatgctgcgggccaacctggcctggcccggagggctacgcatcgaccacgtgatgggcctgcaacgtctctggctgatcccgcgcggccagccgccccacgccggcgcctacctgcgctacccgcaacgcgagctgctgcgcctgctggcgctggaggccagtcgcgcctcggcgctggtcatcggcgaggacctcggcaccgtgcccgaaggcctgcgcgaggaactggcacggcgccaggtgctgggtacccgcgtgctgctcttcgagcggcgcggcgaacgcttcgtgcccccggcgcaatggccggcggacgccatggccaccaccagcacccacgacctgccgagcctgtccggctggtggcggggccaggacatccactggcgcggccgcgccggacaccgcagcgccgaggaatgcgcggccgacctggaactgcgcgccgaggagcgccgggcgctggccgccagcctcgaaccgccggtcgatcccgaccccgccgccgaagtgccgctggacgcctgcatcggctatgtcggggcaacccccgcgccgttggtgctactgcccctggaggacgccctgggcagcctggagcagccgaacctgcccggccccggcgacgcccacccgaactggcggcggcgctggccggaaaacgccgcgcagatgctcggaacgccgcaggtcgaccggcgcctgcgcctgctcgaacgcagccgccgggatgccgaggaggccgcccatgattga

SEQ ID NO: 356882 - DNA, 702 bp, Pseudomonas aeruginosa
atgctgagtttcgacaaggtttccacctactacggcaagatccaggcgctgcacgacgtcagcgtggaagtgaagaagggcgagatcgtcaccctgatcggcgccaacggcgccggcaagtcgaccctgctgatgacgctctgcggctcgccgcaggcggccagcggcagcatccgctacgaaggcgaggaactggtcggcctgccctcctccaccatcatgcgcaagagcatcgcggtggtcccggaaggccgccgggtcttctcccgcctgacggtggaagaaaacctggcgatgggcggcttcttcaccgacaaggacgactaccaggtgcagatggacaaggtgctggaactcttcccgcgcctgaaggaacgctacgaacagcgcgccgggaccatgtccggcggcgaacagcagatgctcgccatcggccgcgcgctgatgagcaagccaaagctgttgctgctggacgaaccttcgctcggcctggcgccgatcatcatccagcagatcttcgagatcatcgagcagctgcgtcgcgaaggcgtcaccgtgttcctcgtcgagcagaacgccaaccaggcgttgaagctcgccgatcgcgcctacgtgctggagaacggccggatcgtcatgcacgacaccggcgccgccctgctgaccaacccgaaggtgcgcgacgcctacctcggcggctga

SEQ ID NO: 356883 - DNA, 531 bp, Pseudomonas aeruginosa
atggccaaacacgccccccaactgcccatcgaagtcgacagcgagaccggcgtctggaccaccgacgccctgccgatgctctacgtaccgcgacatttcttcgtcaacaaccacatgggcatcgaggaagtgctgggcgccgacgcctacgccgagatcctctacaaggccggctacaagtccgcctggcactggtgcgagaaggaagccgaatgtcacggcctggagggcgtggcggtgttcgagcattacatgaagcgcctgtcccagcgcggctggggcctgttcgagatcgagcggatcaacctcgaggaaggcaccgccgaggtccgcctgcggcactccgccttcgtctacgtctacggcaaggtcaatcgcaaggtcgattacatgttcaccggctggttcgccggcgccatggaccagatcctcgccgcccgcggcagcagcctgcgcaccgtggccgaacaggtctacagcggcgccgaggacggtcacgaagacggcctgttcgtcgtcaaacccctgtaa

SEQ ID NO: 356884 - DNA, 759 bp, Pseudomonas aeruginosa
atggcgctggaggaacaggccgctgtcgcgcagcagcggttccagggcccagcccaggtggcattcctcggagtagccgaggaacgacagcgcttcggtctgcaggcggtcgaggttgaacagcggctggccggcggcgtccggcgcgcagaccgccaccagttgttcgtgaccaagctccaggcgctggaactcggcttcgctgtcgatgcccaggcggcgcgacaccgcctcaccttcgtcgagcaacgccaccacgtagtccaccgagccgtcgcgcaggcgcgacaggcattgcggcaggtaatcgcagtcgacgctgaacttggcgctgcggaagtccgcctgcagacgcggaatccagtgcgggaaaaacaccgaggagaggatgtgcggggcgcagaaacggattcgccgctgggcgtcttcgtcgcgctcgcggatcgactggcgcaggttgtccagggcgcgcaccgcgtcctgcgccacgccttgcaactggcggccggcctcggtcagttcgagggcgtgcttgtggcgctcgaacaccggcgcgccaagccactgttccagggtctggatacgccggctgagcccggacacggagacatggcactcctgcgccgcacggctgaagctcttgatccgacagaggacgaggaagtccttgagcatcaccaggtcgatcatcgttgcgcgttcctcaacggtcgggcgttttcagtctacttcgcgcggcggtgcctgttgcaaggctaa

SEQ ID NO: 356885 - DNA, 651 bp, Pseudomonas aeruginosa
atggacataggtcagttgaccggtcagcttcgccgggatgtccacccgacgcaccggcttgccgaccaggcggtactcgctgcgcggcttgagcggcgccttgccgtcgatgttcaggttgaagcgctggcctcgcagcaactcgccgtagccgatccgtcgctgcggattggcggcggcgaagacctggccgttttcgctgcgcaggctgtccggatgcaccgggaaatggcttccggcctggcgcaggaggaagcgccgggcttcggcggcggcctggcgcagaggcacggcgctgacctggatgctggcgctggcgatggtcggcccctggtccggtgtgcgacgggtgtcgccgaggatcatctcgacctgctcgaacgcgacgtccaactcttcggcgacgatctgcgccagtgccgtgcggatgccggtaccaaggtcgacgtggccgcagaaggcggtgaccttgccgtccgcggcaatggcgatgaacgagtcgacctggtccagcggcaggtcggtggcgccctgctcggcaagggcgagcagcggggcgggcaggttgacggtgaccagcagcaggccgccggccttgaggaagccgcgtcgcgagggattggccaggctcatgccgggtgctcctcttga

SEQ ID NO: 356886 - DNA, 777 bp, Pseudomonas aeruginosa
ttggcgggtggcgcagagggtggcgacgccgttgcaggtgaacagcgccttcggcccggggccgctggccgaaaggaaggcgcgcaggccgtcgcggaagaagtcgtcggtctgcaggacctggcccttgagcgccggtcgccggccgatggaggcattgaaggcctggacccgctcgatccgcgagctggtgccgtcgagcggttcggtgaccagcaggatgtcgcggaagccgcgttgttgaaggtggtcgagggcctgttcgacggcgtcggcgttgtccaggccgaccaggtcggtatccagctcggccaactggcggtccaccagcaccatcggcagttcgcggtgcagggcgcgcagttcgccgggatggtggccgagggtgttcacgatcagtccttcgacgttgtaggactgcagggcggccaggtgatgacgttcctgctcgtcgtcgcggtcggtattgcacaccaccaggctgtagccgtgttcgcggcaggcggtttccacgccatgcatgacggccacggagtaggggttgaggatgtccgccaccagcattccgatcagccgtgtgcgcccgcgcttgaggcctcgggccatctggttggggcggtagtcgagctggtcgatggcgcgctcgatgcgccgggcggtggcatcggcgagcaactggcggtcgccgccgatatagcgcgacacgctggccttggagacgccggcggcctcggccacctggttgatggtgacgcggccacggctgggcagtactga

SEQ ID NO: 356887 - DNA, 1449 bp, Pseudomonas aeruginosa
atgccgcttgccagtcatctgcgttgcgtggcgctggcgctggggatctccaccgcgctgggctgcgcgaaccgcaaccaacccgcgccacgcgcggaaagtctcgaccctggcctgtcgagggtggcgggaacccgcggcgacgcgctgcccgcccagtggtggacgctctaccaggaccctgggctgaaccacctggtggccgccgcgctgcgccacaaccgcgacctggccgcagccgatgcccatgcccgcgcgctcctcggccatctgcgcggcgcacagggcgaacgctggccacggaccgaggtcggctatggctaccagtatgggcgcgacggcgacgaccagaccctcgccgaagccaccgacgaggagctgcgcagccagtggaaacacaccgcccgcctcgacctgtcctaccagttggacctgtggggcgaagtccgcgcccgcatcgccgcggcgaaggcggatgccgaagcggcgcaagcggcgcgcgacctgctcagggtcagcgtggccagccagaccaccctcgcctacgtccgcgcctgcgccctggcgcgacgggcagaggtacaacgccgatcggtcggcctgctcgacgcgagcctggcgctgagcgaacgccagctcgccgccggcctttccagcgagctgcagcgacgccggctgctggccttgcgcgagcggacccgcgccgcgctgccgatgctcgaggcgcggcggcgcgcggcactctacgaactggcgctgctcagcgggcgctcgccgcgccagttggacgctcctgccgcgacctgcgccggcataccgcaactgcgccgtgccctgcccaccggcgacggctggagcctgctggcgcgccgcccggacgtccgcgcggccgagcgccggctcgccgccgccgacgcccggcgcgcgctggccgaagccgagctgtacccgcgcatcagcttcgccgtcggcgccgaaacctccgcagtgaccctcgccggcctcggcggcagcggcgcgctggcctacgcggccggcccgctgctgagctggcgcttccccaaccgggaaagcgcgcgaggccgcctggacagcgcagcggcagagcgcgacgccgctctggcgcgcttcgacggagcggtgctcggcgccctgcgcgaggtcgagcgtgccttggcgctgtatgccggcgagcgccagcggcgtgccgacctccagcgtgccctcgacgagcagcgccacgcctaccggttggcgcgcagcaactatcgcgccggcgccctcgatgccctcgagctgctcgacagtcaacgcagcctggtcgccgaccgggcgcgcctggtcgacgccgagatgcgcgtcgccgagcgccaggtcgaactgttccgggctctcggcggcggctggcaagccgctcccagcccctcccaccaggaaaacggacaatga

SEQ ID NO: 356888 - DNA, 357 bp, Pseudomonas aeruginosa
atggcgcctgccgctgcgggtctgcagttcctggcgggggaaatcgaaacggtcgacccggtcgagctggaacatcacttccggccgcagcagcgagcgctgcggtcgtttcagatcttcgaggaagaattgctcgaaggcgacgtacatgaaggccggcttgtagtagtgatccggcgagtcggaaatcagcagtacctgcacctcgccgccgagtatctccgggtagagccggacgaccagcaggttggcgagcatagtgccgcccactccgcccccgacgatgacgattcgttgcatgacttctccttaaccctgaggaagccatgggtatatctagatgaaccgggggattag

SEQ ID NO: 356889 - DNA, 528 bp, Pseudomonas aeruginosa
atgcaggtcggcgtcgcggtgggcggcggcgatgtcggcatcgtagacctcgtccagccagtagttcgcggtgaccttgccggatacgttgaggatcagcccgccgagggaatagccctggttggcgttggcgcgcacccgccaatcctcgcgggaaaggtattcgttcatcgacgcggcgacgtccaccagggtcttgcgctcgcggcgcagccggccgtggcgttcgcggtagaccacgtaggcgcgcgccgtggggtagtggccggcctccatcagcacccgttcgaccaggtcctggacccgttcgatatccaggcaggcgcgttccggcaggcgttccaccacgcgttcggcgagcgcctgcgcctgctgcgggtcgaactcgccggtggcctggccggcggcggcgatggcgcgttcgatcttgccgggatcgaaggggacttcacgtccgttgcgcttgagcagggtggccggccaggtagccttccggggctgggtcattttaatttctccacaacatga

SEQ ID NO: 356890 - DNA, 183 bp, Pseudomonas aeruginosa
atggccagcaccaccgaggtggtgaacagcgccagggcgatcgccagcttgccgttctggcggtccagcaggccgccctcgatgctgccgaagccgagtatcagcaacgacaccaggatgaccgcgatgattccgatccccgagatcggactgctcgacgaaccgaccaggccggccatgtag

SEQ ID NO: 356891 - DNA, 390 bp, Pseudomonas aeruginosa
atgtccggcgcggcggcaccgaggaagtggctgaagaccacgaacagcgagaccagcagtatcccggcgatcagcaggatccacttggccggcatgtccagctcggtgcgcaggctgctcgcctggctattgccgcgcactgccccgagggaggcccagacgccccgcaccatcggcttgaatagggtcgccagggtccacagcgcggccacgccgatggtgccggcgccgaggaagcgcacctgcgaactccacagttgggtggccaggtccgacaggctctggccgtcggccggcacgctgttgacggtcagcaacggcaccgcgacgccccaggagatcaccacgccgatgaggatcgcgatgccggcggtgatgcccatcaggtag

SEQ ID NO: 356892 - DNA, 1002 bp, Pseudomonas aeruginosa
atgtggaaccgcctgtggataaggtgcgaaaaacgcttcgcgcagcgcatcgtgcctggccttgcgacggttgatcagttcctgaccaggcgcacggcgagcggaccaggtggcatcgacaaggctcggaggcggtcttcgcctcggttacactgcacgccggtttccccaggtctcgctcgtcgtccacatgcccagtcaagcatcctccccttccccccaggtcgccatcgtcggcggcggtcccgcaggcctgatggccgcagaggtcctgagccaggcgggcgtacgcacggaagtgttcgacgccatgccctcggtcggccggaaattcctcctagcgggcgtcggcggcatgaacatcacccatgccgaggccagggaacaattcctcggccgctatggcaggcgccagaaggaaatcgccgcactgctcggcgaattcgacgcggatgcgttgcgcgcctggatccacggcctgggtatcgacaccttcgtcggcagttccggccgggtgttcccctccgacatgaaggccgcgccgttgctccgtgcctggctcaagcgcctgcgcgagcaaggcgtgctcatccacacccgctgccgttggctgggctggaacgcggacggtacgctggacatccagagcgccgccgagcgcctgtcgatacgcgccgacgccgtgatcctggcgctcggtggcggcagttggcagcgcctgggctccgacggcgcctgggtgcccctgctgcgggcccgcggcgtcgaggtcgagcccctgcggccaagcaattgcggtttcgagatcggcggctggagcgagctgtttcgcgacaagttctccggcgctccggtcaaaccggtggccatgggactggcgggcgaaacgccgcgccagggcgaattcgtcgtgacccgcgacggtatcgagggcagcctggtctatgccctctccgccgccatccgcgaacggatcgaggcctgtctcttatacacatctga

SEQ ID NO: 356893 - DNA, 540 bp, Pseudomonas aeruginosa
atgcaacaggtcatcgcggtgagcctctgcgccacccacgcgttcagcaagcaagtgcgtcccgccatccgcctcctgaaaggcctcggcgtcgagggcgacgcccaccacggcgtcaccgtgaagcaccgctcgcgggtgcggcaggacccgacccagccgaacctgcgccaggtccacctgatccacgaggaactgcacgacgagctacgcgccagcggcttcgccatcggcccagggaccatgggcgagaacatcaccacccgtggcgtcgacctgctcggcctgcccaccggcacccgcctgcgcctgggggaaagcgccctggtcgagctgaccggcctgcgcaatccctgctcgcagctggacaactaccagcccggactgaccgccgccgtgctcggccgcgacgaacagggcaacctgattcgcaaggccggggtgatggcgatcgtcctggaagacggcgaggttcgccccggcgacgccatcgatatccagctgccacccttgccgcaccgggccctggagaaggtctga

SEQ ID NO: 356894 - DNA, 1212 bp, Pseudomonas aeruginosa
atgactcaggactgggatgccgggcgtctcgacagcgacctggaaggcgcggccttcgacaccctggcggttcgcgccgggcaacggcggacgccggagggcgagcacggcgaggcgctgttcaccacctccagctacgtcttccgcaccgccgccgacgcggccgcgcggttcgccggcgaagtgccgggcaacgtctattcgcgctacaccaaccccacggtacgcaccttcgaggagcgcatcgccgccctcgaaggagccgagcaggcggtggccacggcgtcgggcatgtcggcgatcctcgccctggtgatgagcctgtgcagctccggcgaccacgtgctggtctcgcgcagcgtgttcggctcgaccatcagcctgttcgacaagtacttcaagcgcttcggcatccaggtcgactatccgccgttgagcgatctcgcggcctgggaggcggcgtgcaagccgaataccaagctgttcttcgtcgagtcgccatccaacccgctggccgagctggtggatatcgccgcgctggccgaggtcgcccacgccaagggcgcgctgctggcggtggacaactgcttctgcacgccggcgctgcaacagccgttgaagctcggtgcggacgtggtgatccactccgcgaccaagtacatcgacggccagggccggggcatgggcggggtggtcgccggtcgcggcgagcagatgaaggaagtggtcggctttctccgcaccgccggaccgaccctcagcccgttcaacgcctggctgttcctcaagggcctggaaaccctgcgtatccgcatgcaggcgcacagcgccagtgccctggctctggccgaatggctggagcaccagccgggcatcgagcgggtctactacgcgggcctgcagagccatcctcagcatgagttggctcggcgccagcagagtggcttcggcgcggtcgtcagcttcgacgtgaagggcgggcgcgatgccgcctggcgcttcatcgacgccacccggatggtctcgatcaccaccaacctgggcgacaccaagaccaccatcgcccacccggcgaccacctcccacggtcggctgtcccccgaggaccgcgcgcgcgccgggatcggcgacagcctgatccgggtcgcggtcggcctggaagacctcgacgacctcaaggccgacatggcccgggggctggccgcgctgtga

SEQ ID NO: 356895 - DNA, 4953 bp, Pseudomonas aeruginosa
atgggcgaggtcgccgatctcgccgatctcggccatccgcgcaccgcccttgagggtatgcaggtcgcgctgcaaggcttccagttcgatggtgttgtcgacgtcgtcgatccagcgctgcaacgcggcggcagcgctgtcgaggatatcgaagccttcctcgaggaagatctccaccagttcgggatcgcgctcttcgaacgcctccgcagcgggcggctgcgtcgcggcaggcgcggcgggcacctcgacggccggtgcaacgagttcctcgacggggctttccgcctcgcccggtgtcgcggcctcggccagagggccctggcggaaccggcggatcgcctggataaggtcgtgcgggtcggccaggggctggccggcgctcaactggtcgagctgttcggccaggcggtcgtgacaggcttgcagcaatccggccagttgcggggagtgctggtaacggcggtcgaccagtccttcgtagagggcctccagctcgtgggccaggtcgccgatctcggcgatctcggccattcgtgcgccgcccttgagggtgtgcaggtcgcgctgcagggcgctgagcgaagacagcgcgcccggctcggcctgccattgggccagtgcctggccggcgctttcgaggatgtccaccgcctcttcgaggaagatcgacaccatttcctcgtccagctcgcggccgggagccggtgcaggcgctgccggtacggtctcctcggcaggcgtcccggcctcttcgaagaccgcctcggggagggccagctcttcgtcttccggggggaaatcgtcggcgccgaggctctccgggtcgatgaacggaacggcctcggcggcgggcgcttccaacagttcctgcagggccgcgacccgctccggacgcggcgtgacctgcaggccggcggcgacctggtccatcatcccgatcagcgcctcatgggcctggcgggcttcctcgaagaacgccgggctgaccgccaggcggccttcctcgacggcatcgtagagcgccagcaaggcctggcagagttcttccacctgcggcagctcggcatgccgggcgccctggtccagagcgctgagttcctcgcgcagcgcgctcagctcctggcgctcctgcggatgctcgtgccagcgctcgagcaagtcctcggcgtccagcaggatgtccatgccttcgacgaggaacgcctcgatcagcaacggatcgcggcgctcgccggcatcgctgtagcgctcggcctcgagcgaggcgatgcgctcctggtgcagtgcctcgatacgctccagcagcgcatcgctgccggggatcgggttcaacggccggtgcgcaccgacctgttccaggccgatgcggaacagttgctcggcgtcatgcagcaactcggcttcgcgcaggtcgaaggcgagcaggttggacttgtattccttgaccagtttttccagcggcgtggcgatctccgcgatcggcaggatgccggccatgtgcgcgctacccttgagggtatgcagggcacgctgcaaggcatcggtgaccggctgcggcagttcgcgggcgcagtcggcgaggaagccgaccagggcctcgagatgggtctccgcctcgttggtgaagatctccagcagttgcggatcgagcagttcgacgtcgctctgcgcctcggcagcggcctgcggcgcgtcggccaatggcggcgcctggacgccgttctcctggctcgacggctgctccgccccggcttccggcggtactccgccgtcgtccggcgccggcggttccggcagcggctcgcccttggccagggcatgcgcggtggccgccagcaggtcgacatcgtcgcgctgacgctgggcattggcggcgaactcctcgaccagctccggcaacagggccacgacctggtccactactcgctgcaccggctcgctggcggcgatgctgcgatcgagcacgcggttgaacaggttctctatcgaccaggccagttcgccgatcaccagggcacggaccatccgtccgctgcccttgagggtatggaaggcacggcgtacctcggtcagcgcgtcgcggtcgtcgtggtcggctttccaggccggcaggtagcggccgagggtctccaggacctcgccggcctcctcgatgaagacctcgcgcagttcctcgtccaccggctcctcgtcggccggcggcggcagcaggctgaccggaacgttctgcgccggcgggttgatcggctgcaccggcgcagccatcacctcggccagagacagggccggcgctgcgctggcgagcgcctcggcggcaggcggcgcctcggcctcgggcaattgcacctcggggagatcgaggtcggaaagatccagttcctccaggctcgagccctcccaggcggacacctcgccctccgcctccggcaaggctacatccagcggcagcggatcgagcgcatcgagaaccagctcctgttcagcggagccgtcgaaaggctccagcgccggcaacggctcgaggctttccagcggcgcgtcgaaggacagcgccggctcctccaggctcagatccaacgtctcgtcggcctgcgccggctgcgccaggtcatcgccgagcccccactgctccggcagcgaccagtccgccagggccgccggcccggaggccggggccgcatcggcgggcaggtcgaggccggagagatcgatctcgtcgaggctgaaatcgtccaggctgcgggcaggcgccggggtcgactgcggctggccgctctcctcgaccacctccggcaacgccggcggcacttcggcggaatcgtccagcggcaggtccagggccaggtcgagggacggctcgccggcgtcgggcgcgacttcgccaagggtccagttgtcgtcgctggccagcagcggggcatcttccctcgccgcctctgcaggagccgtgtcggcgggcggttgctccgctgtctcggcgacctcgacgaccgcctccggcctctccggctcggcagccggggactcgatggcagcgggcccggacaggccgtgctcgaccggagtcgacgaattcggtttcagcgtatagccgaggttcgccaggctgtcctcggcgacgtcgaggatcaggtcgctctggctggcatggtcctcgctcaggcgctccaggtaatactcgacgctggtgatggcatcggccagggtatccaggctctgccagtccggcaccgccttgcgcgccagcagctgttcctggatatagcggttgcaggtttccagcagggtcgcggcgcgctccagcgggatcatcgccaggccgccgcggacctgggtcagcagctccggcacgcgggccaggtgctcgtggttccactgcgaggcgatgaactcgatgatcgcgtccttggcctgctccagaccgttgcgcgcttccttgatcaccaactggtggatctgcgccacatcggtggtgggcaggcggctttcctcgctgttgcgctcatcgccgggaccggccatgccggccagggtggcctcgacgtagagcaacgcgccggcgacgtccatcaggatcgcgtcgctcggctcgcggcggccctgggccagggcgtggatgacgtccaactggtcgaggatgaccttgcgcggttggccgaagccgagtaccgccagggtatcggcgatctgcttgagcggcgccaggagggcgtccagttccgaggggtggccacggtcgctgcgcacgaacaggtcgaggctgtccttgatccgcaccagttcctcgcacaacgcaccgaccaccgaacgcatcgcgtcgcggtcgggtccggcgaggcgggcgcgctcggcatccaccgtctcgtggtcgggcagcgcctcgtcgaggcggtactgttccttcagtgcgcggattcgcggcgactgcgaaggcgccttggccacgtagaacagcaggttcttcaccagctcgtccggcgcggcctggttcaggccgtcggcgccctgctcgaccaggcgcttgagttcgcggtcgagctggcgcagcagggtgcgcaccgaggcgctgttgaccacgctaccgttggccaggccctcgaccaggccggaagcgatgctccacagcggccccagcggtgcctcgcggcacaggccctccaggcgcgcatagacacgcgccaggtagccgaggctggtggccacgtcctggttgcgcagcaggccgaccagggccatctgctgggtctggcgcagcttgcgcagcaagccgccgagttcgtcggtgcgcagttgcgcgatggcctcgccgtccagttgcggctggcgctgcgacaggtcgggcgcgaacaggctggtttccgagagcagcttctcgccgcgcgcggcgcgcaggtcgttgagcagcggcaggaccaccatcggcaggtcgcgccgggcggtctggatccggtcgaggtagaccggcagttgcaggatcgcctgcatcagcacttccagggcctcgccctggttcggcacgcgaccgtccagcaaggcctggaccaactgctccatttcctcggcgagcagggccgcgccgtagaactcgaccatctgcagggtgccctgcacctggtgcacgtaggtcaggcagaaccgcatgcgggtcgggtcctgcgggttctcgacgaacgcttccagcgcctggcgcgcctgtttcagggtttcggcgatctcgcctttcacccattccagagcgacgtagtcgtgccggtcacccatagccactccattcatgtgcctgagtaccccttacgggtaaaggccaggacccgctcgtcggcgaccggctcgagctccggatggctccagtcgaccacttcgccgaccccgatcaccagcaagcctcccggcgccagccgttcggccaaccggttgaggatctcgcgccgtcgccagcgacggaagtag

SEQ ID NO: 356896 - DNA, 693 bp, Pseudomonas aeruginosa
atgggcggcgcgcgccgactggcggatgtcggtgatgttgggggtgagcttgacgatcaccggcagcgagcagtgggtcttgcaccagcgggtgaccatctccacgtactccggtacctggcctaccgccgcgcccatgccgcgctcgggcatgccgtggggacaaccgaagttcagctcgatgccgtcggcgccggtggcttccaccagcggcaggatgtatttccacgactcctcgacgcagggcaccatcagcgacacgatcagcgcgcggtctggccagtccttcttcacctgggcgatctcgcgcaggttgatctccagcgagcggtcggtgatcagctcgatgttgttgatcccctgcacctggcggttcggtccgaagtgcgcggaataacgcgacgacacgttgaccgccgcggggtcttcgccgagggtcttccagaccaccccgccccagcccgcctggtaggcgcggaccacgttgtaggccttgtcggtgggcggcgcggaggccagccagaaggggttgggcgacttgatgccggcgaattcgatagacaggtcggccatcacgcagcctccacgttgagcatgagttgggcgtggatcgcttccgccgccagtttgccgtgctgcaccgcctgcacggtgaggtcctcgccgagcgccacgcagtcgccgccggcgtag

SEQ ID NO: 356897 - DNA, 1206 bp, Pseudomonas aeruginosa
atgctcgatgcctatatctacgccggcctgcgtacgcctttcggccggcatgccggcgcactctcgacggtgcgtccggatgacctggccggcctgctgctggcgcgcctcgcggaaacctccgggttcgccgtcgacgacctggaggatgtgatcctcggttgcaccaaccaggccggcgaagacagccgcaacctggcgcgcaacgcgctgctcgcagccggcctgccggcgcggctgcctgggcagacggtcaaccgcttgtgtgccagcggactgtcggcggtgatcgacgcggcgcacgcgatcagttgcggcgagggccggctgtacctggccggcggcgccgaaagcatgtcccgggcgccgttcgtcatgggcaaggcggagagcgccttcagccgcacgctggaggtcttcgacagcaccatcggcgcgcgcttcgccaaccccaggctggtcgagcgctatggcaacgacagcatgccggagaccggcgacaacgtggcccgcgccttcggcatcgcccgcgaggacgccgaccgtttcgccgcttcttcccaggcgcgctaccaggctgcgctggaggagggctttttcctcggcgagatccttccggtggaggtgcgtgccggacgcaagggcgagacgcggctggtggagcgcgacgagcatccgcggccgcaggccgacctggcggccctggcgcgcttgccggcgttgttcgccggcggggtagtgaccgccggcaacgcgtcggggatcaacgacggggcggcggtagtgctgctgggcgaccgcgcgatcggcgagcgcgagggcatccggccgctggcgcggatcctcgccagcgccagcgtcggcgtcgagccccggttgatgggcatcggcccgcagcaggcgatcctccgcgcgctgcaacgcgccggcatcgacctggacgaggtcggcctgatcgagatcaacgaagccttcgcgccgcaggtcctggcctgcctgaagttgctcggcctggactacgaggacccgcgggtcaatccccatggcggcgccattgccctcggccatccgctcggcgcctccggtgcgcgcctggtgctcaccgccgcccgcgggctgcaacgcatcgagcggcgctacgcggtggtcagcctgtgcgtcgggctcggccagggcgtggcgatggtgatcgagcgctgccgatga

SEQ ID NO: 356898 - DNA, 1251 bp, Pseudomonas aeruginosa
atgaacaacaacaagaaatgcgcgtttttcctgctgccgatccttgccggcgatagcgttcccgccctggccgagggcttcctcgaagactcgcgggccagcctggccttgcgcaacttctacatgaaccgcgacttccgcgatggcgtggggcgtgcgaaaagcgaggagtgggcccagggctttctcttcgactaccgctcgggctataccgagggcaccctcggcgtgggtctcgacctgctgggcaagctcggcgtccggctcgattccggcgcggggcgtagcggcaccggcctgcttcctcttcgcgacgatggcagcgcggcgggcgactacgcgcggctggacgcgaccgccaagctgcgcctgtcgcgcagcgagctgaaggtcggcggcctggtgccgaagctaccgaccatccagcccaactacgggcggctattcccccaggtgttccagggcgcgctgctgacttccggcgaactgagcggactgagcctgaacctgggacggctgaccgaggtcagccagcgcaacgaggcgggcaccagcgacctggcgctgttcaaccgcaaccggcgtttcgccggcgcggcgcaggcggaccgtttcgacctggctggcctggactaccgtatcgccccggactggaccggcagctaccactatggcgaactggagcaggtctacgcccagcatttcctcggtctcaaggggcgcatcggcgtcgccgcggatagcctggagagcgacttgcgcctggcgctcagccgggataccggcggcgctcgcggcgggcgcatcgacaaccgttccttcagcgggtcgctcacctaccgcctgcgcaacggccaggccttcggcctgggctaccagcggatgagcggcgaccacggcttcccctacctggaggggaccgatccgtacctggtcaatttcggccagtacaacgacttcgccgaggctggcgagtcctcctggcaactgcgctacgactgcgacttcgcgccgctcggggtgcccggcctgagtctgatgacgcgctatttcagcggccacggcgcgaaacctaagggcgtcgacggcagtcgcgagtgggaacgcgacagcgacctgcgctacgtgttgcagggcggtccgctgaagggactggggctggtctggcgcaacgctacctaccgttcggccttcagccgcgacatcgacgagaaccgcctgtacctgacctatgagctgccgctgttctga

SEQ ID NO: 356899 - DNA, 921 bp, Pseudomonas aeruginosa
atgctcgaacttcgccacctcaagaccctgcacgcgctgcgcgaagccgacagcctggtggaagccgccgagcgcctgcaccttacccagtcggcgctgtcgcaccagttcaaggaactggaagagcgcctgggcatgcagttgttcgtgcgcaagaccaagccggtacgcttcaccagcgccgggctgcgcctgctgcaactggccgactcgctgctgccccaactgcgcaccgccgagcgcgacctggcgcggctcgccggcggtaccgccggacgcctgcacatggccatcgaatgccacagttgcttccagtggctgatgccgaccatcgaccagttccgcgacgcctggccggaagtcgaactggacctggcctcgggcttctccttcgcgccgctgccggccctggcccgcggtgacctcgacctggtggtgaccgccgacccggtcgagttgcccggcatcacctacgtgccactgttcacctacgaagcgctgctggcggtggccaaccagcatgccctggctggccggccgtacgtcgtcccggaggatctggagcgggaaaccctgatcacctatccggtggaacgcgaccgtctcgacgtcttcacccgcttcctcgaccccgccgacgtggagccggcgcaggtgcgcatagccgagctgaccgtgatgatgatgcaactggtggcctccggtcgcggcgtctgctgcctgccgaactgggccctgcacgagtacagctcgcgcggctacgtgacggcccggcgcctcggtgaaaagggcctgtactgcacgctcttcgccgccatccgcacggacatgttcgatgcgccattcatgcgcgacttcctgctcaccgccaaggacacctccttcgccaccctcgaaggggtcagcgccgccaagggctga

SEQ ID NO: 356900 - DNA, 987 bp, Pseudomonas aeruginosa
atgcgtgctttcatcttcctggccgccttgttgtgcagcctctcctcctttgcggcggcgcgttgcgacgcacgcgtacctaccgagacggtcgaactgggcgacgtgcgcctggcctaccagagcatcggccgcgacagcgatccggccctgctgctggtgatgggcctgggcgggcaactgatccactggccggacgaggtggtcagcgccctgtgcgagcaaggcttccgggtgatccgctacgacaaccgcgacgtcggcctgtcggcctggaacgtgccggtgcccagttcgcggctgacctacgaagtggtgcgttatcgcctcggcctgccggtcagcgcgccctataccctcaccgacatggccggcgatgccctgcatctgctcgacgcgctggatatcccccaggcccatgtgctcggcgccagcatgggcgggatgatcgcccagcacatcgccgacatggcgccgcagcgcctgctcagcctgaccctggtgatgaccagctccggcgccgaaggcctgccggcgcccagcgagtcgctgctgcgcctgctggcgcggcgcgaggcggccagccgcgagcaggcggtcgagcagcaggccgacctgctggcggcgctgggcagcccggaagtgcgcgacgatcgccagcagctcctgttgcaggccgcacgttcctacgaccgcgcgttcaacccggaaggcgtgcagcggcaattgctggcgatcctcgccgaacccagccgggtgccgctgctgaaccgtctgcaggtgccgaccctggtgatccatggcaccgccgatccgctgctgccggtgatgcacggcgtgcacgtggcggcgcatatccgtggctcggagctgaagctgatccccggtctcgcccatcgcttccaggaagccttcaaggagccgttgctggcggcggtggtgccttacctgaaggcccatcggcaggccagcgtcgtccagctctga

SEQ ID NO: 356901 - DNA, 330 bp, Pseudomonas aeruginosa; identical to SEQ ID NO: 318736

SEQ ID NO: 356902 - DNA, 1539 bp, Pseudomonas aeruginosa
atgagtcaagcgcacaccccctccgctccactcgccgaagtctacgatgtcgccgtggtcggcggtggcatcaacggtgtagggatcgccgccgacgcagccgggcgcggcctgtccgtgttcctttgcgaacagcacgacctggcccagcacacctcctcggccagcagcaagctgatccacggcggcctgcgctacctcgaacactacgaattccgcctggtccgcgaagccctggccgagcgcgaggtcctgctggccaaggcgccgcacatcgtcaagccgctgcgcttcgtcctgccgcaccgtccgcacctgcgcccggcctggatgatccgtgccggcctgttcctctacgatcacctcggcaagcgcgagaagctgcccgcctcgcgcggcctgcgcttcaccggcagcagcccgctgaaggccgagatccgccgtggcttcgagtactccgactgcgcggtggacgatgcgcgcctggtggtgctcaacgcgatctccgcccgcgagcacggcgcccacgtccatacccgcacccgctgcgtcagcgcccgtcgcagcaagggactctggcacctgcacctggagcgcagcgacggcagcctgtattcgatccgcgcccgcgccctggtgaacgcagccggcccctgggtagcgcgcttcatccaggacgacctgaaacagaagtcgccctacggtatccgcctgatccagggcagccacatcatcgtgccgaagctgtacgaaggcgagcacgcctacatcctgcagaacgaagaccgccgcatcgtcttcgccatcccctatctggaccgcttcaccatgatcggcaccaccgatcgcgagtaccagggcgacccggccaaggtggcgatcagcgaagaggaaaccgcctacctgctgcaagtggtgaacgcccatttcaagcagcaactcgcggccgccgacatcctgcacagcttcgccggcgtgcgtccgctgtgcgacgacgagtccgacgagccttcggcgatcacccgcgattacaccctgtcgctctccgccggcaacggcgagccgccgctgctctcggtgttcggcggcaagctgaccacctaccgcaagctggccgaatcggcgctgacgcagctccagccgttcttcgccaatctcggcccggcctggaccgccaaggcaccgctgccgggcggcgagcagatgcagagcgtcgaggcgctcaccgagcaactggccaaccgctacgcctggctcgaccgcgaactggcgctgcgctgggcgcgcacctacggcacccgggtatggcgcctgctggacggggtcaatggcgaagccgatctcggcgagcacctgggcggcggcctgtatgcccgcgaagtggactacctgtgcaagcacgagtgggcccaggacgccgaggacatcctctggcgccgcagcaagctcggcctgttcctctcgccgagccagcaggtgcgcctcggccagtacctgcagagcgagcatccgcatcgcccgcgggtgcatgcggcctga

SEQ ID NO: 356903 - DNA, 756 bp, Pseudomonas aeruginosa
atgaacctgcccccccgacagcaaagcatcatcgaggaggtccgcgagcgcggttacctgagcatcgaggagatggcgcagatgttcgcggtcaccccgcagaccatccgccgcgacatcaaccagctcgccgaacagggactgctgcgccgctaccacggcggtgcggcctacgattcgagcatcgagaacaccgcctacaccatgcgcgccgaccagatgcgcgacgagaagcagcgcatcgccgaagccgtggccagcctggtgccggacaacgcctcgctgttcatcaacatcggcaccaccaccgaggccatcgcccgcgccctgctcaaccaccgtaacctgaagatcatcaccaacaacctgcacgtggccgccaccctcagcgccaaggaagacttcgaagtgctggtcgccggcggcaccgtacgcagcgacggcggcatcgtcggccaggccgcggtggacttcatccagcagttccgcgtcgacttcgccctggtcggcatcagcggcatcgacgaggatggcagcctgctcgacttcgactaccaggaggtgcgcgtatcccaggcgatcatcgacaacgcgcggcaagtgttcctggccgccgactcgagcaagttcgggcgcaacgcggtggtccgcctgggcccgatctcgctggtcaaccgggtcatcagcgacagcccgccgcccgccgccatcgcccgcctgatggcacagcacaaggttcacctggacctggtctga

SEQ ID NO: 356904 - DNA, 1518 bp, Pseudomonas aeruginosa
atgaccgacaagcacaacaagaaatacgtcgtcgccctggaccagggcaccaccagctcccgcgccatcgtcttcgaccgcgatgccaacgtggtcagccaggcccagcgcgagttcgcccagttctatccgcaggccggctgggtcgaacacgatccgatggaaatctgggccacgcagagttcgaccctggtcgaggccctcgcccaggccagcatcgagcacgaccaggtggccgccatcggcatcaccaaccagcgcgagaccacggtggtctgggaccgtcacagcggtcggccgatccacaacgccatcgtctggcagtgccggcgcagcgcggcgatctgcgcgcagctcaagcgcgacgggctggaagactacatccgcgaaaccaccggtctggtcaccgacccgtacttttccgggaccaagctgaagtggatcctcgacaacgtcgaaggcgcccgcgaacgcgcgcgcaacggcgacctgttgttcggcaccatcgacacctggctgatctggaagctcaccgaaggcaaggtccacgtcaccgactacaccaatgcctcgcggaccatgctgttcaacatccacagcctcgactgggacgcgcggatgctcgaggtgctcgacattccccgctcgatgctgcccgaggtgcgcaactcttcggaggtctacggcaacgcccggatcggcggggtcggcggcggcgagctgccgatcgccgggatcgccggcgaccagcaggccgccctgttcggccagatgtgcgtggaaccgggccaggcgaagaacacctacggcaccggctgcttcctgctgatgcacaccggcgacaaggcggtgaagtccacccatggcctgctcaccaccatcgcctgcggcccgcgcggcgaggtcggctacgccctggagggcgcggtgttcaacggcggctccacggtgcagtggttgcgcgacgaactgaaggtgatcaacgactccttcgattccgaatacttcgccaccaaggtcaaggacagcaatggcgtctacctggtaccggccttcaccggactcggcgcgccctattgggacccctatgcgcgcggcgcagtgttcggcctgacccgtggagtcaaggccgaccacctgatccgcgccaccctggagtccatcgcctaccagacccgcgacgtgctcgacgccatgcagcgcgatgccggcgaacgcctgcgcgctctgcgcgtcgacggcggggcggtggccaacaacttcctcatgcagttccaggccgacatcctcggcacccgcgtggaacgtccggtgatgcgcgagaccaccgccctcggcgccgcctacctggccggcctggcctgcggcttctggagcagcctcgacgagctgaagagcaaggcggtgatcgagcgggtgttcgagccggagtgcgacgagccccggcgcgaaaagctctatgccggctggaagaaagcagtggagcgcactcgcggctgggacgacggcgaactgtga

SEQ ID NO: 356905 - DNA, 840 bp, Pseudomonas aeruginosa
atgaccaccgccgccccgaccccgtccctgtttggccaatgcctggccgagttcctcggcaccgccctcctcatcttcttcggcaccggttgcgtcgcggccctgaaggtcgccggcgccagcttcggcctgtgggaaatcagcatcatctggggggtcggcgtgagcatggcgatctacctcagcgccggcgtctccggcgcccacctgaacccggcggtgagcatcgcgctgtggctgttcgccggcttcgaggggcgcaagctgccgttctacatcaccgcccaggtggccggtgcgttctgcgccgcagcgctggtctacaccctctacagcagcctgttcatcgagttcgaacaggcgcagaacatcgtccgcggcagccaggacagcctggccctggcctcggtgttctccacctatccgcacccggcgctgtcggtcggccaggcgttcctcgtcgaagtggtgatcacggccatcctcatggcggtgatcatggctcttaccgacgacggcaacggcctgccgcgcggtccgttggcgccgctgctgatcggcctgctgatcgccgtgatcggcagcgccatgggcccgctgaccggtttcgcgatgaacccggcgcgcgacttcggccccaagctgatgacctacctggccggctgggggcacatcgccttcaccggcggccgcgagattccctacttcctggtgccgatcttcgccccgatcctcggtgcctgcctcggcgccggcggctatcgtgtactgatcgcgcgccatctgccgagcgccgcggcgcccgccgaagccgagccggagaaggttcgcgcttcctga

SEQ ID NO: 356906 - DNA, 471 bp, Pseudomonas aeruginosa
atgacccctgccatcgacctgctgaaaaaggcccgcgccgagcacaaggtgctcagctacagccacgaccccaaggcaccttcctatggcctggaggccgcggaaaagctcggtctggacccgcagcgggtgttcaagacgctgctcgccgccacggagaagggcgagctgctggtggcggtggtgccggtgatcggcagtctcgacctgaaggccctggcccatgcggcgggggcgaagaaggccgacatggccgatccgcaggcggcgcagcgggccaccggctacctggtgggcgggatcagcccgctggggcagaagaagcgcctgcgtaccttcatcgatgaaagcgcgcggcagtacccgagcatccatgtcagcgcaggacggcgcgggctggaagtggagctggcggccgaggtgctggcccagctgacccagggttcgttcgccgccatcggccgcgaatga

SEQ ID NO: 356907 - DNA, 1485 bp, Pseudomonas aeruginosa
atgtcccactatctcctcgccatcgaccagggcaccaccagctcccgcgccatcgtgttcagtgcccagggcttgccggtggcgagctgccagcaggaattcaagcagtacttcccgaaggacggctgggtggagcacgacggcgaggaaatctggctgaccaccctccaggtctgtcgcgacgcgctcgcccgcaagggcttgcgcgcggccgacatcgccgccatcggcatcaccaaccagcgcgagaccacgctggtctgggacgccgccagcggcgacctgatccacccggccatcgtctggcaggatcgtcgtaccgccgactactgtgccgaactcaaggccgccggccacgaggcgaacgtcagcgcgcgcaccgggctgctgatcgatccgtatttctccgccaccaagctgcgctggatcctcgacaacgtgcccggtgcccgccagcgcgccgaacgcggcgagctgcgcttcggcaccgtcgactgcttcctgctctggcgcctgaccggcggccgctcccatcgcaccgacgcgaccaacgcttcgcgcaccctgctgttcaacatccacagccaggactgggacgaggaattgctggcgctgttcgagatcccgcgcagcctgctgccggaggtactcgactgcgcggcggagttcggcgtcagcgagccgtcgctgcttggcgcggcgatcccggtgctgggcatggccggcgaccagcaggccgcgctgatcggccaggcctgcttccagccgggcatggtgaagagcacctacggcaccggctgcttcatgatccagaacactggcgagcagccggtgatctcgaagaaccgcctgctcaccacggtcggctaccgtctggacggcaaggtcagctacgcggtggagggcagcatcttcgtcgccggcgccgcggtgcaatggctgcgcgacggcatcaagctgatcgaccacgcccacgagagcgaagccctggcgatccaggccggcgactccaacggcgtctacctggtgccggcctttaccggcctcggcgcgccctactgggacccgaaggcgcgcggcgcgatcttcggcctgacccgcgacaccggaatcaaggagatcgtcaccgccggtctgcaatcggtctgctaccagacccgcgacctgctcgaagcgatgcgccaggacggcacgccgcccagcgcgctgcgggtggacggcgggatggtggtgaacaactgggtgatgcagttcctcaccgacatccttggtgtcaccgtggagcgcccggaagtcaccgagaccaccgccctcggcgtggcctacatggccgggctgaaggccggcttctatcgcgatctggacgacatcgccagccactggcacctgcagcgccgcttcgccgcgcacatggccgaggagcgccgcggcgaactctacgccggctggcagaacgcggtgcgacgggtgcgcagcgaggcctga

SEQ ID NO: 356908 - DNA, 786 bp, Pseudomonas aeruginosa
atgcagctcgagttccaccaggtcgacgcgttttcttcccgtccgttcagcggcaatcccgccgtggtctatcgcctcgacgcctggctggcggacgagttgatgcagatgatcgcgaccgagcacaacctctccgagaccgccttcgtcgttcgcgaaggagaggcctggcggatccgctggttcaccccgagcgtcgaggtggcgctctgcggccacgccacactggctgcggcccacgtactgttcgaggtctatgacgagccgggcgagcgcctggaattcatctcgcgctccggtgcgctgcgggtcaaccgcgaggacgagcggctggtcctggatttccccgcgcagtatccgagcgaggtcggtagcaccgtcgagctggagcaggccttgggcctgccgccggtggacgtgctgggctccaccgacaagctgctggtactgctcgagtccgaagaggcggtgcgcgcctgtcgccccgacttcgcggccctggcgcggctgccctggcgtggagtgatcgtcaccgcgcggggcctgcagaaggatttcgtctcgcgcttcttcgccccggcgatgggcgtcgacgaagacccggtcaccggctccgcgcattgcagcctgattccctactgggcccagcgcttgaacaaactgtcgctgaccgcccagcagtgctcggcgcgcggcggcgagctgtggtgccggttggagggcgagcgggtgagtatcgccgggcatgcggtgctggtggcgagcggaaggattcgattgggctga

SEQ ID NO: 356909 - DNA, 168 bp, Pseudomonas aeruginosa
atggagttcatccgccggccggcctcgcggatggtcagcggaatggcggcggtcatctgcgtctcgatgaaccccggcgccaccgcgttgatggtgatgccgcgcttgcccagcgccggcgcccaggcctgggccaggccgatcaggccggccttgctcaccgcgtag

SEQ ID NO: 356910 - DNA, 1080 bp, Pseudomonas aeruginosa
atgcagcttgccgccgtcgagcagggcctgggtcagcacctgcggggcattgaggttgacgttgatcaccgagttccagaagtcgctgctcatcttcgccagggtcttgtcgcgagtgatcccggcgttgtgcacgacgatatcgacgccctcaggcagcgcgtccaccagttgctgcccggcgtccgcggcgcagatgtcgagagccacggcacggccgccgaggcgcgcggcgaggccttcgagggcctccctggccggcggcacgtcgagcagcaccacttctgcgccgtcgcgcgccagggtttccgcgatggccgcgccaatgccgcgggcggcgccggtgaccagcgcgcgctggccggccagcggcttgctccagtcgtggacctgggcgctgttggcggcaagacggatcacctggccggagacgtaggcgctcttcggcgagaggaagaagcgcagtgcgccttccagttggtcctcggcgcccttgccgacgtacagcaactgcacgttgccgccgcgacggatttccttgcccagggagcgggtgaaaccttccaggctgcgttgcacgctggcggcgaccgggtccttgagagactcgggggcgcgtccgaggaccaccaccttcgggcatgtgtcgaggcccttgagcaccggctggaagaagtcgcgcagcgccaccaactgctcgaagcgggtcaggccgctggcatcgaacagcaccgccttggcccgcgggctgtgttcggcggtccagcgcggcagctcgaactgtccctcgacggcggcgaacaccgcatcggtcagcttgccggcgaagggcagcacggcctcggccagcgcgccgctcccgccgatcaccagcgggccgtccaccggccgcacccggccggcctgccagcgctccaggcgcagcggggagggaaggccgacggcgccaaccaggcggcggccgacgggggagttggcgaaggcgatgtaacgatcggtcatggaacgggctcccggtggaaaggctccaaggctgaaggtggattccgccggccaacgatgccgagggaacgcgggtaa

SEQ ID NO: 356911 - DNA, 618 bp, Pseudomonas aeruginosa
gtgctggcttggttgggctgtcaggcgctggccgcgcacctggcccaccgggtcgacgcggacctctgcaacgacctgcgcctgcgcctgctggcgcacctgcaacggctgccgctggactggttcggtcgccagggcccggacggcgtggcgcgcctcgtggagcaggacgtgcgggccctgcaccaactgatcgcgcacgctcccaacgatctcagcaacctgttggtggtgccgctcgtcgcgttgctctggctggcctggctgcacccctggctgctgctgttctgcctgctgccgctggtgctggccgccgccggcttcctgctgctgcgctcggcgcgctaccgcgacctggtgctgcggcgcaacgccgcgctggaaaggctctcggcggactatggcgaattcgcccacaacctgctgctggcccgacagtaccccggcgccggcatacaacagggcgccgaggcgtcggcggcggccttcggcgaagcgttcggcgcctgggtgaagcgggtcggccacctcgccgcgctggtctacgtgcagttgtcgacgccctggctgctggcctgggtcctgctcggcgcgctggccgatgaaggaggtggatga

SEQ ID NO: 356912 - DNA, 639 bp, Pseudomonas aeruginosa
gtgccgcaggccgccatccggcccccggtgtggctgggctgcgaaaacgaggacgaccgccgcacgctcgccgaactgctgcatcgcctcggcgtcgagccggaaaccggcgaacgcccttccgccgcagcactctgcctgctggccgcctggggcgaggacctgagcagcgccgtgcagcgcttcgcctgtcccgccgagcgcagcgtcggcatcgacctgctctgcgacctcgagcgccggcgctgcctgatgctctcgccgctgactaccccggccatgcgcgacgccgcccacgcgctactggcttgcgacggcgccggggtcacgatgctgcgcgacagtcccggcttcgtcgtccagcgggtactggcgatgatcgtcaacctcgcctgcgacatcgcccagcagggcattgccagcgtcgaggatatcgaccaggcggtgcacctcggcctcggctatccccacggcccgctggaatggggcgaccgcctcggcccgcggcgcctgctgagcattctccagcgcctgcaggcgcttaccggtgacccgcgctaccggcccagtccctggctgcgccgacgagcgcaactgggcatgtccctgcgcgccggcgaaaccaccgccgtagactga

SEQ ID NO: 356913 - DNA, 753 bp, Pseudomonas aeruginosa
atgaccgtctatttcatcggcgccggtcccggcgaccccgacctgatcaccgtcaaggggcagcgcctgatccgccagtgcccggtgatcctctacgccggctcgctggttccgcaagcgctgctcgaggggcaccaggccggccaggtggtgaacaccgccgagctggacctcgaacagatcgtcgagctactcgcgcaagcccatcgccgcggcctcgacgtagcccgcgtgcattccggcgatccctccctgtacggcgccatcggcgagcagatccgccacctgcgcgaactcggcatcccctatgagatcgtccccggagtcaccgccaccgccgcctgtgccgccctgctcggctgcgagctgaccctgcccgaagtgtcccagacgctgatcctgacccgctacgccgcacgcacgaagatgccggaaggcgagagcctgggcgacctggcgcggcaccgggcgaccctggcgatccacctgggcgtcgcccacctggcgaagatcgtcgaggaactgctgccgcactacggcgccgactgcccggtcgcggtgatccaccgggccagttggcccgaccaggaacaggttcgcggcaccctcggcgacatcctgcccaaggtcgccgccaggaatttccgccgcaccgcgctgatcctggtcggcgaggtgctggccgccgaaggcttcgccgactcttcgctgtaccgcgccgagcatcgacatctctatcgacccggcgaatga

SEQ ID NO: 356914 - DNA, 585 bp, Pseudomonas aeruginosa
atgccgcgacaacttgccggcctgctgtgcgtcctcctcggcctcaccggcgcccctgccctcgcctgcccgttccgggccacggacgccgagacaccggcagcctctgccggcgccgcgcaggtcctggccctgggcggcaccggcagactgcaactcgacctgcaacgggcccccgccaccctgctgcacagcggcgacctgctgattgcccgctacgccgagggtcattacctcgcccaccgcctgctcgaaggcaacgagatgggcgcggacgagggcgaacggctcgaccttccgcgacaggttcgcctgctcttcggagccctgccgctggacggcctgcccgacgccgagcgcgagcgtctccaggcgcagcgccaggccctcggcttgtgcgaccggcgcgccagcgccagccgctaccgcgtggccggcaccgaggtctatcgcctgcgcggcagccaggccggcaagccctaccacgcgctctacctgctcgacggtccccaggtgcactacctcgacagctccggcagcgacgccttcatcgagcagttgctcgccagcctgcgacgccgctga

SEQ ID NO: 356915 - DNA, 1200 bp, Pseudomonas aeruginosa
ttgctggtggaggacggcaaggtcgctcgcctcggtgacgccgaagccctgctcggcgagatcggcgacgtcgaggtcttcgagtaccgcgacgcgctgatcacccccggcttcatcgatacccacatccatttcccgcagaccgggatgatcgcctcctacggcgaacaactgctggactggctgaacacctataccttccccaccgagcgccaattcggtgaccaggcccatgccgaccaggtcgccgagatcttcctgcaggaactgctgcgcaacggcaccaccaccgcgctggtcttcggcagcgtgcaccggcaatcggtggaatcgctgttcgaggccgcccggcgcctggacctgcgcctgatcgccggcaaggtgatgatggaccgcaacgcgccggactacctgaccgacaccgccgagagcagctaccgcgacagcaaggcgctgatcgagcgctggcacggccagggccgtctgctctacgcagtgaccccgcgcttcgccccgaccagcaccgcggaacagctggacatggcggcgcggctgctgcgcgagcatcccggcgtatacctgcacacccacctgtcggagaacctcaaggaaatcgagtgggtgaaggagctgttccccgagcgcagcggctacctggacgtctacgaccaccacggcctgctcgggccgcgctcggtgttcgcccatggcgtgcacctgtgcgacggcgaatgccagcgcctggcggagactggctcggcagtggcgttctgcccgacctccaacctgttcctcggcagcggtctgttcgacctgccgaagctggagcgctacaaggtcaaggtcggcctcggcaccgatgtcggcgccggcaccagcttctcccagttgcagtccctgaacgaggcgtacaaggtcatgcagttgcagggcgcccgcctcgatccgttcaagtcgctctacctcgccaccctcggcggcgcccgcgcgctggagctggacgaccggatcggcagcttcgccaccggcaacgaggcggacttcgtggtcctcgactaccacgccaccccgctgctctcctaccgcctgagccaggccggcagcctggccgaacggctgttcgcgctgaccatcctcggcgacgaccgcacggtgaaggaaaccttcgccgccggtcgctcggtgcatcgccgcgactga

SEQ ID NO: 356916 - DNA, 1230 bp, Pseudomonas aeruginosa
gtgttcggcgagggtcggcgccaggtcttcgctcttgaagtcgaagctggcgccgagggtgtgttcgtcgccacgcggcggtgcgacgtagccctcggcgcagaccacggtgcgcagcgcccggctttgcggggtggccggcaggcgggtgacctgcccgcgaatgcgcttcagcggcagctcggcggcgggcgggaagtcgcggatgtcggcggcggtggcgaggatcgcgagtggcgcgcgggccaggcattcgtcgccggcgtaggcgcaccagtcgtcgccctcgcggcgcaagcgtactgcccggccgctcagcagggtgatcccgggggtggcggccagggcctggcacagcgcgggcggatggacccagccggcttcgggatagaacaggccgccggcgggcagggcgacgccggcgaggcgctcggcctgctcgcggtccaggccgtgcagcaggtcggcggggaaggctgcggccagttgcgcctggcgttgcgcttccttggcgtcgaaggccagttgcagtacgccgcaggcgtcccagtcgtggccgcgccgcaggcgttcgagcagccggcgggtatggccgaagccgctgagcaccaggcgcgacagcggcgtgccgtgggccgagagtttcaggtagagcacgccctgggggttgcccgaggcttcccgggcgaggccgggatggcgttcgatcagggtcacctgccagccgcgcgcggcgaggctggcggcgctggcgcagccggccaggccgccgccgaccaccagtgccgcgcggcgcccggcgtggggcgcggggcgtgcgtaccagggcttgccggcgttcgccggcggcccctggtaggtgccgctgagcatctcgcgcttctgtccgtagcccggtacccgttgcatggcgaaaccggcctcgatcagccctcggcgaacgaaaccggcgctggtgaaagtgcccagggtcgcctgcggcgccgacagtcgcgccagttcggcgaacagtacgggcgaccacatgtccgggttcttcgccggggcgaagccatcgaggaaccaggcgtcgacccgcgcgtcgagctgcggcaggcactccagggcatcgcccagcagcagggtcaggccgacccttccgcccgcgaacgccaggcgctggaagcccgggtgcacggcaaggtactggcccagcaaggcctcgctccagggcgccagttccggccatag

SEQ ID NO: 356917 - DNA, 657 bp, Pseudomonas aeruginosa
atgaatcctctgctgccgctgcgtgacgcctggttcttcttcacccgccacctgaccaccctggtgccgctctgcctgccctggatattcctcgaaagcctgctccagcagcagatcgacgaagccgtcggcccccagcagatgggcgcctggagcctggtcgccggactgctcttctacccgctctacaccgcagccctgatcctgttcatggacgcgcgcgggcgcgacgagcggcctcgcgtcggccagctgtggagcgccgcgctgcgcctgtggccagccttcgcgctactcgcggcgctgacttcgctgctgatcgtgctcggcctgtcgctgctgatcctgccgggcatcttcgtcatggtgaagctgtccttcgccgaattctgtctggtgctgcgcggccgtagtccgctgcaggcgctgcgggaaagcttcgagttcacccgtggacgattcttcctgatcctcgcctgttcgctggtgatcctgctgccggtctggagcctggaagcctggctcgccgattcggccggcgacgccgtcgtgctgcgggtcgccctgcatacgctcagcgggttcttccagctgctgttgaccatcgtcgccttccgcatctacagcctcggtccggcgccacgcaacgggatgtga

SEQ ID NO: 356918 - DNA, 882 bp, Pseudomonas aeruginosa
ttgcgccagggacagctccagatcgccggcgaaactcagcaggccgtcgctgaacagggtcaggtcaccgaacccgccatcctgtacctggctcgccgccaggcggccatggccataggcatagtctcgcccttccccggcggcttcgcgctgctggccgacgatcagctcgcgcgggcgcagcacctggtcggtcgccaggctggtcaggtagttcggcgtggccagcgccagcgtcaggctgccggcggcggcaccttccccgccggcgaaggcgcgcaggtcgccatccaggtacaagccattggccgacgccagggagatactgccgccggcgctgctgacccgggtctggccgactccgggcacgtccagaagcgcctgggtgccggaggcatccagcaggcttcccgggcgcaggtcgatgaacagttcggcggcatcggccttgccgctggcatgttcgaccgtgccgccgatgacgatgctgccaccatcggccaactggccgtagcgccgcccctggaagtccagcgcggtcgcagcgcgtgcggcgacatcgagcacaccctgctcgccaacgcggatggcgcgctggtggccgacgctctcgacctggtcgcgcaccggatcgggcaacgccacgctgcccagttcgatcgagccgccccaggcgttcaggcgaccatcgacgttcaactggccgacgctgcgcagctcgatgcgctggccgggatcgacctccagcaggctgccacgaccgatgtcgaggacgctgtcggccacctgcccggcaccactctggcggctgccggcctgcaggaacaggctggcgccgggacgctggcgcagttcgccgtcggccggccgctcctcgtatag

SEQ ID NO: 356919 - DNA, 5430 bp, Pseudomonas aeruginosa
atgagcctcggcgaactgctggaaacctgccgcagccggcgcatcgaactctggagcgaggcgggccgcctgcgctatcgcgccccccagggcgccctcgacgccggcctcgccgagcgcctgcgggccgagcgcgaggctctgctggaacacctggagggcggccctggctggcgcgccgaacccgacctggcccaccagcgcttcccgctgaccccggtgcaggccgcctacgtgctgggccgccaggcggccttcgactacggcggtaacgcctgccagctgtacgccgagtacgactggccggccgacaccgatccggcgcgcctggaggcggcctggaacgccatggtcgagcgccacccgatgctgcgcgcggtgatcgaggacaacgcctggcagcgcgtgctgcccgaggtgccctggcagcggctgaccgtacatgcctgcgcggggctcgacgaggccgctttccaggcgcacctggagcgggtccgcgaacgcctcgaccacgcctgcgcggcgctcgaccagtggccggtcctgcgccccgagctgagtatcggccaggatgcctgcgtgctgcactgctcggtggatttcaccctggtcgactacgccagcctgcaattgctgcttggcgaatggcgccgccgctatctcgatccgcaatggacggcggaaccgctggaggcgaccttccgcgactatgtcggcgtcgagcagcgtcgacgccagtcgccggcctggcagcgcgaccgcgactggtggctggcgcgcctcgacgcgctgccggggcgtcccgacctgccgctgcgggcgcagccggacacccggtccacgcgcttccggcacttccacgcgcgcctcgacgaggccgcctggcaggcgctcggcgcgcgcgccggcgaacacggcctgagcgctgccggcgtggccctggcagccttcgccgagaccatcggtcgctggagccaggcaccggcgttctgtctcaacctgacggtactcaaccggccgccgctgcatccgcagctggcgcaggtgctcggtgacttcaccgcgctcagcctgctggcggtggacagccgccacggcgacagtttcgtcgagcgtgcccgacgcatcggcgagcagatgttcgacgacctcgaccacccgaccttcagcggcgtcgacctgctgcgcgaactggcgcgccggcgcggtcgcggcgccgacctgatgccggtggtgttcaccagtggcatcggcagcgtgcagcgcctgctcggcgatggcgaggcgccgcgcgcgccacgctacatgatcagccagaccccgcaggtctggctggactgccaggtcaccgaccagttcggcggcctggagatcggctgggacatacgcctcgggttgttccccgagggccaggctgaagccatgttcgacgacttcgtcgggctgctccggcgcctggcgcagagcccgcgcgcctggaccgacggtgatgccacggaacccgtcgaggcgccgccgcaggcgttgcccggtagtgcccggagcatcgccgccggtttcgccgagcgtgccctgctgtcccccgacgccacggtgatccacgatgccgccggcagctacagctaccgccaggtcgcccagcacgccagcgccctgcgccgtgtcctggaagcgcacggcgcgggccgtggccggcgggtcgcggtgatgctgccgaaaagcgccgcgcaactgatcgcggtgatcggcatcctccaggccggtgccgcctatgtgccagtggacatccgccagccgttgctgcggcgccaggcgatcctcgccagcgccgaagtggtcgcgctggtctgcctggaaagcgatgtcccggacgccggctgcgcctgcgtggccatcgaccggctggccgccgacagcgcctggccgccaccgcccgcggcggaggtggcggcggacgacctcgcctacgtgatctacacctccggctccaccggcacgcccaagggcgtgatgctcagccatgcggcggtgagcaacacgctgctcgacatcaaccagcgctacggcgtcgacgccaacgaccgcgtcctcggcctagccgagctgagcttcgacctctcggtctacgacttcttcggcgccaccgcggcgggggcccaggtggtcctgccggacccggcgcgcggcagcgatccatcgcactgggcggaactgctggaacgccacgccatcaccctgtggaactcggtgccggcccaaggccagatgctcatcgattacctggagagcgagccgcaacgccacctgccgggaccgcgctgcgtgctctggtccggtgactggattccggtcagcctgccgacccgctggtggcggcgctggccggacagcgcgctgttcagcctgggcggcgccaccgaggcggcgatctggtcgatcgagcagccgatccgcccgcagcacaccgagctggccagcatcccttatggccgcgccctgcgcgggcagagcgtggaagtcctggatgcccgcgggcggcgctgcccgccgggcgtgcgcggcgagatccatatcggcggggtgggcctggcgctcggctacgccggcgatccgcagcgcaccgccgaacgcttcgtccgtcaccccgatggccgtcgcctgtatcgcaccggcgacctcggccgctacctggccgacggcagcatcgagttcctcggtcgcgaggacgaccaggtgaagattcgcggccaccgcatcgaactggccgagctggacgccgcgctgtgcgcccatccgcaggtcaacctggcggccaccgtggtgctcggcgagacccacgagcgcagcctggccagcttcgtcaccctgcatgcgccggcggaggctggcgaggacccgcgcacggcgctcgacacggtgcgccagcgggcggcccaggccttgcgccgcgactggggcagcgaggagggcatcgccgcggcggtggccgcactcgaccgtgcctgcctcgcctcgttggccgcctggctggccggcagcggtctgttcgccagtgcgacgccgctggacttcgccaccctgtgccagcgcctgggtatcgccgaggcgcgccagcgcctgctgcgccactggttgtgccagctggaggagggcggctacctgcgcgccgagggcgagggctggctgggctgcgccgagcgtcccgcacagagtccggaggacgcctggacggcgttcgccggctgcgcgccggcggcgctctggccggccgagctggtcgcctacctgcgtgacagcgcgcaatccctcggcgagcaactggccgggcggatcagcccggcggcgctgatgttcccgcagggctcggcgcgcatcgccgaggccatgtacagccagggcctgcatgcccaggcgctgcacgaggcgatggccgaggccatcgctgccatcgtcgagcgccagccgcaacggcgctggcgcctgctggagcttggcgccggcaccgccgccgccagccgcgcggtgatagcccggttggcgccgctggtgcagcgaggggcggaggtggactacctgttcaccgacgtttccagctacttcctcgccgccgcccgcgagcgcttcgccgaccagccgtgggtacgcttcggccgcttcgacatgaacggcgatcttctcgaccagggcgtggcgccgcattcggtggatatcctgcttagctccggggccttgaacaacgcgctggacaccccggcgctgctggccggcctgcgcgagttgctgagcgccgacgcctggctggtgatccaggaactgacgcgcgagcacaacgagatcagcgtcagccagagcctgatgatggaaaacccgcgcgacctccgcgacgagcgccgccaactgttcgtccacaccgggcaatggctggagtggctggcggcacagggcggcgacctggcttgcggggtggtgccgccgggcagcgctctcgacctgcttggctacgatgtcctgctggcccgctgcaagaccgaccgcgcccgcctggagccggccgagctgctggccttcgtcgaagcgcgggtgccgcgctacatgctcccggcgcagttgcgcgtgctcgaacgcctgccggtcaccggcaacggcaagatcgaccgcaaggccctgaccggctttgcccgccagccccaggcggaccttcggcatggcgtcgcgcaggcaccggccgacgaactggagaatgcgctgctggcactctggagggaggtgctggacaacccgtcgctgggcgtcgagcaagacttcttcggggctggcggcgactcgctgttgatcgcccagttgatcgcccgtttgcgcgaacgcctggaaagcgcccgccggcatccgttcgatcgcctgctacgctgggcgctcagccagccgacgccgcgcggcctggccgaacgcctgcgcagcgcgccggaagagggccgtgggccagccctggccgcggcgcgcggcgtcgccccggcgccggccggcatgtcgcgcgcaccgctcgccgagggcgcggtggcgctcgacccgctggtgcgcctggtgcccggcgagggcgtgccgagggtgctggtccacgaaggcctcggcacgctgctgccgtaccgcccgctgcttcgcgccctgggtgaggggcggccgttgctgggcctggccgtgcatgacagcgacgcctacctggcgatccccgccgagcatctcaacgcctgcctcggccgccgctacgctgaggcgctccatggcgccgggctgcgtgaggttgacctgctcggctactgctccggcgggctggtcgccctggagaccgccaagtccctggtccagcgcggggtgcgcgtgcgccagctggatatcgtctccagctaccggattccctaccgggtggacgacgagcgcctactgttgttcagcttcgccgcgaccctcggactggataccgcggcgctcggcttccccgcgccggaacgtctcggccaggcggtgcaggcggcgctcgcgcagacaccggagcgcctgggcgccgaggcgctggcggagctaccgggcctggccgatctcgtcgccctgcgcggccgcgtgctacaggcggccagcggtagcgccgacgccgccagcgtcgaacgcgacaccctctaccgactgttctgccactcggtgcgtgccagccaggccgcggcgccggagccctacgtcggcgcgctgcggctgttcgtgccggacgccggcaacccattggtgccgtgctacgccgaggccctggagacccaatggcgggccgccgcgctcggcgcgtgcggcatccacgaggtgcccggcgggcacttcgactgcctgggcgaagccctggcgcaatccctgtcgaaacccatgccagaggaggcgagccgatga

SEQ ID NO: 356920 - DNA, 852 bp, Pseudomonas aeruginosa
atgggggctgagcaggctcagcgtgccgcgatcggtggtcaggctgacgcgctgcaacaaggtcatgcgcccatcgtcggcggccgccagttcgttgagcacgtgcaggctcaacggcacttccgccaacaccagggacagcccgcgcatcgccgacaggtcgttcgagggcgactccagcgaccaggggccgacgccctccagcaacgcggcgaggatgtccagggtggcgaaaccgacctgcaccccgcaggccgcgtccaggtggcggatgccgcgccggtggtgcaactggcggcccagttcgatgaaacgcgccaccgccggcaactgcggatagaaggtgttgagcaggcagcgccggcccaggcgctcggcgctgcgcagcaggtcctgccattcgcgcggcagcaacggatgctcgatcagcacgtcgatgccacgcgccatcagcgcctcggccagcgccgggccctgctcgccgcgtgccgcgccgccgaccgcgacgcaggccaggcggacatcgtcgggcaacgcctcgacctcgcaccagatctccaccccgaggcgctcggccaacgcccgcgaacgccggctgccctggccaaggatcccgcgcaggacgaagcgcggatcggcggcgacgccggcggcatagaactggccgaaccgggaaccggcgaccaccacggaacggacgtcgctcatcggctcgcctcctctggcatgggtttcgacagggattgcgccagggcttcgcccaggcagtcgaagtgcccgccgggcacctcgtggatgccgcacgcgccgagcgcggcggcccgccattgggtctccagggcctcggcgtag

SEQ ID NO: 356921 - DNA, 1224 bp, Pseudomonas aeruginosa
atggcgctgatggtttccggcgccggcaccctgatccaggcgcgccggccgttcggcatcggcgccggaatgatctgcctgcaaggcaccagcttcgccttcctcggcgccgtgctggccgccgggatgctggtgaagcagcgcggcggcggtcccgaggagatcctcgcgatgatcttcggcgtgtgcttcttcggcgccttcgtgcagatcgtcctcagtcgtttcctcggccatcttcgccgggtgatcacgccgctggtcaccggcatcgtcatcaccctgatcggcgtcagcctgatcaaggtcggcatcaccgacctcggcggcggagccggggccacggacttcggcgcaccggccaatctcgcgctgggcgcgctggtgctgctgagcatcgtcctgctgaaccgctcgcgcctgccctggctgcgcctggccgccatcgtcatcggcctggcgctgggtaccctggcggcctgggcgaccggcctgttcgttccgcgggcgttgcccgagctgccgctggtcagcctgccgcagccgttccgcttcggcttcgccttcgactggatggccttcctgccggtggcgctgatctacctgatcagcagcatcgagacggtcggcgacctgaccgccaactgcatgctctcgcggcaacccctggaggggccggcgtacctgcagcggttgcgcggcggggtgctcggcgacggcgtcagttgcctgctggcagccaccttcagcgccttcccgaacaccaccttcgcgcagaacaacggggtgatccagctcaccggggtggccagccggcacgtcgggatctatatcggcggcgtgttgctggcgctcggcctgttcccctggatcggcgcgatcctccagcagatccccaagccggtgctcggcggcgccaccctggtgatgttcggcagcgtcgccgccgccggcatccgcattctcggccagaccgcgatggaccgccgcagcgtgctgatcatcgccgcctcgttcggcgtcggcctcggcgtggccgcgcagccgaccctgctcgaccagatgccggcggtggtgaagaccctgttcgactcggcgatcaccagcggcggcatcaccgccatcctgctcaacctgctgctgcccgaggagcgcgttgccgaagcggcgcaggccagcgcgaagggcggcgccctggcgcgctggcgcaagccgctgggttga

SEQ ID NO: 356922 - DNA, 1254 bp, Pseudomonas aeruginosa
atgaacagaacctatgacatcgtgattgccggcggcggcgtgatcggcgcgtcctgcgcctaccaactgtccaggcgcggcaacctgcgcatcgccgtggtcgacgacaagcgaccgggcaacgccacccgcgcctcggccggcggcctctgggccatcggcgaatcggtggggctgggctgcggggtgatcttcttccgcatgatgtcctcccgcaaccggcgcgaggcccagggcgcggcggtggcggtggacgcgagcacgccgcacatcctaccgccggcgttcttcgacctcgccctgcaatccaacgcgctgtacccggaactgcaccgggaactgatcgaacgccacgggatggacttcaagttcgagcgcaccggcctgaaatacgtgatccaggacgacgaggatcgccagtacgccgagcacatcgtggcgcagatcccgcatctggccgagcaggtacgctggctggaccgcgaggaactgcgtcgtgccgagccggcggtcagccacgcggcccacggcgcgctggaattcctctgcgaccaccaggtcagcccgttccgcctggccgacgcctacctggaggcggcgcgccagaacggcgtcgagctgttgctgggaaccaacgtcatcggcgtgctgcgccagggccggcggatcagcggggtgcgcacggacaatgccggggtgctgcattgccggaccctgatcaacgccgccggcgcctgggccgccgaactcagcgaaatggccaccggccggcgcatcccggtgaagccggtgaagggccagatcgtcctcaccgagcgcatgccgcgactgctgaacggttgcctgaccaccagcgactgctacatggcgcagaaggacaacggcgagatactgatcggcagcaccaccgaggacaagggcttcgacgtcagcaacaccttcccggaaatcgccggcctggtgcagggcgcggtgcgttgcgtgccggagctgcaacaggtcaacctcaagcgcacctgggccggcctgcgcccgggctcgccggacgaactgccgattctcggtccggtggcggaggtggagggctacctgaacgcctgcgggcatttccgcaccggcatcctcacctcggcgatcaccggggtgctgctcgaccggctggtccacgaagagacgctgccgctggacatcgcgccgttcctcgccgcgcgcttccagccggagcctgccgccgtggcggtcgcggcctgctag

SEQ ID NO: 356923 - DNA, 1074 bp, Pseudomonas aeruginosa
atgaaaattcgttcgcaagtcggcatggtgctgaacctcgacaaatgcattggttgccacacctgctcgatcacctgcaagaacgtctggaccagccgcgaaggcatggagtacgcctggttcaacaacgtcgagaccaagcccgggatcggctacccgaaggaatgggaaaaccaggagaagtggaagggcggctgggtgcgcgcggcggacggttcgatccgcccgcgcatcggcggcaagttccgcgtgctggcgaacatcttcgccaacccggacctgcccgagatcgacgactactacgaaccgttcgacttcgactaccagcacctgcataccgcgcccaaggccgaacaccagccggtggcgcgcccgcgctcgctggtctccgggcagcgcatggagaagatcgagtggggcccgaactgggaggagatcctcggcaccgagttcgccaagcggcgcaaggacaagaacttcgaccaggtccaggcggacatctacggtgagtacgagaacaccttcatgatgtacctgccgcgcctctgcgagcactgcctgaacccggcgtgcgtggcgtcctgcccgagcggggcgatctacaagcgcgaggaggacggcatcgtcctgatcgaccaggacaagtgccgcggctggcggatgtgcatctccggctgcccgtacaagaagatctacttcaactggaagagcggcaagtccgagaagtgcatcttctgctacccgcgcatcgaggccggccagcccaccgtctgctcggagacctgcgtcgggcgcatccgctacctcggcgtgctgctctacgacgccgaccgcatccacgaagtggccagttgcgagaacgagcgcgagctgtacgagaagcaactggagatcttcctcgatccgttcgacccggcggtgatcgcccaggcgcgcaaggacggggtggccgacagcgtcatcgaggcggcgcagaagtcgccggtgtacaagctggcgatggactggaagctggccctgccgctgcctgtctcttatacacatctgacgctgccgacgagcgatctagtgtag

SEQ ID NO: 356924 - DNA, 852 bp, Pseudomonas aeruginosa; identical to SEQ ID NO: 351009

SEQ ID NO: 356925 - DNA, 843 bp, Pseudomonas aeruginosa
gtgtcggtcttggtgacccacagttcgacgacgccgccttgggttgcaaacatgttcatcggtgtttctccttcaattcgcctttttcggcgtgagttgtcccgctgctgcaaattcggctgtttcgccttcattcagcggtgttgggtgaaagtgatttgtcgggcgatcccttcgggccgggctctattcgctagcgaaccaagccaaccacgggtgttcgtctcgcccattcgggtaacgatccctatcgcaacgtcgtcgccgacggccaaggggaacccttccccttggaacccgcagagcaacaccaagggctctgcccttgtcatcccgctcttgccgccgagggctcgggagcgcggggcggagaagctgccccacactccccagcggaggctgtttcaggggggaggcgttcaagggtgcgctccgcccgtgcttccgttcgccggaacggtgaggctgttccgacgagccgggagcgcggcccttgaccggatcggccacggtgcgggcggcttggatcaggcagagcaggagcagcgctttcagggtgtcagcgagcatgggtcagccctccagttggaatgcttcgcgcacgggcacgaagggcgtgggtttcccgctgtcgtacacaacgtgccagtacttcggcggacgccgggacgggtcgtgtttcgcgcagaaggaacggggacggcagagccagcgaccaccttccagatagggcagcccagggggccggcagtccggacacggcgacgggctgtgcaatgggatggcctgccttgcggaccagcacacagagcagccgcagtccggggcgtgggcttggcgtag

SEQ ID NO: 356926 - DNA, 474 bp, Pseudomonas aeruginosa
gtgcatgtgaagcacgatcgcaccgagaccgtggacaacaacgagaccatcaccgtgcatgccaaccgcagcaagacggtcgaccgcaacgagacggtcaggatcggcatgaacaagacggaaaccatcctcatggcctcgttgcagaacgtcggcatggggcgcatggaaaacgtcgggctcggctacagcctgaacgtcggcatgatgatgaacaccgtggtcgggctgaaccagagcacccaggtgatgaagaagaagaccttgtcggtgggcgatagctacgaagtgagcgtgggcggcagcgacgatggctcgaagatcaccctggacggtcagagcatcaccctcggcagccagcgcatcgagctgaccgccgaccgcgagatcctcttgcgctgcggccagagcacgatccgcctgacgccgggggagatcgagatcctctcgcccaatgtcgatatcaactgttga

SEQ ID NO: 356927 - DNA, 2139 bp, Pseudomonas aeruginosa
atgtacctggctttccaggcgcaggttaccgacctcgtcgtacgtgtagcgcacctcgcaatccgccccgccggcgctggccaggcggccgtcggccaaccagcggtaacgctcgaccagggccggtgcgtgctcggtggcgggaacccggatgctcgccaggcggccgtcgcggtcgtagccataggtggtctcgcgaccgtcggcatcctcgcgggcgatcagttcgtcagcggcgttgtagcgatagcgttggcgacgaccgtcgaagccggtctcttccaccagacggtccagcaggtcgtagcggaactgcgcctggacgccgttctcgttggtcagggcgaccagcctgccggcttcgtcgtgcaggtaggacaattcgccgccgccggcgtcggaaacccgcgccagcagatcgccgtgcccccaggaaaacagcgtggcgtgccccttggcatcggcgatacgggtctgccgcccaagggcgtcgtattcatagttcagggcgctgccgtcggccaattccaggccgatcagttgccccagcgggtcgtagcggcgccgggtcagttgtcccagcgggtcgctgctggcgaccaaacgtccttcgttgtcgtagtcgtaacgccagacctggccggaacaatcggtcaacgcggccaacaggccgaagcggttccactccaggcgccgctcgccgccgcgcgggtcgacgattcgcgtcggccggtcgggcaggcgcgggtcttcgtaggcgtagcgggtgctgccggccgggccgcgcaccgtcgtcacattgccccgttcgtcgcgctcgaaggtccagcggcgctgcatcgcgtcctccagctcgaccagcagcccggtctcttcgtcgacgcgcttgcgatagcgcgccttgcccggcgactcctcctcgagcatccgcccctggccatcgcgccggcgccgcgtctcccgtcccagcggatcgcgcatggcgaccaggcggccgaacaggtcgtagtcgaactcgctacggctgccgtcggccctgaccagcgcggtccagcgccgctgcccaccctcgccggcgaactcgtagcgttcgacgcggccgaggctgtcgctgacctcggtggcatcgcgcaggtagcggaaggtacgggtcaggccgcccgcctcgatctgcttcacgacccgcccgtgcggagcatggacatcccactcgtagcgaacctccagcccgcccggttcgccgtgggcgaccagcatgtgctcgcgccaggcgaatacccggaccacctggccaagacggtcgcgcacggcgatcagatcgccgctgtcgctgaactggtagcgcaccagccagtcgagccccgggctctgcggatcgatgtagtccggaggcggtccgtcgtggctggccaggatcacgccgaacagacgcaggccgtcgtcgccctcgctcggctcgcaggcctgctggtagaccagcgcatagctgcgcccggcgctgtcgcgcacgccggtgagcaggccacgtccgctccagcggaactcggtgcggtagccggcgcggccgaagctggcctgcaggcgccagataccgtcggggcaacgctggaaatgcaggtagctgtggccggacagcaccagcacggagccctcctgcgtctgcagttcggccggcaccgccgcccagcgcccgcgccaggcctgcgcttcgccgccgctcgaaccgccgcggcgcagccacagctcctcgctgccggaataatgctgcgcgccgggagccagcgcaggaaagccgatccggcggccctgggcgtcgaccagcacgcaggcgtcttcgctcagttccaggtgcatgctctcgcccggcagccaccagccccggccgagccggccgatacgcgggttgctcgacaggtagccacgggcgaaggtgaaggtgtccggcgccgccagggcgaaatcgacctcttccggcagcagcttgctgccgagcatcgggttgaccggcttgcccaccaacggcacgcaggcggacacccggtcggccaggccgaccgcgctgctgccgacgtgcacggtgggcgagccggtggagataacccctccagagactttctcgccgacatgggaaaccggtag

SEQ ID NO: 356928 - DNA, 1071 bp, Pseudomonas aeruginosa
atgcagttggccacgttcgtcgctcagctgcaggggggtaccgaggtgatcggtgtggaagaaagcgacccgcgcctcgcccagcgccggcacgcattgcgccggcagcggctggccctcggcggcgaacgcctggcgcagttgcagcagctccgggggatcgggctcgcaggcctgctccaggcgcagcaacgggacgaaaccgcccggttcgtgaacggtggtgcgcagttcccgcgcaaaggcttcggcgcattggcgatcgccgtcccagccgaagcgcacctgctgctcgacaccctcgcgcagcaccaccttggcgatccgtcgcgacagcgcgtcgtagcggtagcgcgcctccagccgcgtgccgtcggcgcaatcgcgcgacagatggaccaggcgctgcgcgccgtcgtaggccaggcacaggcgctcgccgtcggcgccgatacgctcgaccaggttgcccagcgcatcgaagcgatagcggttgccggcgatcctctccacgcggttgccagcccagcgcgccgggccttcgccggcctggctcgcgcgcgcctcggagcgactgaaaccggagcggtacagttcgttctcggcaaatgcctggcgagcgtcctcgcgcgcatgctcgccgacgccctccaggcggttgccggcggcgtcatagcggtaggtgctggccgccgcgccagcgcgccggctggccagcaggcgaccgccgaggtcgtattcgtagcgcaccgacggatactggttgtcgtcgatgccgaccagttgtccaagtccgtcgtagcgatagccgcgctgccagtcgaaaccgccggccagacgcaggcggctacgctgcaggcgtcccagcggcgcgtgctggcgctcctgggtgaacaacgcgtcatcctgcccgtcgcggcgggcgtcgcgacgcacctcgcggtgcagggcatcgcgctcgaaggccagctcgaccgcaccgaccagcgcgccgtgcagatgacccgggccataggtcagccaggcgaccggcggcgcgtcgccgtagcggctggtctggcgcacgcctag

SEQ ID NO: 356929 - DNA, 945 bp, Pseudomonas aeruginosa
atgcaacgcatccgcatcatcgattcgcataccggcggcgagcccacccgcctggtcatcggcggctttcccgatctcggccagggcgacatggccgagcgccggcgcctgctcggcgagcgccacgacgcctggcgcgccgcctgcatcctcgagccgcgcggcagcgacgtactggtcggcgccctgctctgcgcaccggtcgatcccgaagcctgtgccggagtgatcttcttcaacaacagtggctacctcggcatgtgcggccacggcaccatcggcctggtcgcctcgctggcacacctcgggcggatcggtcccggcgtgcaccgcatcgagacaccggtcggcgaggtcgaggcgaccctccacgaggacggctcggtcagcgtgcgcaacgtgccggcctaccgctaccgtcgccaggtcagcgtcgaagtgcccggcatcggccgggtcagcggcgacatcgcctggggcggcaactggttcttcctggtcgccggacacggccagcgcctcgccggcgacaacctcgacgccctcaccgcctacaccgtcgccgtccagcaggcgctggacgaccaggacatccgcggcgaggacggcggcgccatcgatcacatcgaactgttcgccgacgacccccacgccgacagccgcaacttcgtgctctgccccggcaaggcctacgaccgctcgccctgcggcaccggcaccagtgccaagctggcctgcctggccgccgacggcaagctgctgcccggccagccctggcgccaggcgagcgtgatcggcagccagttcgaggggcgttacgaatggctcgacggccagcccggcgggcgtatcgtgccgaccatccgcggccgcgcccacgtcagcgcggaagccaccctgctgctggcggacgacgatccgttcgcctggggcatccgccggtga

SEQ ID NO: 356930 - DNA, 243 bp, Pseudomonas aeruginosa
atgtgtataagagacaggcgcctggccagcggcgagacgtcgggcctggtggcgctcggcggcggcgcctgtgcctggctgctgttcaacagccgcgcgatgcaacgctacatggaactggtctacgcccagcgcctgtaccgcgcccagtcggccaaccgccccggttcggcgcagcggcgcctggccaaccaggccgcctaccgcgaacgcaagcgacgcgagcgctccgggcgatcctga

SEQ ID NO: 356931 - DNA, 609 bp, Pseudomonas aeruginosa
atgccccgccgccgctggaggcccggcccgccgaagcgctggcgaccgatgccggcccgcgactggacgccttcgaccaggccctgctcgccggcgaacacggcgaagccgcgcgcctggcgatgcgcatcgtcctgcgcatggcggcgttgcagggcgcgcaacggctggtcgagatccagcgcgcgcacatcgacgcttgcatctacaccggcccggccggcctgcgcttcgccgagaccctgcgcgacctcggtgcccgggtgcgggtaccgaccaccctcaacgccatctccgtggaccagcgccgctggcgcgaacagggcgtacccgccaccctcggcgagccggccgcggccctggcccaggcctatctcgacatgggcgcgcagcccagcttcacctgcgcgccctacctgctcgacgacagcgcgcgggccggcgaacagatcgtctgggccgagtccaacgcggtgctcttcgccaacagcgtgctcggcgcacgcaccaacaagtacgccgacttcatggatatctgctgcgccctcatcggtcgcgcgccgctggccggctgccacctcgacgagcagcgccaggcgcgggtactga

SEQ ID NO: 356932 - DNA, 1977 bp, Pseudomonas aeruginosa; identical to SEQ ID NO: 332724

SEQ ID NO: 356933 - DNA, 2295 bp, Pseudomonas aeruginosa
gtgcgcgactaccgcatcgccgccgggccgctggcaggcaccctgaaccgcatcgcggcccaggccggcctggtcctcaccctggacccggcgctcgccgaaggacgcagcgcccacgccgtacaaggtcgcttcgacgcgcccggcgcattgcgcgaagcgctcaagggcagcggcctggagctggtggaaaatgccggcggcacctacagcctgcgcaaggtgccggaagacaccctgtcgttgcaggcgatgacggtcagcggcgccgaggaagacccactggggccgaccagcggctacgtggccaagcgcagcatgaccgggaccaagaccgatacgccgatcctcgagaccccgcgctcgatctcggtggcgacccgccagcagatgaccgaccgcgccgtgcacaacctcgacgacgcggtgcgctacatgcccggcgtcgtcgccagcagcttcggcagcgacacccgctccgactggttgaaggtgcgcggcttcaagccgacccagttcctcgacggcctgccgatggcggtcggcgtctacaacaacccgaagctggaaacctggaacctggagcgtgtcgccctgttgcgcggcccggcctcctcggtctacggccagaccccgcccggcggcatgctcgacatggtcagcctgcgtccgcagaacgtcaccagtcacgaggtgaaggccgaggtcggcaactacaaccacaagcaggtcagcttcgacagcaccggcccgctcgacgacgagggacgctttctctatcgcgtctccggcgtggtgcgcgacagcaacacccaggtcgatcatatcgacgacaagcgctacaacatcgccccgagcctgacctggaacatcgacgacgacaccaggctgaccttcctcggccagttcaaccgcgacgataccggcatcaccagccagttcctgccgctgcgcggaaccaagtacgacgcgccgttcggcaaggtttcccatcacaagaacctcggcgatccggactgggaatactacgaccgcacctactactggctgggctacgccttcgagcggcggatcaacgatgtctggcagttccgccagaacctgcgttacctgcgcaacgacctgtcgttccaggggattacagcgggcacagctcatgccgacggcacactggaacgcagcaccacctcggtggatgaagacgtcagtcagttcgtagtagataacaacttccaggccgacttcgaaacaggcgccctgcgccacaccctgctgctaggcctggatcacaaccgcaccgacaaccaatacacatcgatctttggtagcgcgccgccgagcaacgtcaacaacccgatctacggccagccgatcgtcaaaccggatcgttcgacggccttctacgactacaagcagaagacctaccagaccggcctctacgtccaggaccagatcgccctcgacaactggcgcctgaccctcggcggtcgcgaggactgggtgcacacaggcgccaccttctacaacaagggcgacgccaccaataccagccgcgacaagaagttcagcggcaacgcggcgctcagctacatcttcgacaatggcgtggcgccctacatctcctatgcggagtcgttccagcccaccaccggcgccgatatgaacagcaccagttcgctgaagccgaccgaaggcaagcaatgggaaatcggtgtgaagtaccagccggtgggctccgactcgctgttcaccgccgcggtctatgacctgcgccaggagaacgtcagcgtgtcgcagaacataggcggcacgccggtcacttcgcagacgggcgaagtgaaggtctccgggatagaactggaagccaccagcaacgtcaccgacaacctgaagatgatcggcgcctatagctacgccgacaccgaagtgaaaaaaggccagtacgcaggcaaccgcctgcaacaggcgccgcgcaaccaggcctcgctatgggccgactacacctggcacgagggtacgctgaacggtttcagcgtgggtgccggcgcccgctacgtaggctcgacctacggcgaccaggccaacacctacgacggctacgccggctcgtacaccctgtacgacgccgccgtgcgctacgacctgggccaattgaacggcagcctgaaaggcgtcagcgtggcggtcaatgccaacaatctgttcaacaaggactacctggcgtcctgcgacggctactactgctactacggcgaccagcgcagcgtggtgggcagcgtcagctacaagtggtga

SEQ ID NO: 356934 - DNA, 2283 bp, Pseudomonas aeruginosa
gtgctgccgaccgggttggcgctcgaccagcaagtgctcgaccgcctgctgcagggtgatgcgtcggagggcgcgccgcccctggagacgctggtgctgaacgcccgcgacgcgttcaacttctacggcgacgtcagcctcgattcctacgatccgagcagcggtcgctcccgcttgtcgcgcctggtgctgggcaccccggcgatctatggctacggcgacagcgacagcgtcgcctcgatccgcacctccaacctgatctggaatggcgcgcagacgccggctgccggggtcatcgccggcggcgccggcagtggccacggcacgctggacatccgcagcgaacgcctggagttcggctacggtcccttcagccagcccagcgccatcgacagttaccagcgcctggcgctgggcttcgccacggtcaacctggcggccagcgagcggatcaccgccaaccacaagggtagcctcgcggtctatcagagccagggcgagtatcgggctggtagcggctacgcatacagcggcggcgatctcaacctgatcacacccttgctcaccggcgaggccggctcgcgcaacagcctgctggcgggcggtgcgttgcgggtcagcgcggggggcggcggcgcggcatccaccccggtcgaactggccaatggtgcactgggcgccgaactggccctggagggcgccagcctgctgctggacacccgcgtcggcctgcccagcggcaagttgagcctgaccgcgcaggaggacctggaactgggcgccggcgcccagctcgacctggccgggcgcgcgctgcgtttcgacgacgtgacccgctacagctggggcggcgaagtcaacctgctgagccacggcggcaacatccgccaggccggcgcttcgcgcatcgacctgtcggcgagcaacaaccaggccggtagcctgacggcggtggcgctggacagcgcggccggcgtggtcgacctgcaagggcagatcctggcggcgagcagcggcgaatacgacgctggcggcaccctggtgccatacgccgcgggcagcgtcgagatccgtgcccagcggctgggcgaggacggtacgccagacagccggttcgccgctctcaaccagcgcctgaatgccggtcaggtgttcggtgcgcgcagtttccagatcaagcagggcgacctgaacatcggcaacgacgtcagggcctcgacgatcgaggtgtcgctggatggtggccatctgagcgtgaacggcgtgctcgacgccagcggcgagcaggtcggcagtatccgcctggccgccaagcagggcctgagcatcggtggcgaggcgctgctcgatgcccatgggcggcggctgcgggtggacagctacggcaagatcatcgattcgccgaaccgcgcgctgatcgagctgaacgccggagacgggctgctcagcctcggcgccggtgcccgtatcgacctgcgccacggcaccgaggtggcagcgggaagcgcgcccgggcagaacgacggcgtcgcccgcggcaccctcgacctgtacgcgccgcgtctgggcggggcgacggcgggcgatatcgccatcgacgccggtgcgccgctgcagatccttggtgcccgcgccatcaccctcagtgccgtgcagcgctacgacgacgcgccggtcgccgcgctgccggcgagcaacggccggccgtaccaggagatcacccaggcctacctggatggcaagcaccagcagagcgaactgttcatgcaggcggcgttggccaatagcgccctgctcgacggcaagctggccggattgaacaatgccgcctacgcggaagctttccacctgcgccccgagctggagatcgtcagcgccacggccgatggcgatctggtggtgcagggcgacctggacctgtcgggtcatcgctacgccagcctcaacccgcggacggcgaaaacctcggtatacggctccggcgaggccggttcgctggcgatccgcgccggcggcgacctgaacatctacggcagcgtcaccgacggtttcgccccgccgccggaaaccgacgacgatcagggctggttgctgctagccggccaggatcacctgggcggcgatcgggtggtgccgacggctggcgtgcgtctggacgacgacagcttcttcccggccggcaagacgctcaacttcgaactgccgatcaaggccatgaccctggccgccggtacccggctgccggtcgaggcggtgctcagcctgtctcttatacacatctga

SEQ ID NO: 356935 - DNA, 951 bp, Pseudomonas aeruginosa
atgactgagccgctgatcctggccgtggtcggccacaccaataccggcaagacctcgctgctgcgcaccctgacccgcgaccgcggattcggcgaagtctcccatcgccccagcaccacccgccacgtcgagggcgccaggctgtcggtggacggcgaagcgctgctggaactctacgacacgcccggcctggaagacgccatcgccctgctcgactacctggacgccctggagcgccccggcgagcgtctcgatggcccggaacgcatggcgcggttgctggacagcaacgaagcgcgcgggcgtttcgaacaggaagccaaggtggtccgccagttgctcgcctccgatgccgggctctacgtgatcgacgcccgcgaaccggtgctggccaagtatcgcgacgaactggcggtgctcgccggctgcggccggccgctgctgccggtgctgaacttcgtcgccagcccgcagcatcgcgaggaggagtggcgcaccgccctcgctcgcctgggcctgcacgccctggtgcgtttcgacagcgtggcgccgccgctggacggcgaacggcgcctctacgagagcctggcgctgctgctggagcgcgcccggccgcaactcgaccggctgatcgccgaccatgagacccaggccgccgcgcgcctgcgcgccgggcaacggctgatcgccgaattgctggtcgacgtcgccgcctgtcggcgcctggtgcccggcggcgaaagcgccgtgcaggaagccacccgcgacctgcaccagcaggtgcgcaagcgcgagcaggcctgcgtggaagcgttgctgcggctctacgccttcgccagggacgacgcccgcgccgccgacctgccgctgctcgacggccgctggggcgacgatctgttcaatccggagacccctgtctcttatacacatctccgagcccacgagacgtag

SEQ ID NO: 356936 - DNA, 516 bp, Pseudomonas aeruginosa
atggtcgccatcatcgtcgtttccagcctgatcagtctgagtcgcggcttcgtcaaggaagccttgtccctgcttacctggatagtcgccggcgcggtggcctggatgttcggcggggcgctggcgcagcacctgggcgaatacatccagaccccctcggcccgcatcatcgcagcctgcgcgctgctgttcatcgcgaccctgctgctcggggcgctggtcaactacctcatcggcgaactgatccgggtcaccggcctgtccggcaccgaccgcttcctcggcatggtcttcggcggtgcgcgcggcgtactgctggtcgtgctgctggtcggcctgctcagcctggccccggtacagcaggacccttggtggcagcagtcggtgctgatgccgcatttcctgatggtcgccgactggtcgaagaacttcattctcggtttcgccggccagtggttgccggccgcgccgataacgccgccgagcggcatcggcgggctgcttcccagccagtga

SEQ ID NO: 356937 - DNA, 1212 bp, Pseudomonas aeruginosa
gtggccgagctggattgccggcagccgccgctgggcgggttcctcgagttgcaggtgctgccccacggcgaaggccggctggccagcctgcgggtccgccgcgaccatgacggaacgctggccgggcgcttgctcgacgcctgggtcgaatgcctggaaagcatcgccgccgacaggcaactgccactggccgggctgccgttgatcggcgcggccgagcgcgagcgctaccaggcctggcagggcgagcgcgtggagcccgcgccggtggaatccctggtggccgcgttcgatctgcgcgccgccctgcagccgcaggcgccggcgttgctggatgcccacggcagcctggatttcgccacgctgcgcgcgcgcagcgaagcggtcgccgaagcgctgctggctgccggcgtgcggcccggccaggcggtggcggtgatgaccgggcgcaaccgcgaggcgatcgtcgccctgctcggggtgatgcgcgcggcggcggtgtacaccccggtcaatccggagtttccggcggcgcgggtggagcggatgcgcgaagcgggcgggatcgtcttcgcccttgccgatgccgagtgcgccgggcgcgcccgcgaggccttcgccggggcctgcctggacctgtcgacgctgccgcttgccggcagcggcatgagcctgccggcgccgggcgggcgcgatgcggcctacatgatcttcacctcgggcaccagcggccatcccaagggcgtggtggtcgagcacgccagcgcgctcaacctgtcccaggccctggcgcgcacggtatacgcgaacgtggtgggcgagggcctgcgggtgacggtcaacgcgccgttctccttcgattcctcgatcaagcagattctccaactgctctccggccattgcctggtcccggtgccgcaggaggtgcgcagcgatccgcagcggatgctggggttcctcgaagaacggcgcatcgacgtgctcgattgcaccccgtcgctgttccgcctgctgctccaggccggcctcgacgatgcccatccggcgctgcccgggcgcatcctggtagggggcgagcgcttcgacgaagcgtcctgggaggtcgccgccggctggcgccgctgccaggtgttcaatctctacggtcctaccgaagccacggtgaacgccagccctgtctcttatacacatctccgagcccacgagacgtag

SEQ ID NO: 356938 - DNA, 390 bp, Pseudomonas aeruginosa
gtgcacgccggcgccctcggctgggtggcgatgatctccatcggcacgctctaccacctgatcccgaaagtcttcggtcgcccgcagatgcacagcatcggcctgatcaacgcgcacttctggctggccaccatcggcaccgtgctgtacatcgcctcgatgtgggtcaacggcatcacccagggcctgatgtggcgcgcggtcaacgaggacggcaccctgacctactccttcgttgaagcactggtcgcaagccacccgggcttcatcgtgcgcatgatcggcggtggtttcttcctcaccggcatgctgctgatggcctacaacacctggcgcaccgtgcgtgctgccaagccggccgaatacgaagccgccgcgcagatcgcctga

SEQ ID NO: 356939 - DNA, 207 bp, Pseudomonas aeruginosa; identical to SEQ ID NO: 332728

SEQ ID NO: 356940 - DNA, 489 bp, Pseudomonas aeruginosa
atgcctgacacgacaaatccaatcggtttcaccgatgccaacgaacttcgcgaaaagaatcgcgccaccgtcgagaagtacatgaataccaaaggccaggatcgcctgcgccgccatgaacttttcgtcgagtacggctgtggcggtttatggaccaccgataccggctcgcccatcgtcattcgtggcaaagacaaacttgcggaacatgccgtctggtcattgaagtgctttcccgattgggagtggtacaacataaatatattcggaaccgacgaccccaatcatttctgggtcgaatgcgacggtcacggcaagattcttttccccggatatcccgaaggttattacgaaaaccacttcctgcattccttcgaacttgaagacggcaagatcaagcgcaaccgcgaattcatgaacgtcttccaacaattgcgcgccttgagcattccggtcccggaaataaaacgcgaaggcattcccacttga

SEQ ID NO: 356941 - DNA, 135 bp, Pseudomonas aeruginosa
atggtcttttcggtagtacccttggcctcgcccttgcgggtggcgaagatcagccaggtcagcgccagcagggtgccgagggtgagagctgtaatgtacagactccagaaggtcgtcattctttgttactcctag

SEQ ID NO: 356942 - DNA, 144 bp, Pseudomonas aeruginosa
gtgccgcaactggccaacgcccggcgcatgggctgtgacctggcgccctacccggcgttgctcgaactggaggggcgctgcctggcgctcgaagccttccagcgcgccagccccgagcgccagcccgactacctgccggactga

SEQ ID NO: 356943 - DNA, 162 bp, Pseudomonas aeruginosa
atgagtcacctgctcgaccgcctgcagttcttcaagaagaagcagggcgaattcgccgatggccacggcgagaccagcaacgagagccgcgcctgggaaggtgcctaccggcagcgctggcagcacgacaagatcgtgcgctccacccacggggtgaactga

SEQ ID NO: 356944 - DNA, 831 bp, Pseudomonas aeruginosa
  misc_feature (24)..(24): n is a, c, g, or t
  misc_feature (116)..(116): n is a, c, g, or t
atggatgaacaactgctcggcgcncttcttgtcctccatgcggatctcgttgaagttggccggcgtgccgcccttgctcgaacggctcttggtgccgctctgggtagcgttcgccngcagctcgtagggcaccgtctgctcggcgttgtagacacgcccggtgatgatcggccggtccgggtcgccttcgaggaagctgacgatcacttcctggccgatccgcgggatctggatcgagccccagttcttccccgcccaggcctgcgagacgcgcatccagcaggagctgttctcgttggactggtcgtggcggtcccagtggaaatgcaccttgacccggccatactggtcggtccagatctcctcgcccttgggcccgaccaccaccgcagtctgcgggccacggacgatcggcagcggagtggtcggcaaggggcggtaggcctggccggcatcgatgcagtccagctcgctttcgaactgcgcgccgaccccgccgccgccggtctcgtagagttcctggaccacccggtactcggcgccgaccaccaggtactcgcggttctggtcctcgcgcgggtagccgctgagcttgaacaggtggcccgaacccaggccgcgggcgcggccgcgcaggcgcacccgttcgtagcgcgcctgcaaggcttcgatacgggtccgcgcgtactgctcgccgtcctggctctgcacgtattcgccggggtagtcgtacagcgggtagtcggccgccgcgtgcgagcgggcgatgttcgaacgcacctccaggcgcgcgccgggacgctggaagtcgtagtcgttgaggctcagtga

SEQ ID NO: 356945 - DNA, 1431 bp, Pseudomonas aeruginosa; identical to SEQ ID NO: 346332

SEQ ID NO: 356946 - DNA, 228 bp, Pseudomonas aeruginosa
atgaagtcaacaggccgcaatccatttcaggtcttccgtgaccaatgggccatcatgagtttatacgagcgcttcgagcaggtcgtcgccctcgttctgtcggcggtaattgccgtcatcatcgtggtgtcgctgctccagctcatctccatcgtcttcacgctgctgatccttgatgcgttcaatccgctggatcacaaggtattccagagtgtgttacgctcttga

SEQ ID NO: 356947 - DNA, 990 bp, Pseudomonas aeruginosa
atgatcagcaagtggctgtttagcggcgccttcctgttcgagctgagcagttgggcgagcgtcttcgccgacctgccgatcggccaggcgctggcgctctacctgttcgcccacggcctgggcagcgccctgctgtgcgtcggcgtatggctgctgctgccgcggcgctacaagttcccgctgccgtggagcccgttgttcctcttcagcctggccttcttcgtgccgctgatcggggcggtcggcgtcgccgcggcggtattcccggcgctgtacctgccacgccagcgtggcgagcaggcctggcaggcgatgggcgtccccgagctgccgttccggccgaaggaaaagcgcctcgacatgatgttcagcgacggcggtctgcaggacgtcctgcgccatgcgccggacccgaaccagcggctcacggcgatcttcgccacccggcggatgcccggcaaggaggcgatcccgatcctcaagctggccctgcgcgaccccgccgacgacgtccgcctgctggcctactcgatgctcgaccagaaggaaagccggatcaaccagcgcatcgaggccgccctcggccgcctcgccggcgccacgccggcgcgacgcggcgcgctgcacgggaccctggcgcgctggtactgggaactggcctacctggggttggcccagggcagcgtactggagcacatcctcgagcaggcgcgcgagcataccgaccaggcgctgcgcggcacaccctcggccgacctgcatctgctggccggacgcatcgccctcgaacaaggccgcctggaggatgccgggcacgccctccaggccgccgaggaggcgggaatcgatagtgcccagctggcgccgttccgcgccgaggtggcgttcttccagcggcgctaccgggacatcccccggcttctcgccggaatgcccgacgacatgctgcaacggccgcccttcgcggccctggcgagatactggacatga

SEQ ID NO: 356948 - DNA, 156 bp, Pseudomonas aeruginosa
atgacgccatggtgtccttttgcctgctcttgcctcccgcgtgaccgccgcgacgtcatcggaaaactcaccgggcggggaaggaagtacgggctgccgggggtttatgcgatcgacaggatcccggccaaggcatacgaagcggagaagtcatag

SEQ ID NO: 356949 - DNA, 555 bp, Pseudomonas aeruginosa
atgtctgacaccctcccccaccccagccgtttcacccaccaccatcgggtcctgcacgccgtgctgctggatgaggaaggctggttcgtgctctccgacctggtacggctgctgggccgttacctgggcggtcgggcgccggcggcgttgtgtgacgaggcgccgtggccgctggcgacggcggagcagcgcgagcgcttgttcgccctctgccatgcactggaacggcacctggatgccgatcagtggcggctcgcctggctccatgacgaacgccacgggccacgccaggactgcctggtcagcgagtccgggctctacgctctgctctggctcgcagtgcctggcgcggcacggggtttgcgccgttgggtcagcggctcggtgctgccacgcctgcgcagccagtcccgccccaacgccacgccccagcgcgccgtgctgcactggaaaaccgccgagatcgacaccctgcactggcaaggcaagacctggatccccctctccgactgcccccacctcctcgacagcccacgcccgctgatccggacctga

SEQ ID NO: 356950 - DNA, 321 bp, Pseudomonas aeruginosa
atggggcgtgccggatttctccagcaggatttccatttggcgcatggggttggcgtcattcgcatccacgccaaaggcgctctggaagactattttcaccttgcggcttgcggcggcttcgacgaacggcaggagcagatcgcgtacgttcaggtagccggcgggcaggagcatgtaagtgcgatccacaccctccagggcggtggcgatggtttccggtttgccgaaatcgaagggcgtactctcgactccatccattttccgatttgcgcgggaagcggccttgacggcctctcccttggccagcaggccttcgactaa

SEQ ID NO: 356951 - DNA, 402 bp, Pseudomonas aeruginosa
atggcctactaccaactgaagtatctaggagaatcgggtggtgtggtttccgtcggtgttgaggcggagaccaaagagcaggccattgccatgtccggcatccccgagtcggtcatccatagcgttgctgttgaccacctcgggggtatcaagtcagccctgctcgataagaagtttccccttgtcgagcaggtcctcatgttgtctgccattgcttcaaaaatttcttcgggtaagaccttcggcaaggcggttcaggagtcagtgaactacaaggcacttaagatcacctttgctcaaatcgactcctgtcaaaccccaaaagagtacctgtcgcttcttaggttcgacgaaaccgcagtcctgaatcgccccgggtttcaaggaggccgattggtttaa

SEQ ID NO: 356952 - DNA, 5766 bp, Pseudomonas aeruginosa
atgcccaagaatgtccacgcggcacatctttcctggattcggcccccgatcatcaagagcgtcgagatcgccaaggcgtctatcgacacctacttcaaaaaacatgctgatctacagaatcctcctcaaggggcacaggctgaatggtttgccaaccagaagaaggcgatggccgatgccttccgcaacgtcagtgaacacgtagagttgattcactctgcgctgactgtttgcgatagccccggaggctcggctttatcggttgaaatgcgggtagtctgcaccagtgtccaagaaaaactcctcgaagaggagaaggtggcccccgcaattcttgccatgatgtccggcatgatcatgctgccaaactatctgaagatggtcattgatggagcccctgatgctcctggcatcctctccaggcagatcaatgaaatccgtgaggtcaggggcgttcccttgcttgtcgaggacagtctccccccaagcatgctctcattcgagtttgttgatcctccccgcaagattcataacgttgacgatgcccggcagcaggaggtcttctcgacctcatctcgtcgcttccagacagccttcagttcctacattgggacccagaacaaaggcgcgctggcggacatgcgccaggtcctccgagaactccaggaagtttctcataagccggaagtgggcgacttctggtgggttggtgagtgtctactcgaggcacttgccatcgggggccttcgtagtggcggtaacaccgtctcccaggttcgcatgctgtctgtcgcggttcagaaaatcggtctaggtggtgaagaagccgccctggaagtcctgggtatcgatcgcttcaagtcgttgctctacgtactgagcctaagttcaaaaagcacgcctagcatcgaagccgcgttgagggttttcaatgtcgggaagtcagtcgacaccgactcgctggcaaagcttcagagcaagctcgaatctactgaggctacaaccattgctgacgtcgtcctggagctgaagcctcttctggatgcagccatggtctctctggggcgggccctgggggcacgctctgacgacatcttcagtgtccagctgtctgcatatagcgcggcgatgcgttcagtagcgaacgtgttctatatggtgagcgaggatgagcttgcaggggttgccaataagtccatcgcactcgtggctggcaaggaaggtatttctgccatcgctgccgaggtggtagacgatctgaagtcttacatcctctacctcgacgagcgcatcaatctcatcaatgaaaatgacgcgacaaaggcactgaacattgagggtgtcggtgccgacgttctggacacactcgtctcagaatgtttgatcgaagtggtgaagactcgtcgttccgtttcggttcacgtagaaagtggcattggccaggatgaactgaaggacggacttgcatctctcgtcaatactgctgcggccttgaagttttcgggagcagaacaggttggtgatttgctcggtgcagtctgctctgggatggtaggtctcctagataatgcggaactcacgtacagcccggagttggatctgctggcgaaagccttggtggcgattgagatgtacctcgaagccatcaaatccaaacttgaacctgatcccgaaaacctgacgaaggcagctgaagctctccgcgaactcgggatagatttcactgaggtggctccggtaaccaccaacgaacttttgattaaatttgaggcagcccaggaagaggtacgcgaagacgatgatccgttcctcaccgagcttttcgagctgaggagcgtcttcgaagatagcttcacgagcctcgacctgcgtagtcgttcgtccattgagcaactctacaaggctgcagaccgcctctccatggccgcccgtatgcacggtcatgagtcgttcggaaagatcgccagtggtgttgctgccttcagcaaaggcgtaacaaaccgagccctcaaagaggatttcgaccatgcggaggagcatgacttgctgcgctccggcgtggagatgtgcctccgctgcatggatgaatactctctcaggaacaaggtctccttgtttgtgaaagatgtggccgatgcactcatggctaaagctgatccggaaatgcagttggcatacacgtctcatccagagataccggcatcgtctactaacgcaactcatcagcctgcagtccagaacaagctcgagcaagtcgttgccgagccggatgcagtaatactggcccatgagcaagaacgggaaatgcccgagggcgtcgatccggtcctgatcgatatcttccgtcaggagttcaccgagcaatacgcagcaatgagtgcgtatctcaaaagcgggcgaaaagacgtcaacgaagcgttttgccgtgtcgctcatacccttcatgggatttcgtccagtgctgattgcctcccgcttgcaagtgcatttgcagccctagagactcgcctgttccagttgagaagtgaagaggccgaactgctccagggtgatgtagaagccctcctggatttcctggcagatgctgaacgtttccagcaagctttcccttggaagactgaaactcccgcacttcactcctggctagaggttgtccaggcattggggtgcggggcggaagaggctgagtacgttgaggtcgctcaggtcactccagtttcgcatgctaaaccggaaccggatgctccgcaggaaagtcatcagccggaaaatttgaacccagtttcgcatgctaaaccgggaaactctgaaagcgatgatgtacaagagtccaccaccaagcatgcgcagcagccttctgccccgccggcgattgaatacaacccggagatggctgagttctatattgaagaagccgaggaagttctccctcagcttcagctgaacgtagaccgctggatgggccagatggatgaccatgacctggttaccaccatcaagcggcagatgcatactctgaagggcgctgcagctatggcagaggcagcttcgatcagagagattacccattacatggaaagcctcttcgagagtctttccctgagcatcattcctgcatcagatgactgcgccaggctggtcgagtatgttttggtcgcattggatcaaatgactagcgcgatgcgtcgcgctgtcgggtacgaagttccctcggccttgatccgttgcgttgaagctgcagtccagcataatcgagtggatcttggccttcttgctcaagagccctgcacagccggcgaggtcctccttcaagatatccagctagagaaggtggccacccaagatgccagggccgaaaccctagaagcttgtgaagcacaatctatcgcagagcttgaagaagaaacgcctaagactgaagagttcgagcaaggcatcgtccatcctcagggtgaggaaatctctttggcggaggaagagtcaggacacaaaaagactcgtcgcaggtctcgaggaaaaggtggtgcaaaacgtcacgcggcccgtatggcagctcacgctcaacccgctcaggaagacagtctggtggtgtcctcggagccggaagactcagtcgaggtcgagagtccagctttgcccgccgtcccggaagctacccccgaagagtctggcaagtcagtgccggcacctgtagcaattcccgaactcgttgaagtcccaccgtcaatttctgccgttactgtacaagagcaggaagtacaccatgagccagagcggcaaagcagaactcttcgcgagtcggtcgaaggcataacctctaaatctgccccaaccaagcctgtcagcagctcggtgattcgcgagatcctggcgaaagcccatgactccatccacggtgtcggcagcaaacgtcgaagcggtggctcggaaaaaatcaaagtggatcagcgactactggacactgcagtcgagcagtccagcgagctgaccgcagcccgatatcgccaacaggcgctgcatgccgagttgatgatgatcgtaactatcattcgggagaagctcgaggcgcaacagttgaaccacatgaagttcaccagcgccctgcgtcttcacacaaaccaacccgttccaaccgccttggcccatcaatcggcaggtgattttcagcttgagcgattcaatgatctttcagctctcaatgtgaccatgggggctcaactggcccagaccatccaagacgtcgaggaaatgttcgcacagggcaagctgatcaaagactcctaccgtcaacaggcggggctcatcagcagcctgcaacgagatcttctcgatagccgcctggtaccgttccaaaacattcgtccagccctgaccaacctcatcgagcgtgagtcttcaaaactagggaagaaagtagacaccgttttcaccggtggcgacgtaatcgtggacaaagtcatgctcgatgctgtgcgtgatccactggtccacctactcaacaatgctctcgaccatggtatcgagcctgaagcacagcggattgctcaagggaaatccgcgcatggcagcttggaggtaaacgtctgccgacgagctaagaacatcgtcatcactgtcaaggacgatggcaaaggcatcgataccacgatgatcaaggctaaggcactggagaaaggcatcatcaggcaggatgatcaactgaccgaatcggatctcctgagactcatcactcacaatgggttctctactgcagcaaaagtctctcagctgtccggccgcggtgttggtatggacattgtcgctacgacggtagaaagcatgggcggccggctggtaattgacagcaaggtaggctggggtacgaccttcactttggaaatgccattcactatcggctcgaaccgagctctcatctgccgtacgggcagtcaatggtttgcgattcccagctacaccatgtaccagatcatccagtgctcccgagccgatctggaaaaacagcggttggagaaggggaaagcggtacttcatcacgaaggaaagtccttcgaggttgtgcatctggccgacctacttgcaatgcctgagatgcgttccactcacgatttggaccaggaggtcctggtcattctgtgtcaacaaggcgaaatggctattggtattgaggtcgacagcactgattcaatgcccgagatccacatcaggaagctggacggcatcctttccaaagtgcgcgggatcattggcgagacagagatgcaagacggttcgccggtcttcgtcatcgatgtcatggagctggtgaggctcaacctcaagcggacagacaccggcttcaaggttcggcaaaaccgtgtcaagtctgtgaaacgagatctcaaaccggtctgcctcgtcgttgacgatgctacgagttatcgcaagctgttgcagaagcacttcgaggctcgtgggtatacggtcattactgcccgcgacgggcaggacgcaatggacatgctccctctcgagagactccccgaaatcgtcatggtggacatggaaatgcctcgaatgactggcttggaactcacaaaggcactgcgagcccgggctgaattcaatgaggtaccaatcatcatgctcaccactcgcacaaatctcgaggacgaggccctgcgagctggcgtaaacgtttatctgaacaagccgtgcgacagcatcgcgctcgataacgcgattgcagaagttcgcccagatcaagcattgcaagggtcagctgcatga

SEQ ID NO: 356953 - DNA, 207 bp, Pseudomonas aeruginosa
atgaaatcgatcaaagctctgcttgtagttactgctctgagcatctccagcttggcaatggctgaaggtggtgctgaccgaaccttcgcgcgcatggagcaggcacgccagacgtctctggaggcctaccgggtggcccagcagcagaaagttgaggctcctgtagccagcagtccaaccgagcaagcagagcacaccaactgctga

SEQ ID NO: 356954 - DNA, 1815 bp, Pseudomonas aeruginosa
atgacctccgcgcaaaccaaactgacccagtcgattcaagccggcctattcgacgccgcagagcctgccccggttcttctgcaggtggtggacctgaccttcgacgagaaggtgaaagccgcggttgaggccatcaagcagcaggtgcgcgaaggtcgtcgcctagtggtggcctggtcgggagggaaggacagcagcgtgacactgaatttggcgtttaccgccctgcgcgatctgatcgctgaaggtcacagtgttccggcactgcacgtaatccattcgaacactggcttggaaaatccagtgatcgagatctacaacaaaggccagatcagggcgatcaaggcttacgccaaaactgccggtatcgagactcgtgtttgggtggcctccccaaatctgtccaacgactatctcgttggcctgctgtccggccgcacgatcatgtcggtgggcaacaacaccaagtgccaacagatgatgaagaagtcagcattggaccgaatcaagcgccaagtgcgtgcctggatagccgaaaaggatggagtcaaagcgaaagacgcaaatctggtaagcctgatcggcacacgcttcgaggaaagcgcgcagcgcgctgcacggatgaaggcccgaggtgagagttctacggaagctgtcgatgcgatggaagatggtcaactcgtgttgagcccgatcgccgaatgggatgcgttcgacatcttcacctacatcgggcacgtccgctccgagaagattgaggcctactccgacttcgaagagttggttgatatctaccgggacgccaacggcggggactgcatggtcaaccagtacatctcgggccgggagcagaaccgcccaccctgctccgccaggacaggttgctgggcctgcggacgtatctcgaaggacactagcgccgaaaacatgatttcggctgagggcggaaagcacgcctggatgaagcccctgctcgacctgcggaactacatgctggcgcgacacttcgatccgtctgcgcgctgctggctggcgcgcacgatcaacgaagaaaccgggaccatcaaaatcgttcccaacgcctacgccccggaatataccctggagctgctgcgcctgattctgacgatccaagtccgggagcagatcgctgcacgcaagctgggcattgctccccgcttccatctgcttgaccaccgccagctgatcgctctggactgcctctggggccggtaccagtaccaacgcagcttcatggccctgcgcacctggaaagagatctacgagcaaggcaagcgttacgacattcccgatcttgcctcgattccgaagtacaccgagaaggacgtttccttccgtgcagaggttcccttcgcggatgaggaatatttcgccgcgtggcgcggattccgcaacgtggaagctgctgccgtggattgggaagacaccaccgttcttccgaacggcaagatcgttcagaacgcgaacgtaggtgacgagttcgagatcgacgaggaaggtgcggcattgttctgggagttcgacctcgactatgccctgaaccgaatctcggtgctggataacccctctggcgttgtccattacctggtcggtctcggaactgtaaccctctacaagggcagcctgggagagtgggatcggatgatgcgcgtgggcaaccaggcgtggttccacggcctgatgccgatcatcaatgacccgcatgcgctggtcgaaaccctgcaagcaaagttccagaaaaaggaagaagacaagcgaaatgccctgatcgggcagctggcgctgtttctctaa

SEQ ID NO: 356955 - DNA, 795 bp, Pseudomonas aeruginosa
atgacctacaggaagtgctccctcatgaaacgcaccctcctcatgctcgccatgctcgccctggccgcatgcaacacccccgcacggattcccgcaccggacagcgacaccgtggacagcggcaagcgtgccctggaagaactcgccaggctaccgccggcgatggagcgggtgcgcgtcggggacaccctgcggatcgtccgcgatgccggtgagatgccgaccctctcggcgttcaacgtcgccaccatttacgaactgacgctgtacaccgtgctcaacgacggcagcatctactatccgttcatcggtcgcatccaggccgcgcaccgtacgccgcaggaaatcgccaacgagctgaccaccaagctcgcgccgatctaccgcgagccacgggtcacggtgaacatcaaccaggcgccgggcaacacggtgttcgtcggcggcgcggtgcgcaacccgtcggccgtgccgatccccgccgccaacaacatggagcaggcgatcctcggcgccggcggcatcctgccggtgggcgacgcccgccgcgtggcgctcatgcgcgaggactcggaaggccgctatcacgcctacttcctcgacttcagccagttgatgaagatcgggccggaaggccgcaagcccctggccatgcagcgtggcgacatcgtcttcgtgcccaagtcgatggtcggcgaccgtatcgagggcgtcgacgtctacctgaaccagttgctgcccttcgccaagtccatcggcgtcggcgtcagctacaccgtcaacaacgatcgctga

SEQ ID NO: 356956 - DNA, 399 bp, Pseudomonas aeruginosa
atgagaacaacaacaagcattcgccgtgtcgctgccgtcctggcagcgctgcacctgctcaccttcgccgaggttccgctcgcccaggcggcgatgatcggcaccgccgaggtcatgcagcaacagcagcacaacctcgatcgccagcaactgctgaagatgctcgacgaccagggtgtacagaagaaactggaggccatgggcgtgccccgcgaccaggtggcgagccgcatcaacagcctgaccaacgccgagctggcacagttcaaccagcaactggaccaggcaccggcgggcggcatcatcggcatcatcgtgctgttcctggtgatcttcatcatcaccgacatgctttgcgccacggacatcttcagcttcatcaaatgcatcaatcggtga

SEQ ID NO: 356957 - DNA, 345 bp, Pseudomonas aeruginosa
atgctaggtacccggctaaaagccgcaagaatcagagcgggatactcgcagaaacagttgggcatgctggtgggaatggacgagttttccgccagcgcacggatgaaccaatacgaacgcgaacggcactcccccaacatgcggacttccgaacagctggccatggtcctccaggtccccatggcctacctctattgccccgaggacgagctggccgagctcatcctcaaggtgtccagcctgacacccgagttcaagaaagagctgacgcgtttcatcgaacagttgctcgcggcccagggatccaccagccgccagcctgtacgcacaaggagtgaactgtga

SEQ ID NO: 356958 - DNA, 342 bp, Pseudomonas aeruginosa
gtgaacaaaagcttggattcagactcgataaccaccgccataatggccctgcgtcgcctgcgcgacacgcacccggagcagtaccgggagctgctgccgttgtgcgcctcggggctggtggagaccctggtcggacagagcgacggggacgaccgcaggaaggccgagacgcagagcgagaccatcgcccgctggacctggctgcagttgctcggctgggcccagaacaacagcctcagccagcagcagatcgaaagcctctacagcatcgtcgaaggcatccgcagttgccggccgctgatgcaggagcgcgcccgtctcctgcaactggcgcgaggctga

SEQ ID NO: 356959 - DNA, 660 bp, Pseudomonas aeruginosa
gtggccaagacatggatctacgcagcctcggccgccgccatcggcggtgcgctgatcggcggctggctgctcgacccggctccgcccgaggcaccgccgcaggcccgccagtcccccgccgcccaggcagtctctgccccggcagcggcgctcgcggcgccgacggcggacactacccacatgctcgccccggcccccgtcgcagcgcccgcgccacgcgagcgggtgacgctctggcaaggcgaactgcgcagccgcgaaggcgcccagggcattcccgaatacctggcgcagatcgaacccgccctgctcgacacgctggcgctcggccaggtgctggaaatgagcctgccgggtcgcgagcggcccttgcaggcacgcctcgccagcacccataacagcgccggcctgccggtctggcgcggcggcctggtggacggcgacgaggcggaaagcctgaccgtggtgcgcggcagcctggaaacccacatcaatgtcgccaccctcgacggcagctactcgatcatcgtcgacaaccgcagcggcaagacccgggtgatcgacgagaacgacatcgccgcgcgtagcgacccgcatggcgatcatgtcgacgcgccgctcgccgagctgccaccgatgccgccgcccgcccagggctga

SEQ ID NO: 356960 - DNA, 1800 bp, Pseudomonas aeruginosa
atgaagaaatccctgctctgctccaccctcgccctggcggtagcctctgccgcccaggccgcgccgaagaccgtcgacatcatggtgctctacacccccgcggcgacccagaccggaaacggacgcgacatcgatgcgcggatcgccagctacatcgagttcgccaacaccgcctacgagaagagcggcgtcgacctgcgcctgcgcctggtgcacaagcagcgcctggactgggccgactacccgacggtgaccggcaccaacctcgatcgcttcatgcgcgacccgcaggtgcagcgcctgcgcgagcagtacggcgccgacctggtcagcctggtcaaccgctcgcagaacagcggcaacggctacatcacctgcggcatcggctacatgggctcgggcgataagaacagcgggcgcttccacggcaacgccaaggacattgcctacaacctcaccggggtcgactgcgggctcaacaccttcgcccatgaagccggccacaacatgggcctgcgccactcctacgagcaggacctggagtccagctactacgatccgcgctacgcccacagcggcacctacgaatggagccgcggctacggcgtgcaggggcgcttcgccaccgtgatggcctacccgcatgccttcggcaccaacaagcaggcaccgttcttcgccaacccgcgcctggtcaacgccgaatgcgccaaccagccctgcggtcgcgaagaacacgccgacgccgtacgcgcgctgaacagcatggccacgcagatcgccgactttcgcccgaccaaggtacccggcacggtcaacccgggctccggcggcgacacgccgaccccgccggacctgccatggtgcacgaaagccaagctcggcggcctgctcggcgatggcgagttcgccagcatggaaggctggcgcgcatggtccggcaacgcccagctgagcctggtgaacgtcgccaagggctgccgcgacaatgccttgctggtcgacgtgcgtggcttcgatctgctggtccgccccattgcccccctgcgcgccggcagcggctaccggctgagcggcaaggtcatgctcaaggccgccaatacccgtgaaaccgtgcgcatggcgctgctcagcgaacgcgccgatggcgccctggcctacaacccggcgcagagcgtcgaactgtcggtcagcggcaacgagttcagtcgcctggagaagaccttcgactaccgtcccgccgccgaccagcgcaacctctacgtggcggtctggagcgacagcggcgccagcctgctggtcgacgagatgaacctgcaggaagcgcaggccgcgccgccgagcgtaccgccggcgccgaaacgcatcgcctacgacttcgagagcggcatcggcggctggagcggcgtgcatgccagcacccgcgccacgcgcgtcgccagcgccgggcggctggccctggaagcctaccagcggcgctacgccggcaccggcgcgagcaccagcctgctgggcaacctggaagcaggccggacctacgcgttcagcgcggacgtacgggtcggcgacggtcgcggctcgcaggccatgacctatgcctacctctacctggaaagccagggtcggcccggcgaatacctgcccctgggctacaaggtggtcgagaatggccgctgggccagcctgcgcggccaggtgcaattgccgaaggggccgatcaagcgtgctgaactgatgatcctcagcggtaaccagcaggagtcgatgttcatcgacaacgtccagttgctgcagaagtag

SEQ ID NO: 356961 - DNA, 558 bp, Pseudomonas aeruginosa
atgacaagcgaccgcctggccggctacagccgcctgatggctaccctgaccctgctgttgatcgccggcatgctgctgctcaacgccgcgtgctggatcttccccgacctcgccagcgagcacggcctcggcttcgccctcaccgccaccggtgtcgccggcgacctcggcgttgtggcgcgggacatgccgctctggcaggccctcggcggcatcctcctgtcgagcctgccgctgctggtcctggccagtggactgcaggcgctgcgaaggctgttccagcactacgggcgcggcgagtatttctgcgaagacgccgcggcgctgctcggcaaggtcggcctgtgcctggcttgctgggtgctggcgaacttcctgctggaaccgctgctgacggtctgggtcaccttcctccaaccccaggggcaacgcatcgtcagtctcagcttcggttcggcggaactggtcagcctgttcgccgccgcctcggtgatggtgatcgcgcgcatccagcgcaaggccgccctgctcgccgaggaaaaccgccagttcgtctga

SEQ ID NO: 356962 - DNA, 219 bp, Pseudomonas aeruginosa
atgcccatcgaaatcaggctggacgtcatgctcgccctgcgcaaggccaggtccaaggacctggcccaggccatcggcatcaccgaacagaacctgtcgctgctcaagcagggcaaggtaaagggcattcgcctcgctaccctggaggccatctgcgcctacctggcgtgccagccgggagacctgctggagtacctgcccggcccgaccgaggggtga

SEQ ID NO: 356963 - DNA, 468 bp, Pseudomonas aeruginosa
atggcgaaatcctccgaacgattcgaatccctgcgccgggatatcgacgcactggcccgccggctcgacgtgccgtcggtgctgatcatgcgttccctgccccggcacatgcgcgtcgaggcctccgccggacgcctggaggacacctacccgatcggcgccgaaggccgcaagagcgtccatgaagacggcgcccaacccctctactgcgaacgcgtggtcgaccgcgacgccccgttgcacgtgcgcgactcgcgccaggagacggaatgggccggcaacgaggatgaagtcgagttcggcctgagcaactaccttggctatccggttcatacgcccgacggcaccccgtacggcaccgtctgcgtactcgacagccgaccgcgcgactattcggccgaggaacgggccctgctggaagaattgcggcgcaaggtcgaggcgctgctggcggaaaccgtctcatga

SEQ ID NO: 356964 - DNA, 1239 bp, Pseudomonas aeruginosa
gtgcacgcccgccgcctgccccacctcttgccgctcgccctcgccttcctgctttcgcccgccgccttcgctgccgacacgccagccaccgagctgctgcgccaggccgaagccgaacgcccggcctacctcgacacgctccggcaactggtcgcggtggacagcggtaccggccaggccgaaggcctcggccagttgtccgcgctgctcgccgaacgcctgcaggcgctcggcgcgcaagtccgcagcgcaccggcgacgccctcggccggcgacaacctggtggccaccctcgatggcaccggcagcaagcgcttcctgctgatgattcactacgacaccgtgttcgccgccggcagcgcggcgaagcgtccgttccgcgaggacgcggagcgcgcctacggacccggcgtggccgacgccaagggcggcgtggcgatggtgctgcatgccctggcgctgctcaggcagcaaggcttcagggactacggacggatcaccgtgctgttcaatcccgacgaagaaaccggctccgccggctcgaagcaactgatcgccgagctggcccggcagcaggactacgtcttctcctacgagccgccggaccgggacgcagtaacggtagccaccaatggcatcgacggcctgctgctcgaggtgaagggtcgctcgtcccatgccggctcggcacccgagcaaggccgcaacgccattctcgaactgtcgcaccagttgctgcgtctcaaggacctcggcgatccggcgaaaggcaccacgctgaactggaccctcgccaggggcggcgagaagcgcaacatcattcccgccgaggcttcggcggaagccgacatgcgctactcggacccggccgagagcgagcgggtactggccgacgcccggaagctgaccggcgaacgcctgatcgccgataccgaagtcagtctgcgtctcgacaagggtcgtccacccctggtgaagaaccccgcctcgcagcgcctggcggaaaccgcgcagacgctctacggtcgaatcggcaagcgcatcgagccgatcgccatgcgcttcggcacggacgccggctacgcctacgtgcccggcagcgacaagccggcggtgctggaaaccctcggcgtggtcggcgccggcctgcacagcgaggcggaatacctcgaactgtccagcatcgccccgcgcctgtacctgacggtggcgctgatccgcgagctgtccgccgactag

SEQ ID NO: 356965 - DNA, 1596 bp, Pseudomonas aeruginosa
atgaacgaaagcgtcgccagggtgttcgatcggattctgcgggggctcgggttgaagaccctgaacgcccagttcctactgtcctatgcactgatgttcggcctggccgcctgcgcctcggtggcgttgtacctgagcatgtcgatctcgccggaaaccatcaacgtggccggtgcgcagcgcatgctcagccagaagatggcccgcgaggcgctgcaattgcggctcggcgccggcgacccaaaggccctggccgcgaccatcgcccagtacgagcgctcggccgccgacctggatgcgggcaatgccgagcgcaacgtgagccggatgggcgcgccggagatcgccgcccagcggcagaaggtggcgcagatctggggccgctatcgggccatgctcgaccaggtggcacagcctgccagccaggtcgacctgcgcggcttctcgcagtattccaccgagctgttgggcgagctgaacaaactggtctcgctgatgagcgcgcgcgccgacagtgtccagcacacccagatgtggatcgccttcggttgcctgttggcgatcctggtgctggtggtgctcggccggcagttcggcctggcgccgctgatgcggcagttgcgcgggttggaggtggcgctgaccgaggtcggtgcggctaacttcacccatgccctggcggcgggccatgcggacaacgagatcggccgcatcgtcgccggctatgagcggatgcgccaggacgtcagcggtctgctggcgaacgtcaagcgcagcgcggcagagaccgacaaggacgtggccgaggccctggagcaggcgctcggcgccggcgaccaggtggcgcgccagcaccaggacctggaccaggtggccaccgcgatgaacgagatgagcgccaccgtggccgaggtcgcccgccacgccaaccatgcggcgcattccacccgcgacgccgcggccctggcccacgagggacgccgtctggtggagcacgccagcagccagaccggtgccttggcggaggaactggaacagaccgccctggcgctgaacaccctgcaccagcacgccggcagcgtcggccaggtgcttacggtgatcagcagcatcgccgagcagaccaacctgctggcgctcaatgccgccatcgaggcggcgcgggccggggaggccgggcgcggcttcgccgtggtggcggatgaggtgcgttcgctggccaaccgtacccagcagtcgacccaggagatccaggggctgatcgagcagttgcaggacggcgccaacgatgcggtagccgccatgcgcggtagcgccagccatgcccagagcaacctcgccgaggccgacagcgcggcccaggcgctgggacgcatcgtcgccacggtggaagagctggacggcctcaaccagcagatcgcgaccgccgccgaggaacagagccaggtggcccaggacatcgaccgcaacatcaccaacgtctccggactctccgagcaggcccacgaagggaccgccgcagtgctttcggccaaccagagggtcaaggagcacatggctggcttgcgcgtggtgctcggtcgcttccgcacctga

SEQ ID NO: 356966 - DNA, 1080 bp, Pseudomonas aeruginosa
gtgatccccgtcgcccctcttcccctgatcgtcccgctcatctacctgtcgtcgttcgtcgccggcatctggctgctggtctggctatcgctcctggccttcagcccgcgcgcgcgccagcgcttgcgccgccgctggccgagccgcggcctgctgatgctgctcctgctgatcccgttgggactgcgcgcctggctggagatcggtctctggcagtacgagcgcgaacgcgcgcgcgaggaagccgcgcacagcgccgtgctcgagcgcccctcgcgcctcggaggcatcgagatgcctgccggcacccggctgaagctggaactcaagcaccagccagaaagcttccgcgaagccgaattccccaccccggtgacgatccgcggcgtcgccacccgccacctgcaacgctggctgcagagcgagcaggacgacccgcaggacccatggaaaaccaccggcgtccatcccacttcgctgcgcctgcgtggcgagggcgtcgccgagatcgaaggttggcgttgcgacgccagccaggaaatcgccttcgccagcgagcgcgacgggcgtcccgccgccttcgaaggctgtagcctggcgaccggcaaccgcgccgacgagatcgacttccccgccggtgcgcgattgttcgccagcgacggcatggtctacaccgacggctaccgcgacgccgagcgctggcgggtaatgccggaaaccgggcaacgggtgtcggtgcgcggcatcgcgctgagcggcggcgccctggccttcgaccgcgaccgccgcctgtacggcctcggcggcacggtcctcgccgaggccttgcaactgggcgcctggcactacccggcgggcaccgaggtcagcctttcgccccgcgccgcctggcgcgcgcaacatccgcacgcctggctgttcagtcctacccgcgaagccgcttcgcatgcctccggcgagcgcctggaacacggcacctcgctgttgcagacgctggacggccaggaactcgagcgcctcgacaaccgcgcggcaggagtcatcgacttcatcgaactggagatcggcgacgaccgctga

SEQ ID NO: 356967 - DNA, 378 bp, Pseudomonas aeruginosa
atgaaaaaaagccccctgctgatactgagcgtactcctcgccgcctgcggccccgacaagctgatttccgacctgccgtcgccgaacgggcaataccacgtcgaggttcggaaatgcccggagaaaggttcgatcacctggggcgaagaaatacaggtctccctcctcgaaaccgggaaatcggaaaagtgccatgcagtcgtgcagtcgctggcgcaattcgacctgcgcgcatccgcggaccaattgcaactggagtggctgtccgatacggaactcagggcctggcaccctagcttcgagcccggaaaccaagcggacggctcgcgcctgaagcacgatgcgccggtgaagatggtctttgcgccgaagcgctga

SEQ ID NO: 356968 - DNA, 291 bp, Pseudomonas aeruginosa
atgaagtggtatagccgcatcagcctggggctcagcctcgcggtcgcgagcgctttcctggtggcgtactggcgatcgctcgacagccatagctatcccaatatgaatgcgcctgggctgttcgcctacctgctggtctttcctgcctgcgccctgttgctgcattccactgcgttggcattcgtgctccagcagcgaaagctggggagcgctcgcgaaagagcgctgcaatggatgatcaacctggcgctgtggatggcgccgctttgtttcatattttccagtctttaa

SEQ ID NO: 356969 - DNA, 1053 bp, Pseudomonas aeruginosa
atgtctatgaagcttgagcaattggttgccatagatctgggcaacggctcgacgagctacaaggccggtaacggtgccagcggggaatatccatccttggttgcaccctatgccggcagcagtcttggtggagccctcagtcgggaagtcttcaccacgaagaacggtcgtcgctacctggtgggtgatgattgcagggaagagggtgcgcgctctcgtagcacagactcgagcttctacaaatccgacgagattcgagtgctctttctgaaggtgctgaaggatgcgaatatcaagaacccggtcatcgctacaggattgccgaccgaattcttcgccacccacgcggctgagttcgaggccgatctgaaaaagtgggcacgagaagacggctaccatccagagctggtcaagatccttccccagttcgctggcccatggttcgatccagagctcgaggacgaagagggtaacccgcttgatcccaacgaaatggtcaaaggtaagtacggcatcatcgatatcggctacggcacgatcgacggtgggcagttcaataatggtcgtgtcagtgatatccgatacggcgaatccagtggcgtctctgacatccacaaagcgatctacacctctctgagtaaccctgagcagttgaacgagctcatcacgaagaagggagcgaagcttccgaaaaacttcgcattagacaaccagatcaacgagtacacgatggatgtctggctgagggaaggccacttcatctggcgtggaaccaagatcgatatggaaccgatcagctttcccgcgcgccaggctttcaccgatcagaccattcctcgcttcatcaagcagttgtggggctcaactgatttcctgaaagggatggtagccgccggcggtggaactaccgttcttggccgccctctcttgaagcgccacatcacctgcccgatctacagcgcaaaagaccctgacaagtcgattgtccgcgggtactaccgcttcatggtcagtcagtatttcaaagagcatgctttgatccgccaggggtaa

SEQ ID NO: 356970 - DNA, 696 bp, Pseudomonas aeruginosa
gtgagcggccgcttgcagcggctcagtgagctggtcggcgaaaccggcagcgacggcctctcggccattcatccaggtctcctccttgaggagcgccttgatgtcgtcggcggacttcccggtcttgttggcgtaggccatgaccagggtgtcctcgaccttgtcgagcagttcggcatagcggcgcatgtcgtccgcatctccgccctggatgccccagggcttatgcaccatcatcatggcgttctcgggcatgtagatggtgtctccggccatggcgatgaccgaggccatcgaggccgccaagccatcgatgtacacgtcgacgctggccgggtggttgcgcagcaggttatagatcgccgtcccctcgaagacgtcgccgcccggggagtggatgtgcaggttgatcttgttcaggtcgcccattgccttgaggtctcgagcgaactgcagcgcggtgatgccccagacgccgatctcgtcgtacaacagcacctcggcgacgccgcgaccggcagccttgatgctgtaccaggactcatgcggggcgttggcctcagtcaacgccgccgccatcggcagcatcaggcttttatggatcagggtttgatggctgcccatcggcgcctccattgttgctctcgttggggaaatccggcccaggcacgggtaggccggcgccgtatctgttga

SEQ ID NO: 356971 - DNA, 588 bp, Pseudomonas aeruginosa
atgggttctggtcttcgcatcttcttcgttcgccggcgaaacggcggaaaagttgccacgaaagccagctctagggccggaaaccgcgggggcgaccctggtcattcccggcgagaccgacaggctcgcctcgctctacgcccgcgcacggggcgaaggcggcaaggtggtgctctgggccggcggcgacgcgccgaaccagatggactggttgaagacggccttcgagagccgctttcccggcgtgaccctggacgtcacggtggacctctccaagttccacgacctgcgcatcgaccaggaactcgccgccggcaccctgacgccggacgtggcgatgctgcaaaccaccttcgatttcgacaaatggaaggcccgcgacgtgctgctgcgctacaagccggtcggcttcgcccggcagaagaaaggctacgccgatcccgacggcgcctatgtcacggcctacaacaacgccttcgtgccgacctacgcttccgtccggctgccagcggagcgctatccgacgcgcttcgccgattacctgaagccggccttcaagggcaagctggtgctgacctatccccatga

SEQ ID NO: 356972 - DNA, 990 bp, Pseudomonas aeruginosa; identical to SEQ ID NO: 325098

SEQ ID NO: 356973 - DNA, 237 bp, Pseudomonas aeruginosa; identical to SEQ ID NO: 96025

SEQ ID NO: 356974 - DNA, 366 bp, Pseudomonas aeruginosa; identical to SEQ ID NO: 96026

SEQ ID NO: 356975 - DNA, 1686 bp, Pseudomonas aeruginosa
atgacccatctaaaaatcaccggcatgacttgcgactcgtgcgcggcgcacgtcaaggaagcgctggaaaaagtgccaggcgtgcagtcggcgctggtgtcctatccgaagggcacagcgcaactcgccatcgtgccgggcacatcgccggacgcgctgactgccgccgtggccggactgggctacaaggcaacgctagccgatgcgccactggcggacaaccgcgtcggactgctcgacaaggtgcggggatggatggccgccgccgaaaagcacagtggcaacgagcccccggtgcaggtagcggtcattggcagcggtggagccgcgatggcggcggcgctgaaggccgtcgagcaaggcgcgcaggtcacgctgatcgagcgcggcaccatcggcggcacctgcgtcaatgtcggctgtgtgccgtccaagatcatgatccgcgccgcccacatcgcccatctgcgccgggaaagcccgttcgatggcggtattgcggcaactgtgcctacgattgaccgcagtaagctgctggcccagcagcaggcccgcgtcgacgaactgcggcacgccaagtacgaaggcatcctgggcggtaatccggccatcaccgttgtgcacggtgaggcgcgcttcaaggacgaccagagccttaccgtccgtttgaacgagggtggcgagcgcgtcgtgatgttcgaccgctgcctggtcgccacgggtgccagcccggcggtcccgccgattccggggttgaaagagtcaccctactggacttccaccgaggccctggcgagcgacaccattcccgaacgccttgccgtaatcggctcgtcggtggtggcgctggagctggcgcaagcctttgcccggctgggcagcaaggtcacggtcctggcgcgcaataccttgttcttccgtgaagacccggccatcggcgaggcggtgacagccgctttccgtgccgagggcatcgaggtgctggagcacacgcaagccagccaggtcgcccatatggacggtgaattcgtgctgaccaccacgcacggtgaattgcgcgccgacaaactgctggttgccaccggtcggacaccgaacacgcgcagcctcgcgctggacgcagcgggggtcactgtcaatgcgcaaggtgccatcgtcatcgaccaaggcatgcgcacgagcaacccgaacatctacgcggccggcgactgcaccgaccagccgcagttcgtctatgtggcggcagcggccggcacccgtgccgcgatcaacatgaccggcggcgatgcggcgctcgacctgaccgcaatgccggccgtggtgttcaccgatccgcaagtggcgaccgtgggctacagcgaggcggaagcccaccacgacgggatcgagaccgacagccgcaccttgaccttggacaacgtgccgcgtgcgctcgccaacttcgacacacgcggcttcatcaagttggttatcgaggaaggcagccatcggctgatcggcgtacaggcggtcgcgccggaagcgggtgaactgatccagacggcggctctggccattcgcaaccgcatgacggtgcaggaactggccgaccagttgttcccctacctgacgatggtcgaggggttgaagctcgcggcgcagaccttcaacaaggatgtgaagcagctttcctgctgcgccgggtga

SEQ ID NO: 356976 - DNA, 276 bp, Pseudomonas aeruginosa; identical to SEQ ID NO: 325094

SEQ ID NO: 356977 - DNA, 351 bp, Pseudomonas aeruginosa; identical to SEQ ID NO: 331798

SEQ ID NO: 356978 - DNA, 435 bp, Pseudomonas aeruginosa; identical to SEQ ID NO: 325092

SEQ ID NO: 356979 - DNA, 648 bp, Pseudomonas aeruginosa
atggaaccgcttgcattcgtgaacctgttcttcgttgaagtcgccgaccacggcaattactggagcgtctacgggaacatccttgatgcgcgcggcgaccagggcttcgagtgctttgaccctggccagggcatcgtcatgtgcttcgcatttctccagcatgtagcgcagcgaatcgagcagttcgcccttgcttgggttcatgccgatatcgtgtccgattgcctcccaggcctcgagcacagtgaccacttcggacctgaagccggcgtaccagagattcacggcatcttccttggcgagcgggtagctgagcccggcagcggtcaactggtcttcggatggcggtgcctgttcgaactgctccacgggcgtttgtgccggatcggcgagttggatgggtgcgtggcaggggtagcggatctcctcgccggaaatgctgttgcagaagccggtgcccttgcagtcgatgcagggcggcggcgcctggtccttgatcatggccagcaggctctcagccgaggagtgaacatcgtcgaggtccgtcgaccagcggtgcggggtgttgtcgtggatgttgtccagggcttcgacgatgccgcgcaggcgggtggcgcactgctcgatcagttggtgttgggtagatga

SEQ ID NO: 356980 - DNA, 804 bp, Pseudomonas aeruginosa
  misc_feature (24)..(24): n is a, c, g, or t
  misc_feature (779)..(788): n is a, c, g, or t
atgcgtcctcccctttcccaggtngtcgtgctggtcagtcaccttcaacgacctcggcagcgcagtcgcctcgccagcctggtggccggcctggcggcgggctacccggacgtccatatcgaggtgctcgacacctcggtatccgaagccctgcaaaccgcccgcgatctcgaacagcacggcaaggccgacgtgttcgtctgtgctggcgccactgccgcctacctgcgtagacacctggcacgtccggttctgacgatgcgcgttggcggcggagacctgttgcgtgcgctggagcaagcccgcgaacactcctcccatgtcgccctgctcagctacaaccgcatcgaccgggacctgcaagccatgcgaacgctgttcacggtgcaggttcaccaggtcgcctacaccaccctggaagaggctcgccaggctgtcctggaggtagcccggctgggttgccgcagcatcatcggttcgtcgacggtggtggagctggcggaacaggcaggcctgcacggcgtgctgtcgctgagcgaagacactgcgcgcaaggcgctcgaggaagccatgggagtcctcgacagccagcgcctggagatcgccaagcggcggcatctggacgcggtgctgcaacacattccaagcggtgtggcagcggtcgacaaccagggtgtggtgcaatcgctcaaccctgcccttgcccagttgctggagttgccggtcagctcggctctgggtcgaccgttacagcagctatgcccggagcttgacctgcnnnnnnnnnnctgcaacaggcgctag

SEQ ID NO: 356981 - DNA, 1131 bp, Pseudomonas aeruginosa
gtgggtccaggccaggtggcggctgaagccgatgttgaccaccggcaggccgggcagcgaggctcccatcacgtcgagccggccgggaatggtcaggtgcatctggtagaaacgcatcgcgccgttccaggggaagtgcgggttggccaggagcatgcccttgccgtccgccgaacgttcgctgccaacggcaatggcgttgctgccgcgctccaggcggaagcgctggcgccgctgctcggcgacctggaacgcctgctcgccgctcagggcgaccttctccgtgccgggcggcgcggcggccaccagcgcgtcggcgaactggccgaccccgccttcgaccagcaggcgccgggtcaggcgcagcaggtcatcggtcgcgatggcccgcagccagggctggccaaggcaactggtggtcttgccgtcggcctcgcggaggaagcggttgaaaccggcggcgtagccttcgagcaactggcgcaccgcgggcgtctgcgcctgccagaaggcttgcagcgcctcgggttggttgagccaggcgtagaagatgtcggacggcaggttgtccagctcggccgacgacttgccctcgctgccgaaatagcgcgcccgctcgccgcgcgcggtgacgatctcctcggccagcaggcaggcgttgtcgcgcgcgtaggcgtagccgatgccatagcccaggccgcgctcatccttggcccggatgtgcggcacgccataggcggtccagcggatatccgcggccagcccggtcggccgcggcatatcggcctggaccggcatcatcgaacccaacagcatgccggccaggccggtcagtacggtacgcatccccatcgatgtcgtttctctgcaaagtggtggccggaacggccgggacatgcaacgaaaacgccctgcgtgccgggcatcccctggcggggaaacgggcaacacagggcgtggcggcgtggcgccgatcagctggccagggcgtgctcgtgcagggcgcgggccgcagtaccgggcttcaggtgctggtacagggagccggagatttcctcggcacgcaccggcagcaccgacagcagggtgtcgctgaggccatggctggcctggcagaagccctgcatgtag

SEQ ID NO: 356982 - DNA, 441 bp, Pseudomonas aeruginosa
ttgcacggcgacctctacctggtgctcaccaccatggaggaggagagtaacgccggcgcgctgttcgccgcgcgccgactgccgggcgacatcagcatcgcggtggaagtcggcccaacggtagccgaatacggcacccggctgtgccgcgacccgatcgtcaacagcggcgactccaagggttattacagccgccatgtcaccgaccgcctgttgcgggccgccgaacgctgccagtaccagccgcaggcggcgctgctggtggacttcgcctcggacgccagcgccctgctgagccacggcgaggccgcgcaggtcggctgcatcggcattccgaccgagaacacccacggtttcgagatcgtcctggaagagggcatcgaggcttgccggcggacgctggtcgagttcctcgtgcaaccgccggacgacgaagcctga

SEQ ID NO: 356983 - DNA, 252 bp, Pseudomonas aeruginosa
  misc_feature (236)..(245): n is a, c, g, or t
gtggtgctgaacaagggcggcggcaacggcgccgaagccttcctcgacctgaagctggccaagggcaacgcgcacaagctggtgatcggcaccaacaatgtctacctgctgccgttggtggcccggctgggctaccaatggaccgacctgacgccggtggcggcggtggccgaggacgacttcatcctctggacctaccaggcggcgccgtgggcggacgccgcggcgttcctcgnnnnnnnnnngatctga

SEQ ID NO: 356984 - DNA, 903 bp, Pseudomonas aeruginosa
ttgcaggcggaagacttccagctcggctgcgcaccggcgatcaacctctttccgcggacctcggagccgctgcgcccggacggcacccgcagcgagtaccgcctggtcgccgacagtcaccgcgagaacagcgtggaaatccatagcatccgcgccgtgcgctcggttgccgggagcaccgtgcagccagtcccggcctactatggctgccgccacgacagccacctcggcacgctctactggcacgcccggcgcatcgccgggctgaccccgaaccggctgggcagcgacctgctgctgagcctggtggataccggcttcgacccgttgcgcgaggccccggccttcagcctgaccgccgagctgctatgcaccaatcgctatctggccgagcgcctgggtgccggcaccgcgctgggcttcgaacggcccgggccggtcgccgccgcacgcctgcgcaacgcgcccagcgcgcagagccagccgcgcctggacggccagtcgcgctggagactggtctcgcagctgaccctcaaccacctctcgctggtggaaggcccgcgcgccctcgaagccctgcgggaaatcctcgccctgcacaacctgcgcgacgacgccagcgcccgccggcagatagaagggctgaggcaactcgactgccagcgggtggtggcgcacgtcggcgaggatgcctggcgcggctggcgcaatggcctggaaatccgcctgcgactcgatccgcaacacttcgtcggcgccagcggcgtgctgttctccgccgtgctggcgcagttcttctcgctgtatgccaccgccaaccgcttcgtgcgcacggtcctggtggaagccgacaaggaggtgaagacatggcaaccccaggccggctcgccgctctccctctga

SEQ ID NO: 356985 - DNA, 1770 bp, Pseudomonas aeruginosa
  misc_feature (524)..(533): n is a, c, g, or t
atgaaacccagctacgacgacacccgccagcatctgctcgataccggataccggatcatggcggtcaaaggcttctccggcgtcggcctcaacgaaatcctgcagaccgcgggcgttcccaagggctcgttctaccattacttcaaatccaaggaacagttcggccaggccctgctggaggactacttccgcgtctacctggcggacatggaccagcgcttcgccgcgccagggctgaatgcccgcgaacggctgatgagctactggcagaagtggctggacaatgcctgcccgccctgcgacgagcagcgctgcctggtggtcaagctcagcgccgaggtggcggacctttcggaaagcatgcgcatcaccctgcgcgacggctccgacgggatcatcgaacgcctggtcggctgcctcgggcagggccgcgacgacggctccctcgcgccctgcgatgcccggcacatggccagcgcgctgtaccagttgtggctcggcgcgagcttgctgagcaagctacnnnnnnnnnnaagctacaccgcagcccgggaccgctggaaacagccatgcagaccacccgcagcctgctggaaatctgaggttccgccaggaaatacccgccccgcaagaggcgggtattttttcgacccgtcagtagttgactggtctaatttgcccggcgcacggtatgaaccgttcgccacatgcgtcagacagaggagtctggatatgtcccaatccacgcaggtcaaccgccgcatcgtcctcgcctcgcgcccccacggcgccccgacccgggataacttccgcatcgagcaggttccgcttcctgagcccggcgcgggccaggtgctgctgcgcaccgtctacctgtcgctcgatccctacatgcgcggacggatgagcgacgcgccgtcctacgcgccgccggtggaactcggcgcggtcatggtcggcggcacggtcagccgggtggaagcctcgaaccatcccgggttcaaggtcggcgactgggtactctcggccaacggctggcaggactacgcgctttccgacggcagcggcctggcgcgcctgggcgagtcgccggagcatccgtcctacgccctgggcctgctcggcatgcccggcttcaccgcctacatgggcctgctcgacatcggcaagccccaggccggcgagaccctggtggtgggcgccgccaccgggccggtcggcgccaccgtcggacagatcggcaagctcaagggctgccgggtggtcggcgtcgccggcggtgcggaaaaatgccgccacgccgtgcaggtgctcggcttcgatgcctgcctcgaccaccatgccgcggacttcgccgaacgactggccgaggcctgcccggacggcatcgacatctattacgagaacgtcggcggcaaggtcttcgacgccgtctttccgctgctcaacgccaaggcccggatcccggtctgcggcatcgtcgcccactacaacgacaccgacctgccgcccgggccggaccgcttgccggcgctgatgggcacgatcctgcgcaagcgcatcaaggtgcagggcttcatcatcttcgacgactacggccatcgctacgatgaattccagcgcgacatgtcgaagtggttcgccgacggcctcatccagtaccgcgaagagcgggtcgacggcctggagaatgcccccgaggccttcttcggcctgctccagggacgcaatttcggcaagctggtggtgcgcgtcggagccgacgcatga

SEQ ID NO: 356986 - DNA, 129 bp, Pseudomonas aeruginosa
atggtggtgaccttcctgccctgcgccaggctcaccggcgtgatgcaggaacgggtggcctggccgtcgatatggatggtgcaggagccgcacaggcccatgccgcagccgaacttggtcccggtatag

SEQ ID NO: 356987 - DNA, 2466 bp, Pseudomonas aeruginosa
gtgctcgaatgggggcgcgagagtccctacgcgagtttcttcgacatccagtgggaatcccacgacgccgcgttgcgcggccaggtgctgctgccgttcctgcgcagcgactacggcgaggtcctggctgccggggagatcggcctgagcctggaccgcgaggccggccgcctgctggcgagccacggcgagcagcgcttccccctctggccgggcagctacccggagctgctggaagacagcggcgagccgcgcctgtcagacctggccggcggtttccgcgagtgccggcaggaccgcgaggccttgcgcgagatgcagcgtcgactggcggctgcgctcgccgagagcgctccgcgcgccgccctggagcgcacgctgggcaagctccaggaacgccacgaggaggctcgccaacgcctgcaccgcctgctcgaggcgcagcactaccgcctggccagctggcgcaccgcggcggacgacatcaactggcgccgtttcttcgacatcagcgaactggtcggcctgcgggtcgagcgcggcgaggtgttcgaggccgtgcacggcaaggtcttccagttgctcgaggacggtctgctcgatggcctgcgcatcgatcacgtcgacggcctggccgatccgcgcggctattgccgacgcctgcgccgccgcagcgagcggatccgcgcccgtcgcggcggcgcgccgatgctgctgtacgttgagaagatcctcggtggcgaggagcgcctgcccgaggattggctgtgcgacggcaccaccggctacgacttcatgaaccaggtcagcctgttgcagcacgatccgcgcggcgaacgaccgttgcgcgaactctggcagcgggtcagcggacgcccggaggcgtttctcgacgaggtctaccaggctcgccaactggtcctggcgggaagcctcgccggtgacctggagaacctcgcccagggtcttttgcgggtggcgcgggccgacctggccagccgcgacctgaccctgggcggtatccgccgcgcgctgttccagttgctcgcgcgctttccggtctaccgtacctacgccggggcctgcggtcgctcggtgcaggatcgcgaggtgttccgctatgccgcagaggcggcccgcgaggatctcgacgaagccgaccgggcggtcctcgaccatctcgaacgctggctcggcgggcagccgctgcgcgagctgccgcccggtccgctgcggcgcctgcgcggcgagttgctggcgcgcttccagcagttgagttcgccgaccgccgccaaggccgtggaggataccgcctgctatcgctcggcggccctgctctcgcgcaacgacgtcggcttcgacccgcagcgcttcgccgcttccgccgaggaattccatgccgcctgcgaagccaggcgcctggccagcccgcgggccctgctggccaccgccagccatgaccacaagcgcggcgaggacgcccgcgcccgtcttgcggcgctcagtgaactggcgccctggttcgcgcgtaacgtcgagcactggcaaagcctggccacgccgttacgccgcgacctcgccgaggggccggcgccgagtcccggcgacgagctgatcctgttccaggccctgctcggcagttggccgctcgacgcgccttgcgacggcgccgccctggaccaagcgttcctcgcgcggatgcgcgaatggcaatgcaaggccttgcgcgaagccaagctgcgcacgcgctggaccgcgcccgacgaagactacgagcgcgcctgcgccgactatctggaacaactcctgcgcgcgccaccggcccaggccctgcgccagtcgctgggcaacgcggcggcgcgactgatgccggccggggccctgaatggcctcgcccaatgcctgctgcgcctgacctgcccgggtatccccgatctctaccaggggcgcgaggactgggacttcagcctggtcgacccggacaaccggaggccggtggacttcgcccggcacgccgccgccctggccgcgccgacgcccttcccggaactgctggagcactggcgcgacggtcgcatcaagcagaccctgatcgcccgcgtgctggggctgcggcggatgcagccgggcctgttccgcgacggcgactacctgcccctggaggtcagcggcgagcatgccgagcgggtcctggccttcgcccggcgcagtcgtcacggttgcctgctggtggtggtcccgcgcctggcctgcgccctgctcggccacgccacgcagccgcaggtgccggccgaggcctggggcgacacctgcctgctgctgccgccgagtctctccgaatgcacctacagcggcctgttttccaccatgccgctgcccagcgacgggcacctgagcctgtccgaagtgctcgccgactttcccgtcaacctgctttaccgcctcgcccaggaggagaccccatga

SEQ ID NO: 356988 - DNA, 618 bp, Pseudomonas aeruginosa
gtggacgacgacgaatacaccgagtggctgcgtgggctgaaaagcgacgagggctatcacgccaatttcctggtctgggagtcgcaataccaggacccggaatacctggcgaaactgacgctcggtcagttcggctcggagatggagctgggcatgcacgactggctgcatatgcgctgggcttcggtgactcgcgatccttccaacggcgcgccggtgatgagcgaccgggtaccatcggacttttccccgcgctggttccgcccggagaacgacttcctcggcgacccgttttcctcccatgtgaacccggtgttctggtcgttccacggctggatcgacgaccgcatcgaggactggtatcgcgcccacgagcgtttccatcctggcgaagtgcagcgccgcgaagcctggctgggtccggcgacccatggatgcgggctttcggatgtccaggcgagcagcaactcggtggagctggacgtggaaaccatgaagctggctttgcgcatcatcttcagcgaagaagatcaactgagcggctggctcaagcgtgcgccgcggcggccctggtacgcgcgcaacctgaagctggcgcgcgaccagctcaggcgctga

SEQ ID NO: 356989 - DNA, 1287 bp, Pseudomonas aeruginosa
atgctcgacaagttgcacctcttcgttccgttccgcctcgagcacatcgaactgctcggggtggaagggcgtgcggacccggtgcatgtcgtggatctggaaagcctgggcgtgccgctccaggggcagatcagccgaggggagggcggagagctacaggccgactacctgcggcatgtttgggagtcgctgagcacgggcttcacgccgcttgcgttcaaggtttttcaccagtcgctgggcaagcgtctgatgcccggcgtagagctgaaagccagcccggcgaagttgctccaggggcataacgtgttcggtccgacctgtatccagaagggggccgaggtgatgttcaagtggctacacgccacgtatcccgacctgttcgccaagctcgatgttccggcgactcaggtctacgccctggactgcacgtattccagccggttgccggatgagcgcaccgcgctccaggtcatccaggcgctgaccaacgtcagcaacggccacaccaagagtcgcggcgacaactaccagacgtccgcgtactggggcgcgaaagaatcccgcctaaagcgcttgaaggcgtatctcaagcacaccgagtttcaggcccagttggacgaattgaagcgggcagggctggccgatctgtcggctgctcggtctgctcgggtcatgtctgacccacggttgcaggagtgggtgcgctacctgctccgcatggaagccacggtgatgcaccgctggcttgagcgtcggggcattccgtcccggctgaatgacttgatcgcgtaccagcagcagctttcgggggagggtcgctgtttgatccaagagtgctggcaggcggttacaggcgatttgttcgcggcctttgagggtatccagatgagcgtaattgatgatgaaaaagtgctggccgcactgctagagaagttcaccaaagaaggcaagggccggtataccaagcaacgcgaagaggcgggagttgtcgttccctcggtcttcgtccctggtaagccagatgatagctatgcccggaacctgttccggacgtatcgcagcctcaaggactacggctggcaggagaccatggattcgatggctcgccggactttctaccgccatgtctctgacttgtgtgaggcgggtctttccaaggcggccttgcagaaactgcatggggagcgagcgaacaacgtcgtacctctcctgcggttcgtccaggtcgatttcagcgcccagcgccccgactggtacgtcgagccgaccgtggaggccgcttga

SEQ ID NO: 356990 - DNA, 345 bp, Pseudomonas aeruginosa
atgctcgctcttatcggcctgtgccagggctattactccgatactcgcaacgtcaataccgccaacggtccttcgcagattgttgagcactcggtgctcgtgcaggttgagcaaaccaataagttcggtatgccggaaaccaaggttattcaagtccgcatttcgaagcggcacatggatggcgggcttaataatgtctggaagatggagaagggcaaaactgtgtccgtcccggtatttatccaggcgtgggcgagtaagtccggtaacgccggattcgattattggctgtcgggcgatggcatgccgttgaaacttcaaagcgttcaggagaaagccgcttaa

SEQ ID NO: 356991 - DNA, 627 bp, Pseudomonas aeruginosa
atgtccgttggcctcggcgagggcgtgcagcgggctgatcgccagcgcgtcggcgccatgccgcgcggcgctgcgcagcaggtcctcgagggcagcgctgtcgcccaggccgccgtcgccggggcggcgcagggcatagacctgggcggccagaccccagcgacgcgagcgacccggggcgaggctggccagggacggacagctcggcggcgccatcgccaccgcccattcccgctgctccagcgacagctgcgcatagccactgcgggcctgcgccggcaggcggccttcggcgtccaggcgcagggcgatccgcgtgccgtcctcgtagaccagttcgcccggggtgccggcggggccgagcgcttgctccagcggctggccgcattcgccgaccagcagtccgaggttggcgctgtcctcgcgcagccgggccagcgcggccaggctctgttcgatctgttgcggactctgcgccggatagccgagtgcttccagcaggccgcgctggacctccgggtcgacccgctgcggccgtccgttggcgtcctgccagtcgagttgcaggcccacggcggcggccagttcggccaggcgtgcgtcactcatgggcgggctccaggctga

SEQ ID NO: 356992 - DNA, 1368 bp, Pseudomonas aeruginosa
atggtcgcgcacctccacgacgccggactggagctgatcctcgacgtggtctacaaccacaccgcggaaggcaacgagctgggtccgaccctgtgcatgcgcggcatcgacaacgcctcgtactaccgcctgatgcccgaccagcgccgctactacatcaacgattccggcaccggcaacaccctcgacctcagccacccctgcgtgttgcagatggtcaccgactcgctgcgctactgggccacggagatgcgcgtggacggcttccgcttcgacctggcgaccatcctcggccgccatccggacggtttcgacgagcgccacggcttcctcgtcgcctgccgccaggacccggtgctgagcaagtgcaagctgatcgccgaaccctgggattgcggccccggcggctaccaggtaggcggcttcccgcccggctgggcggaatggaacgaccgtttccgcgattgcgtgcgtgcctactggcgcggcgacgacggcatgctgccggaactggcgcggcgcctaaccgcctccggcgatctctacgaccagcgtggacggcggccctacgcgtcggtgaacttcgtcaccgcccacgacggtttcaccctgcgcgacgtggtttcctacgatcacaagcacaacgaggccaacggcgagaacaacgccgacggcagcgaccacaacctgtcctggaaccacggctgcgagggccccaccgacgacccggagatccgcgccctgcgcctgcgccagatgcgcaacctgctgtccaccctgctgctgtcccagggcaccccgatgctggtcgccggcgacgagttcagccgcacccagcagggcaacaacaatgtctattgccaggacaacgaactgggctggatcgactggcggctggacgacgagggccgttcgctgctggccttcacccagcgcctgctggccctgcgccaacgctatccgatcctgcgcagggggcgcttcctggtcggcgagtacaacgaggcgctgggggtcaaggacgtcacctggctggcgcccggcggcgaggagatgaccgaggaacactggcacgacgagcacgcccgctgtctcggcgtgctcctcgatggccgcgcgcaacccaccgggatcctgcgcagcggtgaggatgccaccctgctgctgatcctcaatgcctaccacgacgcggtgtccttccgtcttcccgaggtggccgaaggcagcggctggtcctgcctgctggatacccagcggccggaggacccgctcggcgaacgctacccgttcgccagcgagttcctggtcggcggccgcagtttcctgctgttcgagctacaaccgccgggcgccggagcggaaggatga

SEQ ID NO: 356993 - DNA, 1362 bp, Pseudomonas aeruginosa
atgagccgcttccgccctgttgatcgcaagaccctttacctgtttccaccgtcggtagaagagtggttgccggaagatcacctggcgcgcttcatcgtggaagtgatcgacgggctggatctgagtccactccagaaggcgtacgccggccgcggtagtgcggcctaccatccggggctactgctctcgttgctggtctacggctatgccacgggcgtcttctccagccgcaagatcgagcgggcgacctacgattcggtggcgtttcgcttcatcgccgcgaacgagcacccggatcacgacaccctggcgagcttccgccgccgtttcctggatgagttggccggtatttttatccaggtgctggaaatggctcaggaaatgaagctgctgaagctgggcacggtgagtctggacggtaccaagattcacgccaatgcttcgcgccatagtgccttgtcccatgggcacatcgagaagagtcaggcacagctgaaagcccaggtgaaagaactgcttgccctggcggaacaggccgaccagacgaacctacccgatggggtcagcctgccggaagagatcaaacgccgagaggaaaggctcaaggccatggaggaggccaaggcgaagatcgaagcgcgggcgaaagcgcgttttgagcgcgagcaagccgagtatcaagacaaactggctcgccgccaagccaggaccaaaaagaccgggaagaagcctggaggcaagcccccaaagccaccggctccgggagccaaggcgagtgatcagatcaatctgacggatgaagaatcacggatcatgccggtgtccggtggaggttttgagcaaagctacaacgctcaggcggccgtggatacccagagcctgctggttctgtcaacgacggtaacggactccccgacagatagaggccaagtcgtccccatgctggaacagatagcggcattgcccaaaagcctgggcccggtgacgcaaatgctggcggacacgggttacttcagtggacggaacgttgaagcctgtgaacaggccaatatcgaaccgctgatcgccgtaacccgagagggccgagaagaggattggagagcacgttttacagaacctcccgcccttgcagaagacgcgacggcggtggagcgaatgaagcatcggctgaaaacccaatcgggtcgagcggcgtatgcgttacgcaaacagacggtggagccggtattcggcctcatcaagtctgtgctgggctttcggcagttctcgttacgtgggctgaaagcagttgcgggtgagtggcgactggtctgtctggcgtggaatatgaaacggctggcggcactacggctcgcgggataa

SEQ ID NO: 356994 - DNA, 132 bp, Pseudomonas aeruginosa
atgaaaaggatgctgctggccctagccctagccctagccgcaagccctgcactcacagaagaatccaagtccattgccacccaagtgggtgacgccgtaagcttccccgtcaagcaggcatttcaaaagtag

SEQ ID NO: 356995 - DNA, 201 bp, Pseudomonas aeruginosa
  misc_feature (32)..(32): n is a, c, g, or t
atgctcgacaagttgcacctcttcgttccgtnccgcctcgagcacatcgaactgctcggggtggaagggcgtgcggacccggtgcatgtcgtggatctggaaagcctgtcaagcccctacaaaggagccattaaggtatccctagtgatacttacgagtcaatacagaacagataccatgaagtatccctttggactctaa

SEQ ID NO: 356996 - DNA, 366 bp, Pseudomonas aeruginosa
atgcaccgaagacacacaagcgacgattcaataatgagcatcgccgatagcataaagaaagctagaaaaatcaaaggcttgacgcaggctcaggcggcggagctttgtgggataagcctagtcagttacaagcggtatgagggtggcaagaatgcaccccgtgcggatcagttagtgaagcttgctcaagggctgcaaatctcaagcgacgagatagtcatggagtctgaagaccggtccgtatctgaggagttccgctcaatattcaagaggatagagtccctaccagaagaggaccgggcacgaatcaaaatggcactaaaaggcctgctgctagccatcgatcacgagaggctaggcaactga

SEQ ID NO: 356997 - DNA, 201 bp, Pseudomonas aeruginosa
atgctcgacaagttgcacctcttcgttccgttccgcctcgagcacatcgaactgctcggggtggaagggcgtgcggacccggtgcatgtcgtggatctggaaaacctgtcaagcccctacaaaggagccattaaggtatccctagtgatacttacgagtcaatacagaacagataccatgaagtatccctttggactctaa

SEQ ID NO: 356998 - DNA, 366 bp, Pseudomonas aeruginosa; identical to SEQ ID NO: 356996

SEQ ID NO: 356999 - DNA, 885 bp, Pseudomonas aeruginosa
atgccagaaagttctacttatggggtgtctgcggatcggggaagcttacgcatcggcctggagctgggtaccgcctaccgcaagctcggcgtcgaggtggcggtggtggaagcgcaaccgcgcatcctgccgggctacgacgaagaactgaccaagccggtggcccaggccttgcgcaagctgggcgtcgagctgtacctcgggcacagcctgctgggcccgagcgagaacggcgtgcgggtccgcgacggcgccggcgaggagcgcgagatcgccgccgaccaggtactggtggcggtcggccgcaagccgcgcagcgaaggctggaacctggaaagcctgggcctggacatgaacggccgggcggtgaaggtcgacgaccagtgccgcacctcgatgcgcaatgtctgggccatcggcgatctcgccggcgagccgatgctcgcgcaccgggccatggcccagggcgagatggtcgccgagctgatcgccggcaagcgtcgccagttcgccccggtggcgatccccgcggtgtgcttcaccgatccggaagtggtggtcgccgggttggccccggagcaggcgaaggatgccggcctggactgcctggtggcgagcttcccgttcgccgccaacggccgcgccatgaccctggaggccaacgaaggcttcgtccgcgtggtggcgcgtcgcgacaaccacctggtcgtcggctggcaggcggtgggcaaggcggtctcggaactgtccacggccttcgcccagtcgctggagatgggcgcccgcctggaagacatcgccggcaccatccacgcccatccgaccctcggcgaagcggtccaggaagccgccctgcgcgcgctgggacacgccctgcacatctga

SEQ ID NO: 357000 - DNA, 147 bp, Pseudomonas aeruginosa
atggagtctgaagaccggtccgtatctgaggagttccgctcaatattcaagaggatagagtccctaccagaagaggaccgggcacgaatcaaaatggcactaaaaggcctgctgctagccatcgatcacgagaggctaggcaactga

SEQ ID NO: 357001 - DNA, 819 bp, Pseudomonas aeruginosa
gtgcaggcggggctcgaagtgacgctgtggaaccgttccgcggcggcctgcgagccgctggtggcgctgggcgcgaccagggcggaggaggtcggcgagctgttcggcctcgacgtggtcatcagcatgctggcggacgaccaggcgattcgcgccgtgctgctcgacagcggtgcgctcgaacgggcgaggccgggtctcatccacctgagcatgtcgaccctgtcgctcgattgcgtcgaggcgctcgaccaggcacaccagcgccagggcatcgcgttcgtcgccgcgccggtgttcggccgcaccgacgtggccgaggccggcaagctgaacatcgtcgtcggcggtccggaggaagccatcgagcaagtcaaggcactgctggaaattatgggacagaagacatggtttttcggaaaagacccgcgcagcgcaatggcggtgaagatctctggtaacttcatgatcgccagcgccatcgaaagcatgggcgaaagcgtcgccctggtgaagcgcctgggcgtcgagcccggccggttcatggaactcatgtcctcgacgcttttcgatgcgcctgtctatcgcaactacggcccgcagatcgtcgagcagcgtttcaccccggccaggttccgcctggtcctcgggttgaaggacgtcgacctggcgctgtccgccggcaagcgccacaacgtgccgctgccgctggccagcctgttgcacgacgtgttgctcgaagccatcgcccatggcgacggggaatcggactggacggcgctggcgaaggtagcgttgtcacgatcgggacaaatctga

SEQ ID NO: 357002 - DNA, 609 bp, Pseudomonas aeruginosa
atgctcgacaagttgcacctcttcgttccgttccgcctcgagcacatcgaactgctcggggtggaagggcgtgcggacccggtgcatgtcgtggatctggaaagcctgtcaagcccctacaaaggagccattaaggtatccctacgtaagcttccccgtcaaacaggcatttcaaaagtagaacttccggcgacgcgttggcggtactcggccggggtcagatcgccgagcgaatcgtggggacgctcctcgttgtactcgagcatccaccagtacgcggcctcgcgcacgtcgtcgaggcgggtgaacaggtgctggtccaggacctcctcgcggaaggtccgtaggcaactaaaagtgccaccatggcacaaaagtccaccattagagatggtggacccggctgcgccgggatcgctcccggccacccctccgcaacacccacccatcaacaccaagggacgctgtcccttgtcatccctgcccttcgccagggggtcagagggcagggggagaaaagcttccccctaccctatgaccggaggctgtctttgtccgaggtggttcaagggttcgctccgcccgggactccgttcgccggatcgttga

SEQ ID NO: 357003 - DNA, 609 bp, Pseudomonas aeruginosa
atgctcgacaagttgcacctcttcgttccgttccgcctcgagcacatcgaactgctcggggtggaagggcgtgcggacccggtgcatgtcgtggatctggaaaacctgtcaagcccctacaaaggagccattaaggtatccctacgtaagcttccccgtcaaacaggcatttcaaaagtagaacttccggcgacgcgttggcggtactcggccggggtcagatcgccgagcgaatcgtggggacgctcctcgttgtactcgagcatccaccagtacgcggcctcgcgcacgtcgtcgaggcgggtgaacaggtgctggtccaggacctcctcgcggaaggtccgtaggcaactaaaagtgccaccatggcacaaaagtccaccattagagatggtggacccggctgcgccgggatcgctcccggccacccctccgcaacacccacccatcaacaccaagggacgctgtcccttgtcatccctgcccttcgccagggggtcagagggcagggggagaaaagcttccccctaccctatgaccggaggctgtctttgtccgaggtggttcaagggttcgctccgcccgggactccgttcgccggatcgttga

SEQ ID NO: 357004 - DNA, 312 bp, Pseudomonas aeruginosa; identical to SEQ ID NO: 334789

SEQ ID NO: 357005 - DNA, 336 bp, Pseudomonas aeruginosa
atggcagtcagcgaaaacctaaggaacctcagagaatccaggggtttgagccaagaacaggtcgccgaactgtgcggccagtcaaagtcatcctggatcaaatgggagcacggcgatacccagccgggcgctagtaagatcagggagatagcaaaaggccttcaggtatctaccgatgaaatcatcctagagccaggggagcgatcggtcaggcaagacttgcgcaagctcatgcaaaaaatcgaggcgcttccggagcaccgccaggctgagatacggagggcgctaaaaggccatctcatgatcctggagcaggaagagctcgacgaggagtag

SEQ ID NO: 357006 - DNA, 147 bp, Pseudomonas aeruginosa
  misc_feature (54)..(54): n is a, c, g, or t
atggagtctgaagaccggtccgtatctgaggagttccgctcaatattcaagagnatagagtccctaccagaagaggaccgggcacgaatcaaaatggcactaaaaggcctgctgctagccatcgatcacgagaggctaggcaactga

SEQ ID NO: 357007 - DNA, 216 bp, Pseudomonas aeruginosa
ttgtgccatggtggcacttttagttgcctacggaccttccgcgaggaggtcctggaccagcacctgttcacccgcctcgacgacgtgcgcgaggccgcgtactggtggatgctcgagtacaacgaggagcgtccccacgattcgctcggcgatctgaccccggccgagtaccgccaacgcgtcgccggaagttctacttttgaaatgcctgtttga

SEQ ID NO: 357008 - DNA, 462 bp, Pseudomonas aeruginosa
atgctcgacaagttgcacctcttcgttccgttccgcctcgagcacatcgaactgctcggggtggaagggcgtgcggacccggtgcatgtcgtggatctggaaagcctgggcgtgccgctccaggggcagatcagccgaggggagggcggagagctacaggccgactacctgcggcatgtttgggagtcgctgagcacgggcttcacgccgcttgcgttcaaggtttttcaccagtcgctgggcaagcgtctgatgcccggcgtagagctgaaagccagcccggcgaagttgctccaggggcataacgtgttcggtccgacctgtatccagaagggggccgaggtgatgttcaagtggctacacgccacgtatcccgacctgttcgccaagctcgatgttccggcgactcccaaacatgccgcaggtagtcggcctgtagctctccgccctcccctcggctga

SEQ ID NO: 357009 - DNA, 243 bp, Pseudomonas aeruginosa
atgctcgacaagttgcacctcttcgttccgttccgcctcgagcacatcgaactgctcggggtggaagggcgtgcggacccggtgcatgtcgtggatctggaaagcctgggcgtgccgctccaggggcagatcagccgaggggagggcggagagctacaggccgactacctgcggcatgtttgggagtcgccggaacatcgagcttggcgaacaggtcgggatacgtggcgtgtagccacttga

SEQ ID NO: 357010 - DNA, 192 bp, Pseudomonas aeruginosa
atgccggtcctgatctggcggctctgcggcttgccattgctgccgaccacccaggcgacctggccgccgctgccgctggtggggctgccgccgccctggttgctctggtccagcggcttgggcggcaccgggaggatctgccggaccttgccggtccagcgtcggccttcgccgctgagggtcgtgaagtag

SEQ ID NO: 357011 - DNA, 423 bp, Pseudomonas aeruginosa
atgggcgtgctgctcgacgcccaggagctaatcccggccctggtcgaggaggtcctgcaattcgataccgaccgcctgctcgactatctcggcgcggccgccctcggcctgacttccgccagcgaggaaaccttccatccacggccgttcgggcagttgcgggcgttcttcgaagaggcggacggcagcgacgcccaggcgctggcgccttacctgcaaagccagtaccgggagttcttccagctttcccccaaggcgcagaagaagacccgccgcctgaccggcccctacgcctggggctggtgggccatggaggtgtcggcgctgggcgtgctctacggctgggacgatggcgtcctgcgcgcctcgccgcattacctcggcgacctggtcgactacgcgcgggcgcgcggcgacgcctga

SEQ ID NO: 357012 - DNA, 390 bp, Pseudomonas aeruginosa
atggctgaaccgacgagcagcggagcagtagcagcagccggcgccgtcgggctcactgccaccgcgatcatccccggagtcgacgtcaatgcggtgatcggcggcttcgccggcgcgctgctgttcgtgctctgggcccacgacctgaccatggccaggcgcctcggctacctgctggcgtcctgggtcggcggctactacgccgccacagaggctgtcgggcggggcgcgacccagttctccgggctgcccgcactggtcaccgccgcgctgatcgtcacgatcctgatcggcgtgctcgactggatgattggtggccgcgcgccggcgtggctccagatcgttctgcagcgcatcgtcggcatgatcggaggccggaaagatggttga

SEQ ID NO: 357013 - DNA, 333 bp, Pseudomonas aeruginosa
atggccgacagggaaaaggccaccgcgacctggccgagcagcagcacgccgccgatgcatagggccagggcgatcccggccaggccgccgaccaccgagagcatcgccgcctcggtgaggaactggcggaggatatcgccctggcgggcgccggtggccatgcggatgccgatctcgcgggtgcgttcgcgcacggtcatgagcatgatgttcatcacgccgatcccgcctaccagcagggagatcgcggcgatcgagccgagcatcagcgacagggtgttctgggtcttcgcctcggcctggatcatcgccgcgttgttggtcagctcgtag

SEQ ID NO: 357014 - DNA, 318 bp, Pseudomonas aeruginosa
atgctggctgcgcagcgcggctacctgccgacccgcgttccgctgctcaaacgtgtgggcgcagtcgcgccacaacacgtttgcatcgtcgccggccaggttcgcatcgacggcgtgccggtggccgccgccctgcctgccgaccggctgggccggccgctgccatccttgcagctttgccgccgcctcgaatcgggcgagctgttcctgttgagcgtgaccaatccagcgtcgttcgacagccgctatttcgggccggtcagcgcatccgccgtgatcggcgtcgcgtatccggtctggctggaaacacgcccatga

SEQ ID NO: 357015 - DNA, 252 bp, Pseudomonas aeruginosa
atgctcgccgggatcgtcgccctggtgccctggcgggtcctcctgctgctggccgcggcggctgcctgcgcctactcggtacgcctgctgttcaccggcctgccgctgttcatgcgcatgcaggagcggcagacattgttctacgccttctgcatcctcggcgtcggcttcctgaccctgctgaccaccgccttcatcttcatcgagttctgggggcaaagcctggccggcagcggcgagtacctgcgctga

SEQ ID NO: 357016 - DNA, 276 bp, Pseudomonas aeruginosa
gtgagcgagcgactctatgtcggcacccgcaagggcctgttcgagctgcggcgcaacgcggcgggccagtggctgccgatggccagccacttcctcggcgagccgctgagcatgctcctcgccgacccgcgcgacggcgcgctctacgcggcgctgaatctcggccatttcggcgtcaagctgtggcgtcgcgacaccggcgcgacggactggaaggaatgcgcggtgccggtctatccgtcgcagccgccagcggccgaaccgctggaaggctag

SEQ ID NO: 357017 - DNA, 588 bp, Pseudomonas aeruginosa
gtgctggtccagttcttcagcctgcgcacgccgctgctgatggtattgcgcaccgacgccctggccatcggcgtactgctcgccctcgcctccctgcagcctggctatgcccgctggaaccccaccctgctgggccgcgcctggagcgggccgttgctgctggccgccgtggccgcggccctgggcgtgctggccagcgaagcgtacagcctggtcaccgtgcggatcggcgccatcgcgctattgtgcggactgctggtgtggatagcctcctacgaccgcgactacctgctctccaacgggccgctgaagcgcttgctggtctgggtcggcgcgcgctcctatgcgatctacctgatccacatcccggcgttctatctcagtcgcgaactctgcttccgcctgggctgggacgccggcgagcggcccctgtcgctgctcggcaccagcctggtcctgatcgtcgtactcagcgagctcaactaccgcttcgtcgagagcccctgccgcgacctgggctcccgcctggtcaagcgcctgagcgccgcccgccgcgtcgccaccacttccggagccacctcatgctga

SEQ ID NO: 357018 - DNA, 189 bp, Pseudomonas aeruginosa
atgatcctctgtgccatccagaaggaaaacttgaaggcggagacgccgcccacttccttcagttccagctccgacaatgcccactcgcgccggattatccctcagccgcacctttgtgcccggcttaagctcattcatattccctttctccgcagcacctgtgctcgtaaccccagttacaagcgttaa

SEQ ID NO: 357019 - DNA, 4950 bp, Pseudomonas aeruginosa
atgagttttgccattgccggcctcaccaacgccaacgagttctatagccagcactacctggacgagatcctcgaaaaagacctcaagccgctgttcgaccagtggaaggagcagggcagcgatagccctgtttctcgtctacgtaccgcctctggtgccaacggctacttccgcgcccgccagcgtttcctcagcgagcgcaagcccagcgaccgtgccagcctgtttatcgatctggtgcagccgctgctccaggccatcggctaccagctggccccggaaaacctcgccctggccgatggtgagctgccggtgctggccacctaccgtgacgccaagcaccagccgctgctggtgatcgccgcagccatcgccggggtggatgacgaggagctggggccgctgcagctcaaaccgcaggcggtcgacggccacagcaaaagccgccaggccgacagtgattgggaggaaaccctcagccgccgcctgttcgccgacgaccacccaccacgctgggtgctgctggtgcaccatgaggaatggttgctgatcgagcgcagcaagtgggggcgcaaggcgctgctcagcttcaaactgcccgacctgttcggcccgcgtgacgacaaactgctgcgcgccctggcggcactggccggcagccagtcggtgctgcccgccgaaggcggcgtggccctgctcgacagcctggacgacaactcccacaagcacgccttcgaggtttccaccgacctcaagtatgccctgcgcgaatgcatcgagctgatcgccaacgaggccatctggtacaagcgcaccgtggccaaggagaaggtctacgagcgtaacgacaccgacctggccgagcagctcagccgcgaaagcctgcgctacatgtaccgcctgctgttcctcttctacatcgaggcgcgccccgagctgggctatgcccctatcgacgccgaggcttacctcaagggctacagcgtcgagcacctgcgcgagctggagcaaaccccgctgaccaccagcggggcgcaggaaggcacctacttccatgaaagcctcaagcaactgttcggcctgatctggcagggctttccgcgccgcgcggacaacagcgggcagatggactttacggcaggacccgacctgctgctcgataccggctttaccatcgcccccctgcaaggccatctgttcgaccccgatcgcacgccgctgctgggcagcgtcaagctgcgcaaccgcgtgctgcaacaggtgatcgagctgatgtcgctgtcccgtggtggtggcaagcgtcgccgtggccgtatcagctacggcaccctgggcatcaaccagctcggtgcggtgtatgaatccctgctgtcgttccgtggcttctttgctgaggaggacgtgtatgaagtgcgccccgaccccaagggcaaaaaggccagcacgggcgaggagggagaggacgcggaaggcgaggacgacctcgacagcgccgacgagccggaaagccgcgaggcggacaagaagaaggacgccgagcttgacccgctacaggctgcctatttcgttccggtcagcgccatcggccagtacaccgacgccgagcggctgtttggcggcaacccgcgcaaataccccaagggcacctttatctaccgcctggccggtcgtgcccgggagaagtccgcttcctactacaccccggaagtactgacccagtgcctggtggaacatgcactcaaggaaatcctccccggcaaaacggcggatgagattctccaactcaccatctgcgagccggccatgggcagcgcggcgttcttgaacgaagcggtcaatcagctcgcagaagcctacctgcaggccaagcagaaggagctgggccaaagcatcccccacgagcagtacaccgaagaaaagcagcgggtgaagatgtacatcgccgacagcaatgtcttcggtgtggacctgaaccccattgccgtggagctggccgaggtctcgctctggcttaacgccatcttcaagggcagccatgtgccctggttcggcctgcagctgtacaacggcaactccctggttggtgcccgccgcgaggtattcagcaccgcccagctcacccccggcaaaggcgaaaacggcctgcccgaacgcgactggcgagccgctgcaccccgcgctgtcgcctttacccctcgcccgcttgcgggagaggggcaaggggagagggctggtttgtctgccaccgatatctaccacttcctgctgcccgccgaaggtatgggcatggtcagcgacaaggtggtcaaggcactggaacccgctgctttcgagcagttcaggcaatggcgcagatcctttaccgcgccgctgagcaaggatgaagtgcgtcgtgtgcaggcgctaagtcaggccgcagaaaagctctggcagcagcatgcagaggagctggcacgggtacgcaaggtcacctgcgacgagctgcatgtctggcccgatccggccgctaaccgcgcgcctactagcaccgcgcagaaagacgccatctaccagcgcgagatgctcagcgaggcgcagaaaaacgccagcccctaccgtcgcctcaaactggtgatggatgcctggtgcgccctgtggttctggccgctggacaaggccagcgaactgcctagccgcgagcactggtggtttgtgctggagaccgtgctgctgggtaatgccagcctggccagcgcaccggccgatgacctgttcccggaaacccaaccgcaacaggggctggactttacccccgagcgtgaccgctacggtcatgtggatatcgccgcgcttatcgaggcgctgccacagctgcaggtggcgcagcaggtggccggccagcagcactttatgcactgggcgctggagtttgccgatgtgttcaaggcccgtggcggcttcgatgtgattctcggtaacccgccgtggatcaaggtggagtggaacgagcaatcactgctgtcggacttcgacccgcgctttgccattcgcaagctcagtgctaagcagaccgcggatcagcgtgaggcggtgtttgctgtactaccgcaggcgagggcggattatctgtccgagtgtgtggcgactgagggtatgggggcattcttgaatgccacccagaactatccacttcttaagggccagcagagcaacttgtataaatgctttttgccgttggtgtggcaagtaggtagtggcgtgcaggcactgctgcatcccgaaggggtatatgacgatcccaagggcggagcgctgcgagcagcgctttatccacgtttgagagcacactatcagtttgttaacgaacataagctgttctctgaggttcacaacctaacgatctacagcatcaatgtatatgcgcccatcgcaggttctccacgttttaaaacaattgcaaatctgttccatccgtccactgttcaggccagcttggagcacctagggggcggggtaacgcctggtctaaaaatagacgagggaggttggaacacggcgggtcacgtaaatcgtattattgatgtgtgcgagactcagttggccacttttgctcagttgtacgatacacccggaacgcccgcgcttcaggcacgcttacctgccatacacagcagcgaattggtttcggtacttgaaaagttctcccgtgtatctcgtcgtcttgccgacctgcagggtgactacataaccttggaaatgtggcacgaaaccggcgcgcaaagagacggtaccatccgacgccgcagcaccagcgagcagggttttgtcatgggaccgactgagtttgtactctcaggtccacatttttttgtcggtaatccactcaataaaaccccacgtaaggtctgcgatacgaacaaagcttacgatcaagtcgatcttgaaacactgcctgacggctacctgccgcgcagtaattatctgcctgcttgcgatgctgtcgaatacgcccgtcgggtgccaagggtgacttggctggaaaaagacgcgggcgagccgaaggcagtgaccgagtactaccgcttcgtcaatcgtcgtatgttcggcccttctgccgagcgatctttcatctcgactattgctccattgggcagcgcacatattcatcctgttctttcgacaacgtttaggcgatctgctgacttagtggacttttccgcaggtaccttttcgttacctattgatttcttacttcgctcaacaggcaagacggatctctacgagagcactcttcgcaacttcccgctgttgtcttcaaattacttacgagcgcgggtgctggcactcaattgcctcaccacccattacactgatctctggcgcgactgctggcaacccgactatctgcaagaccgttgggccagtaacgatccgcgcttgccgcagcacttcttctcccagctcacccccgagtggcagcgtcactgcgcgttgcgcagcgactacgcccgccgtcaggctctggtggaaatagacgtgctggccgcccaggccctcggcctgaccttggacgagctgctgaccatctaccgtgtacagttcccggtgatgcgccagtacgagcgcgacacttggtacgacgccaacggccgtatcgtctttactgccagcaagggcctggtcggcgtcggcctgccgcgcaagcccggaaaaaaggatgaaccctgcaccctgatccaccccgacggccgccgcgaaagcaaacgactcggctgggatgacgtaatgcccaaggacggcaagccccagctcgccgacggcactgtcatcgagcgcatggtcctggacgacacccagcccggcggcccgatcaaccgcatcatccgctacaccgcccccttcaccctcgccgaccgcgaagccgactaccgcgtggcctgggcgcattttgaaagaaggaacgaggaatga

SEQ ID NO: 357020 - DNA, 1644 bp, Pseudomonas aeruginosa
atgattgggagttatatcgaaggcgtgctgacatctgcttcagcaagctctgtgactgagatttttatctggctgatgctggccatttttgcgatggcagcgctccagggaaagagcggaaagcatgggctttttctggagcacgcaccggcggtattagtatcgctgggcattctgggaacctttgtcggtatcgtgatcggcctgctgggtttcgatgcccacgacatcaagggcagcatcgaggggttgctcgatggactgcgcacggctttcatcaccagccttgtgggtatgaccctttccatcgtcctgaaggcgctggatacttggtggtttgccccggtccgcggtcgtgcggagcagccggatagtgtcactccagagcatatccatgatgtgctcactcagcaggtcaagctgctggaaggactcaatcagtcactggctggcaatgaggaaggctcggtagcgggccagctgaagttgatgcgcaccgacgtgagcgatttccgcaatggtctggatcgcacccatcgcgagttccaggaaaagctcttcctgcatttgaccctgttcggggagatgctggccaagtcagccaccgagacggtgatcgaggcgttgcgtcaggtaattcaggattttaacaagcacttggtggagcagttcggcgataacttcaaggcgcttaacgagtcggtcggcaagatgaatgagtggcaggagctctacaaacagcatgtagaggccctggaggcgcggatcgaactggcgatcaacgagctggagcgtaccgccacagccaacgaagcgatcagccgctccctgaccagctcggaacagtccatcggctctatcgataaccattgccagagcattcctacggctatcggccagttggagcctgtactgcaggtcaaccagcatcagattcaggagctgcaacgccatctcgatgcctttattgccatgcgcgatcaggccaccagtgcagtgccgcaaatacagcagcatatggagacactctccaaggagctttccgccggaattcagggcgtgatgatgactatgcacgaaggtgctcaggagttcggtcgttcggttgacctcaccaatgcagcgttgaccgagtcagcgcacgtagtgagcagtaagtcggaacaaattgccgagaacatgcaagacgccgcgcaggagtttggatcatcggtacgcggaactctcgaaagcatgctgaacaattcccaagcactggagcggcagatggggcaggcggttgagcaggcagccaactccatggccgaagcgttccgcctagcaaccggaaagatacaggaggggctgaccggttcagtggaggccgctatgaataccctgcgctcaagcgtagagggtagcctgagccagaccgaggcccagattcaaggctcggccaatcgcaccatgggggccgtggaagctcaagtgcgcgaagccactgagcgtgctagtgcctcgctacaaatccaactcaatgccatggatcaggccattggccgcgagctggagaaagtcttcaaggaaatgggctcggcactggccactatctcccggcggattgccgatgaccatgccgagctggcgcagcgggtacgtgcctga

SEQ ID NO: 357021 - DNA, 732 bp, Pseudomonas aeruginosa
atgagtgctatggacagcctgtttcgcagccgaagttcgaacaaggaggatgccgaacactggataggtatttctgacctgatgtctgggctgatgatgatgttcctgttcatcgctgtggcctacatgtactacgtgcaggttgagcgggacaacatcaaggagatcgctgtcgcttacaaggacacccaagtggcgatctacaacgacctggttaatgagttcgaggcggatctgccgcgctggaatgcggctattgagcgcgacacgctcgaagtgactttcaataaccccgatgcactgtttcgttccggatctccggagctgaacccgcagtttaagacgatgctggcagatttcttcccgcgttatgtggcggtgctgtcccgctatcgcaaagctattgaagaaattcgtattgaaggacacaccagtagcgactggggaagccttcacggagagcaggcctactttccgaatatggcgctctctcaggatcgtacccgaacggtgctgcagcatgtgctgtcgctattggcggcgggagatgatcgggagtgggtgcgctccagttttgccgcggtcggctactcatcttcgcggcgcattgtcgatagcggtacccagcaggaaaacagcgccagctcgcggcgggtgaacttccgtgtcataaccaattcggagctgcagatccgcaatatcatagagaggctcgatggaaatcaaggttga

SEQ ID NO: 357022 - DNA, 1086 bp, Pseudomonas aeruginosa
atggaaatcaaggttgatttttccgagctttggggcgaggtgaggcggctcagtgcagctccggttgagttcgactgggtggctgctgcacagctcgatcccatcgacattgagctgctcgagggtcgcgaggttcgccttgaggacctggatgtcatcaatgggcttctgagtgtcgacggccgtcaggtactgctgtatatccccgaccagttttctccggtcgatgtggttcaggcatcgcccgaaaaaggtaagcggttccatgtggcggactgcaagaccctggcggatatgcgtgcaaaggggcgcttcgagcgatacttggtcacgaataacctgacgggtgttttctcgatcagtggcaagaacagccgaggcatgccggaggagctggattcacgcttgctggtctgtaaaaactgcctggaaaaactaaactatcagaattattgccacgacagtgcgcgttcgcacatctggcaacgctttgaaattgcccgcttcttcgagacctacagcaccagcttcacctatcttccgcgcaacctcggccaacgcgccatcggtaacgattacacggcggactgggccgaggtgtcggctgatgtgcggcgacgctgtggattcaagtgcgattgctgcggcctggatctgagcgagcatcgccatctgttgcatgtccatcacgtcaacggagtgaagcaggacaacagcagcgccaacctccgccccttgtgcgcagactgtcaccgcaagcagccgctgcatgaacacatgttcatttccatgactgatatgcaactgctgacccgtctgcgtcgtgagcagaatataaccgctgatgattgggcgcaggtgctggagctggccgacctatctgtgcatggtgcgctgatgcatgcgcggcaaagaggttttcctgtgcctgaaattggctatgagttcgtgaataccaagggtgtggtggttgcgagtacggaagtagcctggcttgagcggcgcgttgcgctctgtctttccgaagcaccggatatcgatagctggacggtgctgagctccgctgcatttatagacaattactga

SEQ ID NO: 357023 - DNA, 1242 bp, Pseudomonas aeruginosa
atggcaataaagcagtacgagtgggaagatggggctattctgtctgatcattcgaagaaaaagcatcagatccttcgagagtatttctttcagtacgtcatcactcgttgccagcttccgaaaagggagcggtttcgcctagccgtggttgacggctttgccggtggtgggcgatacaaatgcggctcacccggctcaccaatcatttttatcgaagagttgaaaaacgcgactagagcgattaatgtgcatcgtgctactcaaaacctggcaccaatccatattgagtgctttttgattctgaacgactacgagccgtcggtgcttgaactgctcaaaaagcatatcgctccggtgtttatggagcatgtggcgccaaatgaccacctaacagtcaacgtcgagtatctcaataccaccttcgaagcagcttatccgacggtcaaggggctgttgcaaaaaggtaagttccggaacgtgatttttaacttggatcaatatggccacagccatgtgaccaaagacacgctgcttgatattatgagctcaaacacctcgactgaggtgttttacactttcatgatttcttcccttctgacttacctccagaaggacaacgccaaggcgctggaaagccaactcgcttatttgtcattgagtaagtttgacttggatgttcttgccgagcaaatgaacaagcggctgtggctcggaactgccgaaaatatagtgttctcagctttccagaggtgtgcccattttgtcagcccattttcgataaataatccgagcggttggcgctattggttaattcaccttgcaaactcttatagagcacgtcaagtgtacaataatgttttgcataaaaacagccagtcgcaggcgcactatggtcgctctggcttgaacatgcttgcccacgacccgcaagaggaaggaacactctatctattcgacacctctgcgcgagacgaggcaaaaggccagctacatgatgacattccccgtgtggtatcggagtttggcgacgcattgagcatgggggacttctacagccggatctacaaccatacgccagcgcatagtgacgacattcactcagcaatgatcgagaatcccgatattgaggtgcttaccagtgcaggtggaacccgccgaaaagcaacacagatagatgtatctgacacgatcaaactcaagagccaaacaagttttttctcaatgtttaatgggaaaagctag

SEQ ID NO: 357024 - DNA, 720 bp, Pseudomonas aeruginosa
atgatgacctgcgatcccgtcaccggcgcctgcctcctgcccgagccagagtctgcgcaaagcgttgcgcaatctggggcgcacgccgctccaaccgttcactacatcggtgatccgatgtgctcctggtgctggggcatcgagccggtggtcggcgagctggcggccttctgcgccgccgagggcatcggcttcgtgctcacggtgggaggcctgcgcgccggtggcggcgatccctggaatgcggatttcatcgagttcctgcgcgccgaatggcgacgtatcggcgaagtcaccggccagccgttcggcttcaccctgctcgatgcgccgtatttcgactatgacaccgagcccgcgtgccgggcggtggtctgcgcacagatactcggagcggacagcgcggacccgagcgcccggcgtttcttctccgcggtacagcgcaggttctacgtcgagggcagggaccccaaggaaacctcgttctatgccgacctttgcgaggaggcaggcctggacttcggggccttccgttcgctgttcctgtccgccgaggcccggcaggcgacgcaagccgctttcctacgttgcaggcagtggggcgtgcgtgcgttcccgacgctcgctgtcgagcgccgcggggaactgctattgctcgccgccggcttcaccacccgtgagcaggtgctgtcgcggctgcggcggggcctggctggctga

SEQ ID NO: 357025 - DNA, 1947 bp, Pseudomonas aeruginosa
gtgaatttcccgcatctgttcagtcccctggaaatccggggcaaacgcctgaagaaccgcatcatgtcgagcggccacgacacctcgatgcccaccgacaaccgggtcaacgaccaactggtcgcctaccaccaggcccgcgcccgcggcggcgccgggctgatcgtgatgcaggtggcgggcgtgcacgacagcgcgcgctacacctcgcacgtactgatggccaccgacgacgcctgcattcccggctaccggcgggtcgccgaggcctgccacgccgaaggctgcctggtgctgtcgcaggtcttccatcccgggcgcgagatcatggagtccgccgacggcctgctggcggtggcctattccgcctcggcctcgcccaacgaacgcttccgggtgatgccccgcgaactcgaccagccgctgatcgacgagatcgtcgccggctacgccgccgccgcgcgccgcctgcaccaggcaggactggacggggtggaggtggttgccagccatggctatctgccggcgcaattcctcaacccgcgggtgaaccgccgcacggacggctacaacggcgacctcgacgctcgcctgcgtttcctccgcgaggtgctggcggcggtacgcgcggccaccgccgaggacttcatcgtcggcctgcgcctgtccgccgacgagcgcgaccccgagggtctcagcgaaagcgagtcgctgcaggcggccgaggcggtccagggcgagctggactacctgcacatcgtcgccggtacctcggcatccctcggcggcgccatccacatcgtgccgccgatggccatcgagccggcctacatggcccgcgaagccggtaccttcaaggcgcgcctggcgatcccgctgttcgtcaccgggcgcatcaaccagccgcaggaggccgaggcgatcctcgcccggggccaggccgacgtctgcggcatgacccgcgcgctgatctgcgacccgcagatgccgaacaaggccgaggccgggcgcagcaacgacgtgcgcgcctgcatcgcctgcaaccaggcctgcatcggacatttccaccgtggctatccgatctcctgcatccagcacccggaaaccggccgcgagctgacctacgcaacgcccaatccggccgcgcggcgcaagcgcgtgctggtcgccggcggcggtccggccgggatgaaggcggcggcggtggcggcacagcgcggccatgaggtagtgctctgcgaggccggtgctcaactcggcggccaggtcaacctggcgcaactgctgccgcgtcgtgccgaattcggcggagcttccaccaacctgcagcgggagatgcaactggccggcgtagaggtgcgccgcaacaccccggtcgaccgcgcgctggtggaacgcgagcggccggacctggtgatcgtcgccaccggcgccgaaccctattggccgcctttcgagcgtggcggcgagctgcaggtggtagatgcctggcaggtcctgcgcggcgaggtacgggccggtcgctcggtgctggtcaccgactggcggggcgactggatcggtcccggtatcgcggaaaagctggtacgcgagggccaccaggtgcgcctggcggtgaatggcacccattgcggcgagagcctgccactgtacgtgcgcgaccagttggccggcgagctgcaccgcctgggcatcccggtgacgccctatgcccgcctgtacggctgcgacgacgccacggtgtacatgcagcacagcgccagtggcgcggcgatgctgttcgaggaggtcgataccctggtgctgtgccacggccaccagccggtggatcgcctggccgatagcctggcaggcctggcggaggtggtgcgaatcggcgattgcctggcgccacgcaccgccgaggaagcgatctacgaagggctcagggccgcctggagcatctga

SEQ ID NO: 357026 - DNA, 915 bp, Pseudomonas aeruginosa
gtgcacgcgctgctgctggccaggctctggctgtacctgctgggcgtcgcctatccggcgctcggcctgagcatgctgcgttcgttcacgaacaccggccggccgccgagccggcgcagtggcgatttcctcctgcccggctatggtcgtctctggcggcgccacggttggcggccggtggatgcgccggcgcatcccgagcactggcggcagatggagcaggcgatgatcgataccccggtggtggcggcgctggacatgtatgtcgagccggactgcgtcaggcaggccggtcgcggtttcattgacgaagtctgccggcgcctgggcgtacgccgttgcgcgccggccgccgccgagctggcggtgcagtggcggcagccgaacctgctgttcgcgcaggcctgcggctatccgctggtgacccagttgcagggccaggtagcggtgctcgcggtgcccagctacgacctggtggactgcgcgccgggtgaacattgcagcctgttcgtcgccgccgagggcgaggcgcggcggcgtctcgacgagttccgcgacacccgcctggcgctgaacgggcacgattccaacagtggcatgaacctgctgcgccacgcgctggcgccgctgggacgcgatgccgcgttcttcgccgaggtgcggatcagtggcggtcacgtgcgcagcctggccatggtcgcggcgggggaggccgagctgatcacttcgctacgctggagcgcgacgcaacgccgcgagctgttcgaggcgctgaacctgaccctggtcgaatgcccggaactggcccggaccctggcgctgaaatccttcctcccggctggcgaggaacattaccggatcctcctcgactacgagcggcaggcagagggctggggctacccacatttgcgctga

SEQ ID NO: 357027 - DNA, 267 bp, Pseudomonas aeruginosa
gtgagcggtcccctggacaagctttcctggggcgatctgcgcatcgtcacggcgatcggcgaaggcggcagcctggtcgcctccgcagctacgctggggctgaaccactcgaccgtctcccggcgcctggcagccctggagctgggcctcggtgtggccctcttcgagggccgcgaaccgcactccgcctcgctcgccctgccaggcgctagcaccgggccgcaatcctggccaacgccgccaagggtttcggcgtgccgacagtga

SEQ ID NO: 357028 - DNA, 264 bp, Pseudomonas aeruginosa
gtgtgggggttctgctcgatctacctggtcaccttcgtcgtgctgatgctggtgctgctggccctgggcgtagacctgctgaccgccttctccagcctttcgtcatgcctgaacaacctcggcccggccctcggcgaggctgccgcgcactatggcggcctgccggacagcgccaagctggtgctggccttcgccatgatgctcggccgcctggaagtgttctcgctgctgatcctgttcaccccggcattctggcgctactga

SEQ ID NO: 357029 - DNA, 1047 bp, Pseudomonas aeruginosa
atgaagacccacgaagagattttcgagatcgtaagaacagcccgccaacgaataaaggagctgccgtccaaaaagctaaccaagtcgactgatgatggttatgttcgcgaatacaaccgtatggttggcgatgaaggtgcaaatccaaaggagctatggtcagcaatctgcgccactcaaagtaagtccacatatcggagaagaatcgcagcaacaatccactgttgtcgtactcagcttcaggaggcattacggagccaagacgcggcccagcgtacaggtgatatgaacgcggtcagataccaagtggcagtgatcgaagaggtagttggtattttgaatattattgatggacacaaaggacagtgtcctctcgaaaatacgataagacggaagtccaaacgatctgatttaaaatacctacctagcaattggcgggatcaactgcataggcaacttgagggtagcaagtacgaactggcgtatctggtggaagcagtgtcgggatgtcggccaggtgagcttgagaaaggagtcaaagtgatttgctccaaagagagcgggctgttgactgtccgcatcgacaacggagtcaaggttactgaccagaaaggtcagccctggcgcgagatcacctatcggatcgatcagaatccgctggttagggctctccttgagatctgcagaaatgttgtgccgggcacggaaacgatcgagacagttgtctatgttgataaagcgaccaactggcgtgcagcgttgtcctcggccgggcagaagctgtggcctagactgaagttcagggtctgcccgtaccacctccgaaatgcggcggccagcgactggaagcggaccgggctgagtgacgaagagatctcgggcgcgctaggccactgcgtaaataagacgtccagcaactatggtcagttccagatcgggcaggggagcggcggtttgactcccgttgaggtaagagcttctcgtcctatcttgaatactcggactctatcgtcccaaatggctcggccctctatgagccccaaataa

SEQ ID NO: 357030 - DNA, 642 bp, Pseudomonas aeruginosa
atgaagcacctattcttccccctaattatccgcacagaaaactataaaaccaaagcctgtggcggcttttacggttatgcgtcatacaatgaagtaattcatgctgactgtcaaaatagatgcgtctactgtgacgtcaaattagaagaaaacgggcacgaaggctttgctcttgatcattttcgccctcaagagcacttccccgatctaaaaaataacccaaataatttggtgatatcttgcggaaaatgcaatagaaataaatcctctcattggcctgtcgggacgaatacagcagacactcacgacggcacagtagggtttatagatccatttcagtgcaatagacaccaatactttcaagttgagccggcaggtactctttctccccttcaagggccatccacctatttaataatgcttcttgggttaaatcgcgctagcagggttcttgtaaggaaacatcgcatacttaatgccaagataaacgccctcatctccatggcagaagaaagcattgattgcgctgtatcgctcctggaaaaagggcaggaaacagaacgcgcgttacagaaaataaattctgccaaagcagcaattgccagcatcaaagagattcggaatgaaattcacccgatctag

SEQ ID NO: 357031 - DNA, 537 bp, Pseudomonas aeruginosa
atggttttcggggtcgagccaaaacctcatgtcggtgatatgagttttttagttgaggatccaagcgtagtagccattatccttgatgagcagcttaaagagtcgggtgtggcgcagtattacggtattgaacttgcgtcgtacctgcgaaccttaaatagcaaaatgcccatctatatcctcaccagctttgttgagtctgaagagctgctggaaggggagatgcaagtcgaggacattctgaataagcaggatctctccgctaagaaacatgtggttggtgctaggatccttcgtagaattgattcgtacctagaaatcatgggcaatcggaatgtacgctttgaactgctcttaagaaaatctgtaagaggcgagttggctgaagacgaaaaggaggagctcaaggaactgggctatctaagagactcttcattcgaagtggaagaaataattagcgaggaaaagctaaagaaacttgaagctttggaggaaaagatctctcaaatagaaaatggactctctaaagaatcatga

SEQ ID NO: 357032 - DNA, 1347 bp, Pseudomonas aeruginosa
ttgagcattaatttagttgtagaagatcagcgcctggttagcgtggctagtcataacagtcctgctaacactgggcctagtaacgcgcttgactgttcttggaccgctgaatcgcctctatatcagcaactgggtttatcctgcctggacgatgatgaagtgcttgctctaatggagctaagcccgatagagcgaaagcatcaaggagttttttttacacctgctgagttgtcaacgttagcagtagaaaagtttagctactctttgggcgacggtgcgatactcgacccagcctgtggatcagggaatctacttatagccttggccgcaactttcgagatatcgccaagtttagaggctacattgtcagagtggaactccaggctgcacggagtagatataaacgaaagcttcgtaaagattgccaggaaaaaattagtaaaattggccctgagcaaaggggccgtaccatctggtgagaagacccccagtgaaatattatcaatactttcaaatgttagggttggagacttcctgaaggagcacaaggcctattgcggaaaaattggaggagtaataatgaatcctcccttctgccacatagatgcaagtagcgagattgcctggacctctgggaagtttaatgccgcatcactttttgttgtttatgcggctgaaatactacccgtcaatggtaggtttttaggaattctacctgatgttcttcgtagtggaacaaggtatgcacaatggcgcagtcgtttactgaaaacagctgactgcacaatggaaacattcggaagcttcgagcccggggtccaagttgacgtttttattttgcaaggcaaaaaaaaatatactcaagaagaggtcgttgccgagcaaattgtagccaatgactcgtccatcaccttattgaaggatgagtttgatgtttcggttggtccggttgtacctcacagagacaaagttgttgggatagaagcgccatttgcgcacgcaaagattctcccggcatgggaaactgtggacttattgcctgagcgaatctgtcacgccggaaggaaagtccagccaccctttgtagctgttagacgcacctcaagccctaaagataaatatagagtagttggcactgtggttaactgctcagagccagtggcggtcgagaaccatattataatactcgcgccaaaagatcgaagcctgctttcttgccagagagttttagaattttttagaaccgagcatgtaaataattatataaacgaaaaaattagatgcaggcatctaacagtgggtgtggttaaaggaatccccatagggagagcggctgatggaaattag

SEQ ID NO: 357033 - DNA, 1281 bp, Pseudomonas aeruginosa
atgagcaagaccaacgaatccctgctgaagcgtcgccaggccgcggtaccccgcggcgtgggccagatccacccggtcgtcgccgagcgcgccgagaactccaccgtctgggacgtggaaggccgcgagtacatcgacttcgccggcggcatcgccgtactgaacaccggccacctgcatccgaaggtgatcgccgcggtccaggaacagctgggcaagctgtcccacacctgcttccaggtgctggcctacgagccctacatcgagctggccgaggaaatcgccaagcgcgtgccgggcgacttcccgaagaagaccctgctggtgacttccggctccgaggccgtcgagaacgccgtcaagatcgcccgcgccgccaccggtcgcgctggcgtgatcgccttcaccggcgcctaccacggccgcaccatgatgaccctgggcctgaccggcaaggtggtcccgtactccgccggcatgggcctgatgccgggcggcatcttccgcgccctggcgccctgcgagctgcacggcgtgagcgaggacgactccatcgccagcatcgagcgcatcttcaagaacgatgcccagccccaggacatcgccgcgatcatcatcgagccggtgcagggcgagggtggcttctatgtcaactccaagtccttcatgcagcgcctgcgcgccctgtgcgaccagcacgggatcctgctgatcgccgacgaagtgcagaccggcgccggccgtaccggcaccttcttcgctaccgagcaactgggcatcgttcctgacctgaccaccttcgccaagtcggtcggcggcggcttcccgatctccggcgtggccggcaaggccgagatcatggacgccatcgctcccggcggcctgggcggcacctatgccggcagcccgatcgcctgcgccgcggccctggctgtgctgaaggtgttcgaggaagagaagctgctggaacgttcgcaagccgtcggcgagcgcctgaaggccggcctgcgcgagatccaggccaagcacaaggtgatcggcgatgtccgtggcctgggttcgatggtggccatcgagctcttcgagggcggcgacacccacaagccggccgccgagctggtcagcaagatcgtcgtgcgcgcgcgtgagaagggtctgatcctgctctcctgcggcacctactacaacgtcatccgcttcctgatgcccgtcaccatccccgacgcgcaactggagaagggcctggccatcctggccgagtgcttcgacgaactcgcttaa

SEQ ID NO: 357034 - DNA, 246 bp, Pseudomonas aeruginosa
atgttcggcatcgccgccgggaagttcctccaacgccagccgtatttccgtgtccgtgcgctccaggcgcaggcgcaacagcaacgcaccatccaggccgaggctgagccggctatcggtttcgtcaccactcaaacgctgcccgccaggcaacggcaatacagtcagggaattcaacaggggcatgatcggactcgagacacggagttgttctcagaggaacgtcatgtggcggcggaaatttaa

SEQ ID NO: 357035 - DNA, 291 bp, Pseudomonas aeruginosa
atgtccgatagcctgcaactgatcctcgaagacaccgacggcacccagctggaaacctcctgcacccgcttcgccgtggtctggcagggcaaggaagtgtggatccagcaggccggcaacggccagttgctgatcggcgtggatgtcgaggacggcgacaccgagtacaccaacctgctgctgcggccgatggcgaccaacctggtcagcctgcaactggagatggagccgatcgaagagagcgacgaccacgagcacggccccgactgcggctgcgaccacacccactga

SEQ ID NO: 357036 - DNA, 657 bp, Pseudomonas aeruginosa
ttgtactggttagggccatttcagtactcatccaaacaagaactgcttgataagctcaagatcttcgtggggaacgcgccgattggcagggtttcccacaagattgccattcaaaagcttcatctgctcatagcgctacacccagacgcagagcggaagattggtttaggcgttgaccacttcacgattaaacggaacgcactaggcgcaggccaagggatttggatcgttcgtacagatggcagtgaggcctcattttcctatagacgctgcctcactggggtgcggcagtcaccctatgggaaggtctgcgaggcacttaggttctcagttcgctcacagttgatagcgtttcgagaaacgctaaaaatccccgccagatgtgcgatcagcggcaaagagatcatccatcgacacgatctgcatatagatcacaaggttccgttctggaagttgttgctggccttcgccgaggttcgccaacttgacctgtcccaactcgatacggttggaagcggggagactttggcccttgcggatcaagatattagcaaggcctttgaagcattccatttggtccatgccgaactccagccatccagcagaaccgcaaatgctttgaaaggagggaagctctcgctccctgacagcgactga

SEQ ID NO: 357037 - DNA, 141 bp, Pseudomonas aeruginosa
atggcgttatccgccgcagcggcactcccggccgatagcggagccgccctcaccccaactctctccctgaagagagaggggattatccgtacaagcgtcgaattcgctgtctccaacgccgccgacgaacccgaaccgtag

SEQ ID NO: 357038 - DNA, 345 bp, Pseudomonas aeruginosa
atggttccatcggatcgacatgaggcggcgcgcccgcttgcggccgaagcgcaagcgagcggatgctcccgcgccgatgttctggagttgcacaggcggaacgcccagctggcgatcctgcgcgtggactccggcgacgtggtcctgccgatgtaccacagcgcccagggcaactaccgcgtcggcgttgcgctggcggacgtatcggcgggccgcgcgttcttccgcgccctggagcaggttgagcgtctaccgggagtgaaccccgccgccccgcctggcacgccggcggaactgcggcgagcctgggagacggacggtgccgcgcaccgcgaggaaagttga

SEQ ID NO: 357039 - DNA, 1632 bp, Pseudomonas aeruginosa
atgaccgctgtcgacctgctgctggtcgcgaccctgctggcggccctgctcgcctggtggatacccgccctgcccggccgccgtggtctgctggcgttcgcctcgacgctggcgctcggcgccggcctgtacgctgcatgggacgaccgctggcaggccgccgtcggtgccttcgccggtttctccctgctgctcggcacctgtctgcgccgcaagcccgtgcgcggcctgccgttccggagcggttcgctgtacggcctgctggtgctgctggcaatcgccgcgctgtacctgttcccggtcgcgccgctaccggcgccgagcggcccctatgcagtcggcgtgcgcgatttcgaactggccgaccccagccggcccggcgccccggccgggcagccgcggcgcctgctggtgcgcgcctggtacccggcgcgcccgatagtcggcaccgcgccacgccactacttcgacccggacgaggcgcgcagcaccgcgcggggcttcggtgaaatactcggctttccgccgttgctcacctacctcaagcacctgcgcacccattcctatccggacgccccgttgcgcgacgactccgctcgcctgccggtggtgttctacagccatggctacagcgccttcgccggcggcaactggaccctgatggaagagctggccagccacggctatgccgtctacgcgatccagcacagcggcgacgcgtcgccgacccgcctgcccgacggtacgctgctgcccatggaccccggcctggtcgaacacctgcgccgggccgcccacgacggcctgccgcaggccatgcgccagggctatgtcagcgacgatctcgaccagcgcctcgacggccagttgcacaccgccctcgacctgcccgtcccggccaaccgcgccgtcaacctcagcgcgccggtatggctggccgaccgcctgttcgtccatgaccgcctgcaggccggcgaggtcccggacagggtcgccgacctggtggccgccagcgacttcgcgcataccggcgagatgggcatgtccttcggcggctcgaccaccggcgcggtctgcatggtcgaccgacgctgcgcggcggcggtcaacctcgacggcggcgacttcgacttcgcgcccttcgatagcgatttcccggcaccgctgctgatgctgcacgccgaccttggcaacttctaccggctgttcggcatcgaaccgccggcccacccgagaagcttcaacgacttttcctacgaacgcttcgaacacgccggccagcgccaggacattcatcgcctggtactgcgcgactcggcccatgccggtcttaccgacaatccgctgttcatccgccggccgctgcgcgacgggctgctcggctcggccccgacggaaatcctcatccaggcgcccaacgccctggttctgggcttcttcgatcattacctgcgcggccgcgccaacgactttccgcaagcgcagatggcgcgtttctccggttggctgacgcgctatgacaactcggcggtgcgcgactggtggctggccaagccgcaagcccagcgcctggcgctgcgacaacgcatcgacgaaatgaaacggcgcaagaccgggctggatcttccctga

SEQ ID NO: 357040 - DNA, 429 bp, Pseudomonas aeruginosa
atgaccctattcgccactatggccagcctgatggcctcaatcgtccagccgacaaaaccgctgtacaccacagtggtatatcccatccaagggaaagcagccgtgctgcatgacggtctcaatatccgcagtaagcgcacgtggtaccagtatcccgagtcgctgaccggcgaagaagagaagtcgacctacccgttcgatcttcacatcgacgataacgcggtctgggtcgagcccatcatgcagactcagactgacaattgcagcctgcagagcagcttcatgaagctgatggaagacggttgggtaaacccggccaacggactgccgatgatggatggctgcctcgatgtcatgtgcaatgcttacggcatggactcgatgagcgacagtctgtggttcgatcacggtggcgcgttcgcagactga

SEQ ID NO: 357041 - DNA, 222 bp, Pseudomonas aeruginosa
atggctaaggccgatcataggacagtcacgcccagaactgaacgtttcgctaccgtcgcagcggattactatccgccgctcggtgaacaactccacgtcggcgatagggtcattccggggatcaagctgcgcggctactggctgcaacgggccggcttcgaggtcaacgaacggatacgcatccgggtgatgcaggggtgtttggtgattacggcggagtga

SEQ ID NO: 357042 - DNA, 474 bp, Pseudomonas aeruginosa
atgccggtacagcgtccctacaaccccaacgccaagctgatggcggaaatgctgcagaacgactgggcgaagatcggcatcaaggcgaagatcgtcacctacgagtggggcgaatacatcaagcgcgccaagggcggcgagcacgacgccatgctgatcggctggagcggcgacaacggcgacccggacaactggctcggcaccctctacggctgcgacgcggtggacggcaacaacttctcgaaatggtgcgacgccggctacgacaagctggtcaaggacgccaagcgcaccaccgaccagggcaagcgcaccgagctgtacaagcaggcccagcacatcctcaaggagcaggtgccgatcaccccgatcgcccactccaccgtctaccagccgatgcgcaagacggtccggtacttcaagatcagccccttcggcctgaactcgttctacgaggtcagcgtcggcaagtag

SEQ ID NO: 357043 - DNA, 1218 bp, Pseudomonas aeruginosa
atgaccgtgggtgttggcggtagtacccctgagcaggcgctggcgcgtctgcggaacatgacggacggtgcgcagccgatcggcctgccggcctatcgccagcgcatcgccgcggcccaggcctggatgcgtgagcgcggcatcgccgcggcctacctgcatgcgggcagcaatctgcgttacttcagcggtgtgcaatggcaccccagcgaacgcctggtgggcgccctgctgcccgccgaaggagcgctcgaataccttgcgccgaccttcgaggaaggtacggtacgcgacttccaggtggtcgacggcatcatccacacctgggaggaacaccaggatccctaccgcctgctgctcgagcgcctggccgcgctcggcatcgacgaggcgcgtccggtcgcgttgtgcccgaccttgccgttcgagatgttcgaccggctgcgccggctggcgccggcgcggtccttcgtcagcgccgcggcgctggtcgaccaggggcggatgcacaagtcggccgaggaactggcgctgatgcagcgggccaagaacatgaccctggaagtgcagaaggctgcggcgagcattctccgcgaaggcatcagcaccaccgaggtcgccgaattcatccaccaggcgcaccgcaaggtgggcgcccccggctcgaccttctgcatcgtcctgttcggcgccgccagcgccttcccccatggggtgaagcacgcgcaggtgctgaaggggggcgacatggtgctgatcgacaccggctgccagctccacggctaccagtcggacatcacccgcagctacgtgttcggcatgcccagcactcgtcagcgcgagttctgggcgatggagcgtgacgcccaactggcggccttcgacgccgcgcgcctgggccagccctgcgaggcggtggacgccgcggcgcggcgttcgctggaagccaacggcctggggccggactaccgcttgcccggcctgccgcaccgcaccgggcacggcatcggcctggacgtccatgaaggtccctacctggtgcgtggcgaccgcacgccgctggacgtcggcatgtgcttcagcaacgaaccgatgatctgcgtgcccggcgagttcggcatccgcctggaagatcacttctacatgacggcgcagggaccgtgctggttcacccagccgagcccgtcgatcgacgatccgttcggcctgcaaggctga

SEQ ID NO: 357044 - DNA, 564 bp, Pseudomonas aeruginosa
atgaccgtagaccgcatcggcgaacgcctgcgtcgctatcgccgcgccgccaagaaaaccctgcaccaagtcgccagcgaatccggtctcaccgcgagcttcctttcccaggcggagcgcaacctcaccggcgtatcgatctcctccctggccaacatcgccaagtcgctgaacatcccgctcaacgccctgttcgaccaaccggcccagccacagcccgattcccacgaaggcgaacgggtgcgctacaccatcgagggccagccgctggcctacgagcgcctgtccagctcctttcccggcaacctgatcaacgcggtgaagatgaacatgccggtgggctatcagtccgagctgatttcccatgagggcgcggagttctcctacgttctttccggacagatcgtctacaccatcgaaggccgccagtatcccctcggtgccggcgactcggtgcatttcgacgccaccaagacccactgcctggccaatgtcggcaacgacgtggcggaagtcctgaccatcaccaccatgggcctgttcgacgaccatccggcgccctga

SEQ ID NO: 357045 - DNA, 1293 bp, Pseudomonas aeruginosa
gtgggtcgagagttctccgcaggaagcggcctagaagccgagctaaaaaaacacacaggcgtcgaaatccacggcaatagcctgcgaatcgtattcatgtggcgcagacgccggtaccgggagacgctaggcctccccgttacaaaggccaatatcaaacatgccgcccaattacgggcggctgttcttcatgcgatcaaaatgggcacgttcgaatatgccgcccatttccccgagagtaagcaagctggcaactacagctcgacccgcgacgagcggctgaaagccctgctcgaaagatacaagccgctcaaagcagtggacattacgtccgaaaccgaacgccgctacggttgggcgttggacatctgcgtcggcctactgggtgagaatcgcctaggccgcgtgatactgcccgaagacatccagcagttgcgggtaactctgatcagcgaccgagccacatctaccgtaaatcactacctggcgaccttggctgggtttctcacttggtgcgagagtaacggttactgccgcgccggcctagctgctgcatgtgtccgtttcgaaaaaaccgagcgcgatccggacccgctgacaaaagccgaggcagagctccttctcaacaaaggctgtattcaccctgcagatcacgccgccattaatctggctatctacactggcctgcgcccaggtgaaatatgtggcctggccagggaagatattgatctccagcgtggcttagttcatatcaggcgcgccatcaccagtagcggcacgttcaaactaccgaagaccggtaagcgccgaactgtcctactgctaccgccggcactcgatgcctgccgaatcttgctagccagcgaccacaaggtgccgcagcagactatcaccatcgaactgacccgccacgaagagactcaggaaaccgtaacaccgctgctttcgccaaagctgcaagcgcgaaagaagatgatcaatgcgtggtttgtacccacagcctggaatacgaaatgggccaatatccaacgccgggccggcattcggccacggcgtccgtaccagacacgccatacctatgcatgttggtgcctagcagcccgtggtaacctcgcttttatagccaagcagatggggcacatcgacttcactatgctagccaaggtgtacgccgcgtggatggacgatgagtctcctggcgagctggagcacatctggtcaggcatgcagaaacatacgtcaaatgccccatccctgccccatgaaacccaggattatcctctaagtaactga

SEQ ID NO: 357046 - DNA, 198 bp, Pseudomonas aeruginosa
atgagcacaccgcgctgggttctgatcaaacgtgcgtctgagctaaccggctatagcgaagacgccattaggcacaaggttaaaaacggtacctgggcacagggccgcatctggagaaaagcacgcgacaaccgcgtttttatcaacattgaggagttggatcggtgggtcgagagttctccgcaggaagcggcctag

SEQ ID NO: 357047 - DNA, 375 bp, Pseudomonas aeruginosa
atggaatttcgtcacttaggcaatggacagactttcccacctgtagcgccgaatggccgggtctacgccatacctgtcacgcaggaaaaccacgtagagattttctgcctgactcctgaaggcattgttggaagcagcgttgcggccaactgggcagaaattacgggtttctattacgacgacaagtcctgggaaatcatcctgcgcaattacaccggaaggggaatgcgttttcgtcgtggccacccctgcttcatggttgcggaaggaggcgaaagcatactgacgagcattcaggggtactcaatcccgctttgcacgatgaaccgcatatcttttgagaaaaccaaaaattcctaccagaaacccgcgtaa

SEQ ID NO: 357048 - DNA, 837 bp, Pseudomonas aeruginosa
atgggtaacaaatcaacaacgatccgaatcggcttgctggccgcgacagtagctcttttggttgggtgctctggcactcaagggaataggacagtgcagcttcctgccccgaatgatgttccgagggaaaaatggtcggatgctatgcatgttctgacggccatggggatttccgggcagcgcgacgttccaattgagctggcaggggcggttaatgacgtgagctcatccggcggctctgtaggagggttaggggatgctggattaagcgcggttagcttcgcgtctccacctacgggtttgagtggcggcgcagctgcaggaattggcttggggttaatgttattgggtggttcaagcgatccggcgcgggtgactcaggttgtcgcgtgggtaccttccgatcaggctagttcgccaggcgaggcatctaatctggcgcttcacaaggtcgaggaagtacgcaagaagatctttccaggcgggctatcgaaactgcggatacaaacaggcaaataccctgacagtcattcgcgcgcttacgcgtcccttgcagatagctacgcggagcggccgatcccattcagcgacgaggtctcgacatcaccaagctttttgcagtcgccgctcatctacgggccgatattcatccgtcacaaccaattcacgcttgatgcttacaagaacgacatgacgacttcagaagccatgctgcttgcatcgcaacacctccctgaatggatctacatctaccaccctggccagcggctgaggaaaaactcgatcccggccgcaatctttaatcagggcagggcgctctacttcatagggaaataa

SEQ ID NO: 357049 - DNA, 147 bp, Pseudomonas aeruginosa
atggaccggtttgagctactgatttactcagtgttcggcgtgctctgcgccttggggattacagccgcgattggttacaagatcgccgtttacctggacaagcagcacgacaacaacagagcacgcccgaactcgactgccgattaa

SEQ ID NO: 357050 - DNA, 429 bp, Pseudomonas aeruginosa
atgaatctgctcgccaccattgccaacctgatggcctcaatcgcccagccgacaaaaccgctgtacaccacagtggtatatcccacccaagggaaagcggtcgtgctgcatgacgatctcaacatccgcagtgagcgaacgtggtaccagggtacagagtcgctgagcggcaaagaagagaagtcgacctacccgttcgatcttcatatcgacgataacgcgacctgtgttgagcccgccatacagactcagactgacaatttcagcctgcacaggagtttcatggacctgatggacaacggctggataaacccggctaacggactgccggtgatggatggctgcgtcgatgtcatgggcaacgcttatggcatcgactcgatgagcgacggtctgtggttcgatcacggtagcgcgttcgcagactga

SEQ ID NO: 357051 - DNA, 966 bp, Pseudomonas aeruginosa
atgctcaatgaaatgctgcgacgtgatcgtgaatcatcagccatggcaccgtggtgggttctccttaaagcgaagaagtttcaaatgcgccagcttctagtgtgcggcttgctaagttgcctggctttcgctgcgccggcagaggttatgtcaccggcgcaattgcactttctggaagtaaacgctgctgaacccgaggctacccaggcctggaggcggggcgtgtacatttgggatagccgtgcgttgctcaatcctgctactcgaaccgacgagctgtctcgcctggaccgcacgggcatccaacgtctatatatcgggctgagcgccgagcaattagcgcaaccggaagttgtgcggacgctcgatgcggttgccataacgctcagaaaacgtggcttcgagcctgtgctgcttttgggtgatccagactggatggcgcctgagaaccgcgcttcgctgatcgccatcatttcgaaattgaagtctgtgtcgttctcagcacttcatctggatctggaagttgagcagcgtggctggccggttccggcgaaacatgtgcgtgaatggctggacacgctaaagcatgtggcagccgctagtccttggcctgtcgaaatatcgagccattaccgctggtttactgaggagatgggtggctttccttgcgctccgtgtgagctaccttccatcggtgtaagtaaggtgagtttgatgatctacacccgcagtgctgaacgcagcgcccagctcacggagaaaatcgctcagcgctggccggccgtgcgctttcgactcgcgcagagcatagagcctcagcttgcgcctgaagaaacctggggcggcgcagcacaggctctacttcaagagcaggacagcttttggcgggctaggctgcagcctttggctgtagggggtatcgactggcaagagtgggaatattatccaaccggccaacaactatga

SEQ ID NO: 357052 - DNA, 1866 bp, Pseudomonas aeruginosa
gtgccgttcgtaaacaagcctgccatcttggcacgtgccatcgccattatagttcttgtcagtttgctgatagttgccgttaccgcttttatcgagcgaaacacatttgatcgcttagatgatctaaacgggcctactgaagtgagccatatctctgaccaggggcgttccgactggaatcgcttcgccagcggagagccttctcgtcttgcaatcttgttgactgataaggattccgcttggctcggcctgtctcatggcctcaaaagtatcggcgtgccgttcactattaccgatgacgtcgccgaggctactcgtcataacgtcgtcctcgtgtatccgttgctttcgggacgcacccttgacgatgctgggcgcacagcgctgcgccgccacgtggaagcaggacggactctaatagccacacaagtgctgggtggcggactacacgatctgtttggcttcgaatcgactttggaatcgcgagctcaccacagtatcaccttcgaacaagcgccagcccttggctggatcagcgatccccatgaaaagacagtactgcttggccagcctgatctgccgacaagttggatcggcacgcaaacgtatgtgaatgcgcagcaggttttggccaggttcgaagacggatccgccgctttggtcagaggagacaacaaggcaggcggcagcgcatatgcgttgggttttgacctcggctttttcatcatgcgagcgcacaacgatcgtaatgaccaaggctaccgggcctatgccaatggttatgagccctccgtcgacgtatggctgcgctggctcagggctgtctatcgccagcacgaaccgctagccgtcacgattggctctgtgccacaaggccaacgcctggctgcggtcgtgacgtttgatgtggattacgtcaagtcgatgggcaatctacttgcctatcgggacttgctcgtgcgggaaggaataccggcaacctttttcctacaaacaaaatactaccgcgactttcaggacgaaggttttttcaacgaccgtacgcttgctgcgatggatgccttggtggcggctggtatggagatagccagccactcagttagccattccgacatgtacgcctcgcttccgcttggtgatgggagcgagcaatatccgacctaccagccgagggttaaggctctcggcgatacgcaaggtgcgacggtgatgggcgagcttagggtgagccgctttttgttggagcaactgaccggtcgctcggtggtctcgttccgtcccggctatctagcaacaccgcctcgcctccctgaggctctggccgcatcgggctatcgcttttcgagttcagcaactgcagggaacctcaccacacacttaccgtttcgcacaaacacgcaacggatgtatagcgatgaaacgacagtgtttgagtttccaattgcgattgaagatgagataccgccgattatggatcagcgagtcgaggaggcggttgagctggccgagaagcttgcccgatatggcgcaagttacgtgatgctgcttcacccgaatgaagttgaccataagtaccgcttcttggagcagatccttcctcgactcaaaccattcgcctggtttggaaccatgagccagtacggcagctggtgggctgcacgcgataaagtcgaggtcgatgtgctggcgcaacgcggtcaaattgtgctcaacgtccaagcgcaagagcctattaaagatctggtatttgagttgccaactggcctgcggccggtctctggcagcgccatgcaaaagctatccgatgggcgatggctgttccgcgatattcccgccggcacgattatgattgacttacatcactaa

SEQ ID NO: 357053 - DNA, 1356 bp, Pseudomonas aeruginosa
atgcttaatagcccaatctcccgccacacactcctggcactaagcctgatgatcagcatgcccgctttctgtgccgtctcggccgaacaggcggcacagctagaccagcaactaacgcccatgggcgccgaacgtgctggcaataccgacggcagcatccccgcctgggacggcggatacaagccatcgacctcaggcggagcgctggtcgatccctatgccgccgagcaaccgctacagcgcatcgactccggcaacatggcgcaattcgcccagtggctgagcccaggcacgcaagccatgctccgtcagtacccgcagagcttccatctgcaactgtatccctcgcaccgcagcgcggcctatcccgagtccatcctgaaacagagccggcaaaacgccacccggatcagactgaacgccagtggtagtggcctggagggtggctacaccagcggcgtgccgttccccgtccccctgcgtgccgaagaggttatctggaaccatgtcacccgctaccgtggcggggcggtcaagcgcgaggttcaccgcatgccggtgcaaaccagcggtgcctatcaggccagcctcatccgccagacacaggtctttgccagcaatgtccgggacaacacgccagacagcaatctgctcttctatttcatcggccagaccctggctccggcgcgccaggccggcaacatcgccctgattcacgagcccctggatcaggtacaaaccccacgccaggcctgggcttacaacgccggacagcggcgtgtccggcgagcccctacactggcctacgactcaccacagaacagctcggatggcctggccacatcggacaacatggatatgtacaacggtgcgttcgatcgctacgactggaccctcaaaggcaagcgcgaactgttgattccttacaacaactaccgactgcacgacaaagggctgaagtacgcacaaatcatccagcctgcgcatttgaatagcgactacgtgcgctatgagcggcatcgggtctgggaggtagagggaaagctcaaagcaggccagcgccacatttacgacaagcgcacgtttttcattgatgaggacacctggcagattgccctagcggaccattacgacgcccgtggtgagctatggcgagtatcggcagcctaccagttgaacttctacaacgacctggtgccctggatgaccgccgaggctattcatgatctgcagtctcgccgttatctggtcagcggcctgagtaatgagaccccgagcgaggccagcttcggccatgaggctctgcgccaagacttcaagccagatgccttgcgccgcttgggcgggaagaactga

SEQ ID NO: 357054 - DNA, 1887 bp, Pseudomonas aeruginosa
atgcaccaattacgcagaggccatggcgcccttgtgtttacactgctggccgtcaacagcacgctctgccacgccgctaccttcgaactcgacaacggcatcagcggccgctgggacaccagcctgtcaactggcatgagcatcagcaccagcgatccagacaggaatctcctgcccactgtctatgacggacgcgccgccggcatcaacggtaacgacgggcgcatgaacttcaaagccggagacaccatatcaagggtggtcaaaggtaccaccgaactggcgcttagccgggacaacctcgggctgcagatcagcggcaaattctggcacgacgacctgctggaaaacggcgacgcccgcttcaaggacttcgacgactcgggcttcgattcgctggccaagttttccggcgccgaactgatggatgcctacgtctggggcgaattccagctcaatgaccggccgctggatctccgtctcggtcagcaggtcctgagctggggggaaagcaccttcatccagggcggcctcaatgtgatcaacccgatcgacgccaacgccctaaccacgcccggggtcgagatcaaggaagcgctgattccggtcaacctgttcaatctgtcgcttggcatcagcgagaatctctcgaccagcgccttttaccaactggaatggcgcgccacggtacagccaggttgcggcaccttcttcgcccagtcggatgccagtcagccaggctgcggcccactgtatgccgtttcaggtcgaacggaagcgcaacaggagaacatgcagctggtcaatccgctgctgccggccggggccaacatggttattccgcgaatcagcgacgatacccccgcagatgccgggcagtggggggtgcgcctggactacttcgccgaagagctgaacagcaccgagcttgccttctacgtgatgaactatcacagccggctgccctataccaatgcgatcaccgccgactattccaagcgtccgggcagcggcttcttcctacccggagttaccaacaacccgctctatggtggcagcaacgccaagccgctggcccaggcgccgctctaccagatggccttccccgaagacatccggctgtacggcatcagtttcaacacctcaggaccctggggtatctctatgtccggcgagctgagccacaggcccaaccagccgatcgccatcaacggtcaggactttctctacgccagcggctttctcgacaccgagtcacccatcgtcgacgaactgtttggcctggacattcaagccccgggaagcggccctattctggccaaagccgccggcctctatgggacacaggtgcagggctatcggcgcaaaccggttagccagctgcaactgacggccatgcaaactttcagcgacatctggggcgcagataacctgctgttgattgccgaagtcggcaccgtgcacgtggcggatctggagccggtcgagaccctggcctatggccgcgacgccgtctacggttccggcgtagaaggtgccgccattgcctgcaagaacccggcgttgaagcaggactactgccaacgggagggatataccacgccctggtcctggggctatgcagcccgagccaacctgacctacaacgacctgctgccgggcaccgtggtcaccccatcgttggcctggcgttatgacgtcgaaggttatgccccctctccggctccgcaattcgtcgaaggccgccaggccgtcacactggccgtgaacttcgactatctggagcgctacaacgccgccgtcagttacaccgacttcttcggtggcgacttcaatccgcagaccgaccgcgacttcatctcattcacccttggcgccaagttctga

SEQ ID NO: 357055 - DNA, 1041 bp, Pseudomonas aeruginosa
atgagcagtccgccccacgaactagcccatacgaccattgccacctgggcgctggctattcagcgagcgctgcaggggtatggcatcgaggcggtgccgctgatgctggaggccggtatcgatcccagggtgattcgtgatccagagctgcgagttgccgtggtcaacatgtggaagctctggcggctttgtgtcgaacggaccggcgatgactcttttggtcttcaggtcgctgccaatctctatccgactcacctcaatgccctgatctttgcgctgcaggccagctccaccctgcgagaggcgctcgatcggctgcagcgctatgtgcgggtggtcactaccatcgcggcaatcgaggtggtcgagagccctgtgggggtggcattgatactgggctctgatagctccggttcggcacagcggccatttttccctgttgatgccttcatgggggtgttgttcagaacctttcgcgagttacttggagccagtgctgccgaagggctgctcgaggttcgtttgtgccgtccggtacctcaccgcttagaggcttttgaacagtttttcggcgtgcccgtgtactttggcgccgaggcgaatgtcatgctgatggcttccggcgtgctggatcgggagctgccggcggccaacgccatgattgctggaatgaacgagcagttgttgcgcgattatctggggcgaatgcgccacgagcaggtcagcctgcaagtgcgcaaggagatcatcgccttgctcagtagcgacaagcttgggctagagcacattgccgagcgcctgaacatgagtggccgcaacctgcatcgcaagttggccgaggagggcacatcattcaaagaactgcaggatgagattcgacaggacctggcgctgcgctatctgggcatgtcggggatgagcctgaacgagattgcattcaatctgggttttatcgaccagagcagcttcaaccgtgccttcaagcgctggaccggtggcagtcccggacagtaccggcgcgcgctcagggagcgccactga

SEQ ID NO: 357056 - DNA, 1512 bp, Pseudomonas aeruginosa
atgactacacacgagcagataccatcgttcttggcagagatgcccgcgccggcacttgccgcatacatgaaccctaacattgcgccaaagccactccctagcgggttgtccagggtcataccctggcgtgatgaactattgcctactgctcttcaggagtacgtgcgggatgttgctgaacgtacccagtgcccacctgattttgttggggtcgcgcttatcgtggcagtcagcaccgtagtcgggcgcaaattcaccgtctacccgaaacaaaacgatgactggatggtcgttccaaaccagtggggcatcatcatcggacgaccgtctgcaatgaaaacgcctgcactcaaacaagccctgcttccattgcgcgcattggatgccaaagagcgagaacgctacagccaagctcaagccgagcacaaggccgctagcgagctttacgacatgaagcgcaatgcagccaggttaaaagccagaaagctttacagtggtggtgacgagaatgcagctcaggaagaactgaaacgtcactcaagcgagaacccgcccccaatccagcggcgctacatcgtcaacgacgcaacggtcgaaaaactcggcgagctgctcaacgagaatccaaacggcctagtagttgagcgtgacgagctggggggctggctggcaacgatgcagagcgaagatggctcggttgcgcgagcattttatttggaatgtttcgacggcaacggctcattcacctatgaccgtgttggccgaggaaccatttatatcaagtcatgttgtttatcgttgatcggtggaattcaaccctcacgaattgcgtccctcgtaaacgctgccgtcagcggcgaactggatgacggcctgattcagcgcctgcagctggcggtatatcccgacgatgttcgagagtggcgctatatcgaccgttggccgaacaaaatcgccgctgagcgcgtctcggaggttatcgaacagctcgaccagatacctgatgagcctcactctgccctcagatttactccagaagcgcaggagaagtttatcgcctggtatacctcccacatgcaagcaagccggagcgatcatcttcaccccgcattgcaatcccattacctgaaaatgccgaaaaccattgcaggcttggccctcctatttgagctgattgaaggcggacgaaaagccgtggccgctaagtccactgaacgcgccatcagctgggcgaactacctgatgagccacgcccagcggctgtacggagcggcaatcaacgcaccactaatcgctgcgcgactgattctggagcgccagcagaaattgcccgaggcatttactgcccgagaggtgcgtcagaaggattggacgggattgggctcgcaagacgccgtgaataatgcgctcgcaattctggttgaacacgacttcatcgttggctacgaggttgccggtgagaaaggtggccgcccatcgacacgctatgtctggcgaaaaacgttgccttga

SEQ ID NO: 357057 - DNA, 249 bp, Pseudomonas aeruginosa
atgccgacacatacacctaaaaaatacctaatcagccacacctcgctgcagcactgctttgacaagagccgttccggcctcgaaaagctccgcgaaatcgatcccagcttccctcgccccatcaaatttggtctgagcaaacaggctggggtctacttcgtcgtcgcggaggtcgaggcctggctggagcgcaagatcagtgagcgtgatgatgtcgcactggatctcgccgggcgagaagagcaatga

SEQ ID NO: 357058 - DNA, 1872 bp, Pseudomonas aeruginosa
atggatatctggaactgggtggagaagctccgcgccgacctgcgtgaggccggccaggagcagagtgcgcggctgatcgacgaactcaccgcgtacgtctgcgacctcgaggtggagcgcgccgaggcgctgttgccggaggtcaaggcgctgagccggacgttgaacaacccgtggctggaaatcttcgtccgccactgggaaatgcgtaaccgggtcggcaaccaactggagggtgagaccgccctggccgacgccgtttccctgttcgaactggccaaccgcgacgacacccaggcctgcccgcagtcggtctgcgtgacccaggacctggcgtcgtgctacgccaacgtcgacggcccgggctgggtggaggaacgcatcgaggtgtgcgacgagaccctggcgcggatcgacccgacctgggcctgcttccactgcctgagcaacgagaaggccgaggcgctgctcgacgacgggcgcggcgaagatgccctggccttcctggccgaacaggagaagaagatcctcgccgccggcgaggaggtattcgacagcctcctggagatgcgcgtggcgatcctgctgaacctggggcgcgccgaacaggcgctggccctgatcggcgagatggaggagaaggtcgagggcgcggagtggaacaacatcagccagccgcggcgtctgtacaaggcccacggcctggcgttgctggggcgcgacgaggaggccctggaggcgctgctgccgttctccgagattgccccgcgctaccgtacgatctggctgcgcgcggtctacctgctgctgcaacggacccctgagcgcaacacctgggacttcggcgggcgcctgcagcagatgctcgaacactactcgcagaagggcgcgcaccgggtggtcatcgatgttgccagccaggccatccgcctcgcgttgcaacgcggttcggtatggagcgccaggcgccacctggcgctggccgaacagcatgctcaacagttgcagcgcgatcggggcgccagccagttgctcgccgggttgagggaggagatcgatgccgcgccgcagcagcaggagctgccggtgccggctgcggagttgctcgactggctggctgctcagggcagcgaagacgcgccgcgcaacccggagaaagaagtgcagtggctgctccaggcgctggccgagcggcccgacgacaccgccttgcgcgaagtggccgcctcggcgctacaggcctgctccgccgacgacgaggccatcgacctgctctgggagtacgtcgagcgccacaccgacgaggagcagcaactggcctactacctgctcaatgccttgctggcccgcggcgagtacgaccaggtcaagcgcctcggccggctctacgccgacagcgtgccgctgatcgcgctgtggagcgaagtcaagctggccgagaaactcaacgactggccggagctggagcgcgcctgccaatcggtgctggaaatttctcccggctcgctgggagcccacagcctgctgggtaaggcgctgatggagcaggatcgcttcgccgaggcggcgctggcctaccagcgtctggccggcaagctggaggagccgcagtcggtgcagtgggaccagatgaccgccgccagcgccgcgcgcgactggacgatgctgcgcgaggtcgctgccggcatgggcatggagttcgccgccggcgacggaccgatcgaggaagactggggctgggtgatcgtccgttacatcgaggatggcgaagcgctcgactactacgcccggcgcaccggcccggcgcaccggcccggtgaccgcgcgggtcctcgagaacgcgccgggcaatcgcagccagcgggtcggtga

SEQ ID NO: 357059 - DNA, 1293 bp, Pseudomonas aeruginosa
atgcaggcgttatacctgcttgccctcgaaccggtgtccgagaccacagccgaccgaaactcctatggctttcgtcctcatcgctccacggcagatgcaatcgagcaattgttcgtcaatctcggtcgtaagcactctgcgcagtgggtcatggagggcgacatcaaggggtgtttcgacaacatcagtcacgactggctgatcatcaacgtcccgatggacaaggtggttctaaggaggtggctgaaggcgggatatatggaatccggccgattgagcccaaccggggcgggcactccgcaaggaggcattatctctcccgtattggccaacttggcccttgatggactggaaaaggagctcgaatctcgattcgggcagcgcaataccaaagccagctacaagaccaaggtcaactacgtgcggtatgcggacgatttcgtcatcactggcatctcgaaggagttgctggagaacgaggttaaacctgtcgtcgaagcctttatggccgagcgtgggttgagccttgcggcggagaaaacgctgttcacgcatgtatcggatgggttcgatttcctcggtcagaatgttcgcaagtacggtgacaagctgctgataaagccagcccacaagaacgtgaaggcatttctggtcaaggttaaggcgctgattgatgggaacaagacactgccggccagcttactgatagacaagatcaaccccgtcattaggggttgggccaactatcaccggccagtagttgccaagcagaccttcaattatgtggattacaggatctggaaattgttatggcgatggtgcaggcggcgacatctgaatcgctgcaaacgctggatcaaggaaaagtacttcaagcgcgtgggaacacgcagttgggtattctccgggctacaccccagcggcaaactgctccacttgttgtacgccagcgatacgccgatcaaacggcataccaagatcaaggcggaggctaacccatacgccccagaggacgagatgtacttcgagcaacggctggaatatgcatggcgaagttcggatgaggggaaacggaagacgctgacgctatggcttggccagagcaagcgatgcccgatgtgcaagcagttgatcacgttcgagacaggatggaacattcaccatgtcgtcgagcggcacaagggcggaggagacgagctggacaatctggtgttgctgcatcccaattgtcatcgacagttacacagtacggcaccggctctttcaattgagaaggggcttacaaaggcttga

SEQ ID NO: 357060 - DNA, 1506 bp, Pseudomonas aeruginosa
gtggcggcgcgtcctctcctgctctcgctgcacggtggcgccggcgcgctgttcggcgtgctgctgttcgtggtgctgttcagtggcgcctggagtcttggccacgacgacctgcgcgagtggctgcgggccccggcgcaggcgggaggagaagcccttgcgctggagcgcctgctcgaacgggcgggcgaggaaggcgtcgacatccgcgatgcgaccctgctgctgcccgctcccggccatgccgccttcagcgtctgcgatgcgcgcctggactgccggctggacctcgacccggccagcggccgggtgctgccaccgatgccggcgctggacctcctgctgaacctgcacaagagcctgttcgtcggcttccccgggcgggtgctggtcagcctgttcggcgtatcgctgttgctgctgtgcctggccggcgtgctgctgcacagccgccgctggcgcgacctgcggcgttggcggcgggatcgcgggctgcgcctggcgctgttcgacctgcatggcctgatcggcatctggggactgccctggctgctgttgttcggtttcaccggcgcgctcagcgggctgggcgctctcgggaccctgctgctggcgccggtggcctacccgcaggaaccgaaccgggtgttcgtcgagttgatgggaccgccgccgcccgccgccgaggggcggccattggcgtcccgcatcgatctcgaccgcctgcttgccggcgatgccgtgcgggcgcccggcttcgtcgcccagcgcttgagcctcagccatgccggggatgtcgccggcagcgtggagatcgccggtatccagcgtggcctgccgagtaccgcgaacttcgagcggcaccgctatcggctggccgacggcgccctgctcggcgagcgcagctcggcgcagcgcgggttctggctgcgcgccttcatcgccgtgcagccgttgcatttcgcccagtaccagtggctcgggccgggctggtccgccgcgttgcgcggcctgcacctggcgatgggcctcggcgcctgcctgctctgcgccagcggcctgtacctgtggctgcaacgacgcgcctcggcgccggacgcccgcgtacggctcttgcagcgcctgagccagggtttctgtgccggcctggtggcggcggccgcgttgctcctgctggggctgcaactcgcgccctcggagctactcgccggaccctggccggggcggctgttccttgtcctgtgggccgccgctggcctggcggcgttgctgctgccgggcgactggccgctggcgcgcggattgctcggcgtcgccgggctggcctgcctggcggccgccgtcgcgcacctggcgccctggctcatgcgcggccggctgccggccctgggccccgacctcaccctgatcctctgcggcgcgctgctcatccggcacgcctggatgcaggcgcgcgccgccgcgccacccgcccacccccgtgtcaccggagaccaccatgcttga

SEQ ID NO: 357061 - DNA, 225 bp, Pseudomonas aeruginosa
atgatcaacgccggcagcgacatgaccgcgccggtcgcgttctggatgactgagcccatgatgttctggaaaccttgcgtggcaccgttgagctggttctccagggtggtgctcaggttcatgtttccgcacatcaggtcgttgttccagccgaagccgacgccgatcgagtccatctggccggcgctgcccatgctcaccgcactgccgccgccaatgctgtag

SEQ ID NO: 357062 - DNA, 939 bp, Pseudomonas aeruginosa
atgaccagccacaacctccgccgcctggcagcggcggccgccaccttcagcctctcgttcacggcctcggccgcgatcaacagcgccgccatcgtctcctccaccctttcacctcagtgcctcgaatacaaggtcgtcgggatctgctactggctgctctgcggcccacatggctgcaaggtgaagacgtcggtcaaggtccgccactacgtgcctgacgcagtcgtctccagctatgcgaataccgggagcaacccctggacggaagtgtcggcgctgggcacaccgaatcccctcgcccaggccggcaatgacgcgaccaccaaccacaaggccgagaacagcatcggccgcttcaaggaagcggatgtgatcggccatcctggcggggccacgttcagccggttcgccagcgcctctgggtacgtttgccctggcgccaccttcccgctggtgccgtacttcctcagcacactggacgccattggctggcggcatggcattcccgagcaggtgtaccccgaagcgttggtcccagggctgcgcgaggtgggtggaatcttctccggcgacatgtgggggaacctctatccgcgcagcggattcctgcaccagaccgacgactacaagacggcggccgtcatcgcccagcgcgccggcgacatcaccacgcgaatcggccagctccacgtctacctccccatgcgcgcagcacccaaggacggctactggccggcgggcgagctgaaagagggcgatgcctcgaccgggaaatggcaggagctgaccccgtccctgagcctcaactgcgcggtgtttcccaactcagggccgaagacgcaggccgtcgacggcgattacgcctgggcgctctggcgtccctactcctgctgccagcgcaaggggcagatcttcctcggcagtaccgacttccaataa

SEQ ID NO: 357063 - DNA, 186 bp, Pseudomonas aeruginosa
atgaacacttcccagcacctggtcacccaccagtgcatgaattgtggccggcaccacccacaccacttggtgcgccaggttctccccgccgagaacaccccagaaggagaagccgaggtgttggtctgcccctgctgcgggagctacgacgtccatcagttggaggctgtctttgatgaacactga

SEQ ID NO: 357064 - DNA, 273 bp, Pseudomonas aeruginosa
atggcaacgcgaaacgtcgtccttcccgatccgctggagcaggatatcaacgagctggtggagaccggccgctatcagaatcgcagcgaagtcatccgggcaggattgcgcctgctgctgcaacaggaagcccagaatagcgccaagctcgaagctctccgcaacgcgacatccagtgggctgatgcaattggagcgcggtgaatacgacgagatcaccagcgacgacctgacccaatacctcgacgagctcggcaaccaggcgagccactga

SEQ ID NO: 357065 - DNA, 273 bp, Pseudomonas aeruginosa
atggcaactcgaaacgtcgtccttcctgatccgatggagcaggacatcaacgaactagtggagaccggccgctatcaaaaccgcagcgaagtcatccgggcaggcctgcgcctgctgctgcaacaggaagcccagaacagcgctaagctcgaagccctccgcaacgcaacatccagtgggctgatgcaactggagcgcggcgagtacgacgagatcaccagcgacgacctggcccactacctcgacgagctcggcaaccaggcgagccactga

SEQ ID NO: 357066 - DNA, 381 bp, Pseudomonas aeruginosa
ttgaacgtcgcgggaaaatcctactactacgcgacccgcgctgccgcctgcaccgcgctactcgcggcgatcaacctctacggggccaagagcgtcgactccggcctcggccaagtcaacatcggctggaacggccaccgtttctccagcccctgcgagtccctagatccttacaagaatctgaacgccacctcagacatcctgatcgagcagcgggacgccttgtacacctccgcccccgggaagccggtggactggatccaggtcgccggccgctatcaccgccccgccggcggcgaacctgccgccaagtaccgcagaacggtatcccgccacctcagccaagtcctcggcgtcaacctgctggtgaccaatccatga

SEQ ID NO: 357067 - DNA, 228 bp, Pseudomonas aeruginosa
gtggtgctgcccaccctggccttcatgcgtgtgttcgccaaaggcggcccagccgaggcacgcaactactgggtcaagaccatgcagggcatcaccaagcacgcccacgccatccgccgcatcaacgagggcatgttcgacccgcagatggtcgaggatttcattgggccactcgacttcgatgagcatctgctcgacgacagcttctactcgcaggaggcgtgctga

SEQ ID NO: 357068 - DNA, 189 bp, Pseudomonas aeruginosa
atgctgtccctcatgagcgaagatcttgtgtacctctgccacagcgtccttcagcgggaccccgttttcgagcagggtggacatgctttcgtagaactgcaggcgttccttgcggccgaactgcttgctgtagaaggcgaattgcaactgctcccagaagccccccatcagcacgcctcctgcgagtag

SEQ ID NO: 357069 - DNA, 186 bp, Pseudomonas aeruginosa; identical to SEQ ID NO: 323741

SEQ ID NO: 357070 - DNA, 171 bp, Pseudomonas aeruginosa
atgatcgaactgcacttgctggactgctcggccgggcaatggggctacaagaccattccggagaaagcaggcccgttctactacggctgtccgctggagttcctggacctggctcacgatgagaccaaccaggagtggcgagaccgtctgacgcaagaacaccaagcctga

SEQ ID NO: 357071 - DNA, 234 bp, Pseudomonas aeruginosa; identical to SEQ ID NO: 325394

SEQ ID NO: 357072 - DNA, 384 bp, Pseudomonas aeruginosa
atgcatccacaaaccatcaccgcacacggtttcaccggcttcctcggcaagggcctgtccttgcgtgagcttcagtgcgtcctgggcatcgctgcgggtcgtaccagcaaggagttggcccgcgacctgggcatgcagccgggcacggtgggtaagcgcgtcttggcggcgaccaccaaactcggggtaacccgacgtgccgccctggtagctgaagccatgcgccgcgggcttatctcgcccgccgtgatcgcccttgccttcctcgtcgccggtcagccactgctcaacgatgaccacatgatgcgcagccgtcgtggcggcgaaaggaagatcgaaactcgtctgactgctcgccgcgatggcgtggcctgggtggcgtga

SEQ ID NO: 357073 - DNA, 294 bp, Pseudomonas aeruginosa
atgaacgaccgcacactactcgaactggcggcgcgggcggcggggattgatccagtcttggctgaaccgatcaatttcagtactggggttgaatattactggaacccgctcaccgacgatggcgacgcgctgaggctggctgtctctacgagtctgcacaaacgcctccatgaaatactaactgggccagcttatcgcgcagacgctttgtcgtatggagagcaatgcgccacccgcagagcaatcactcgcgccgccgccgagatcggcaagtctatgggaggtggggagtga

SEQ ID NO: 357074 - DNA, 267 bp, Pseudomonas aeruginosa
atgatcagtgatgagcagttggcggagttggcagatggctgcatagattcgattccgtgccccatctctgcgctgtatgaactggctgagcgacttatcgctgctgaggctgatgctaagcgctggcgtcatgcgcggaacatcctgaccgtcgaggcgattgagtcagctcaatctgattacatcaacttcggtttgccgcctgctgaaagcgaaagcatccgcgcagatcaggccatcgacgccgccatggagcgcacgccatga

SEQ ID NO: 357075 - DNA, 183 bp, Pseudomonas aeruginosa
atgctcctgagcaaagagcactacgaattgatgggaatgttcgaacgggagttcaagggcttccggctggacaaggagtccaaggactactggcccaaaggaatcatctaccaagatgggcacgtcaaccagatgttcctggcgtaccgcaagggatatgcgcttgggaagacagcagtctag

SEQ ID NO: 357076 - DNA, 231 bp, Pseudomonas aeruginosa
atgcgcaagctaaaattgaggtacctgcatgacgccgacgatatgaaccccacgcaccttgaaacagatcaaccaatcaaggtgggtgatgtcgtcgaactcgaagatggtttttggtatggcgtcacggacattcgaatcctgaagcgagatattcagctaactctttcgaagtcctctcaaagtcctgaggaggcaaagcttgtaatgaagcagctatcgtccgactga

SEQ ID NO: 357077 - DNA, 927 bp, Pseudomonas aeruginosa
ttggaaaaactcaccaaccttggaatatatgaagaactttttaaagcagaaaaaatgcctaccaagtgcctgctttgcaaaaaaggagaactagacgagctcggccacatcatccccaaatttgtaatgcgctggctaaagcgagcgagcaagcttaatagcttctacttcaacaatgatcgtgacaaaatggtggccgacacaccagcctttaagatgatgtgcaaaacttgcgaggataaactctcaactttcgaaaaatactttaccgacgagattttcaagaaatattatcgaggcaaaacgccaagcccaatcgatgacgaagtgtacaatttcgccatctcaatcgcatggcgattaatcgtgtctacagagcgcctaaaagacacacaaccaaaagaaaatacatttgaagcaatctactctccttcagaatcaatgatgcgaaactatctcaacaatgaaattgagaagtgccatcactcagtatacgcgctacctattgacaaaataactaggaatatttcgaaaaatctaatagacgacaacgcccttaaatacacaattagacagggcttaaaagcccacctcatcgctgatgagagaagagatatagccctatcttttacccacctccccattatccactttaagatcggctgctactacttttttattctccaggacaactacttcgcaggagctgagtttgaaatctcctcaaccaaagcgtccaaggccaaggaactctatgtccttgactacacacctgatttgctaggcttcatggagtggctgatggacggccactttttcgaagtcaataccaaagatataccgcttaaaagctacacacatagggatgctcctaccctatggaatctggtgtttggtagcaataaagcccagagtgatcctgtataa

SEQ ID NO: 357078 - DNA, 2646 bp, Pseudomonas aeruginosa
atggcgtcggcagaacacgactatcagcatttcatgcaatggcttcatcgacctggcggtggtgtgccagaagatgtgcgccgatttgcaatgctagtgctcgacgattttgagcgagttagtgccacttctcgtaatcgaagtcagcggtcggtgcatttggttgagctggcgcgccagcgactcaccacgactgatccggggcaaccgcagctggacgccatagcagggggagtagggtggagttggcagaggctgtgctacctctcgcttgggccattccggggctttcgtaatgctgaggcgtttgatctagcacgccgtatcgtgttgttttatggccccaatggtagcggcaagaccagtctttgcgaggcgctcgagtttgccctgctcggagctgtagacgaaggggcgcaaaagcgaattgatgctgctctgtacctccgcaacatacatgaaggtcggtttgcacctcctcagctggcggcattagatgcacatggccggcaagttgccgttcaggcagatgccgacgcatatcggttctgcttcattgagaagaaccgtattgactccttttctaggatcgctgcaaaacctgccggccagaagacagagttgatcgccgcgctgttcggcatggacgatttcaatgagtttgtgagtcaatttaacgagtcagttgatgcgcagctctcgattcaagctgtgcaaggtctcgagcttgctcgcagacggcaagcaatcgctcatgacactgaactacttactggtgagcctgccagtattgctgcattcgaccaggcagagcggcagtatgctgaggctttccaagccggactgacgtatgcccagttgcaacaggcggtgggctctgctgacgccccgggtcgattgcaggctttgatagagatattgaaccaacctgcgccggctttgtacggtatacggcagcaggatctccttggggcatttcgcgtcgcagatgaagctcacgatctcgttgagcaactcgctggccaactggccttgcagcaggatggtgccgcgtaccaaggcctctacactgcagttcttgagctacaggcactttctccagaccattgccccgcatgtgagactgcaattgttggggtggagcatgtccatgctgatccttttgttaaggctgcgcagggtctggagcagctgcgggagctgactcagctcaagcagcagcaccaagcggctgttgaccagaggcggatcgcctcagatacattgcgagcgttcttcgccaatttcgcccagcgcgtcggagctagggttgatagtgagcatgaagttttacgctatctggcaaatccaggtgttcaacccagcaccgcatggtggaaggtagggtacaacccagttgccggtggcatctcactggcacagcaggcagtcaattacgcgcgtcagctagaggaggcggatgtcgctactcagcaaaatcttcagcagcgggcacaactgattgctgagcgagatcgtctttccgacgctcgcatcgcattgactgagcatacgactcgacgccaacaagccagtgcagccattgcagcggctcgccagcgtgtcgatgcctttgaagcgcagaacgccggactgatcgccgctgccgcagaagaggaggttcgcattgccgcagaggtaagaattcaatctgcctacaacggattcttgggcctactacgacagtaccgttcggggttgccgagaacgttgatggcaggtttgaacaacttggccatggagctgtacaacgagttcaacgtccgtgatgccgacgaagacaaactggctgcgctacacctacctgtcaccggcgacggtcgaatcgagttgagctttcgaagttccccagaaacgcgtgttgatgcacttcaggtgctgagtgaaggacatgtgcggtgtctggggttagccatcctgttggcaaaggctaccaacatccaggcgcctacagtgatcttcgatgacgcgatcaatgctattgaccatgaacatcgtcagggtattcgggaggctttgttccagagcgagcgctttgccaatacacagatcatcgtgacctgccacagcaatgagttcattaaggacatccagaatcatgttgatcgtgctcagtgggtgtcttacacgttccgtcaccacactgggaatcatcacccgcgcgtcctacgggatgtgccgccgcaagcctatctgttaaacgcgagggccgctgttgaccgaggcgaccatcgtggggcgctacaaccgtgcaggcaagcgttagaaatgctcgctaacaaggtatggcgatggctggggcaatgcgatctaggcgtaatcagcgtcaagttggcaggtgcgggagatcagccctcactacgaaacttgtgtgaggggctccgtgcaagactaaatggcgcacgcacgtttgagcatagtgataagcagccgttgctggaagcactggagcagattctcggaatacctgagcagacgttgttatggcaatacctaaacaaaggcactcacgaggagcaggatcgggaggactttgatgaaggggtggtcgagcagctggttgtcctaatggaaggaatgaatgctttgaggctgcgaagccgctaa

SEQ ID NO: 357079 - DNA, 171 bp, Pseudomonas aeruginosa
atgaggaaggagacccgaacaacgtatggagtctccattaaaacccagaacatactcgccatcattttgctggcctactgcctctggccctaccttaccaagtccaagacctggctgaacttgcttctaggcgtgctgaccatgcagggaccatggctcttactcggttga

SEQ ID NO: 357080 - DNA, 1857 bp, Pseudomonas aeruginosa
atgaattattttactgatacagtcgtcaacatcctcggtaatagcaagctgcgctcgcctcaaattgaggcgtacataaaggcccaggaacacttcgcgaataatcctgctgaagacgctctgatcgtactgccgacagggactggcaagagcgggctgatctcgatcgttccgtttggcctagctaaaggtcgggtgctaatcatcacacctggcctcgtcaccaagcagagcatccgcaagactcaagacgctctagaggataatttctggatcaacttcgatgtgatcttcagtggtgacgaccttccagtcctctgcgaataccagaaggatacgttgctaagcagccttgcaagcagccacatcgtttactcgaatatccaacagatccacagcgaacgtgatacagcactcactaagcgtgttcctgcggatttctttgacctgatcatcgtcgatgaggcgcaccacgcgccggcctccagttggaggcacacgcttgcgcatttttcgaaggcgaagaagatcttcgttacaggcacgcctttccgaggggataaccaagagcttccggggacgcttatccacgagacgccgctttccgaggttatgcgagaccggtatgtgaagtggctacgcaaggagacggtcaatgctcacagcctcttcttcactctggcagaccatcccggccgccagttctccaaggaagaggtgctgaagctcaaggatcgcgagtggatcgagaggagtgttgctctctctgaagaatgctcaatggacgtgattcagcagagtctgcagaacctccgcgatttgaagaaggcgtcgcctaacgtccctcacaagatcctggctgtgggttgcagcatcgcgcacgccgaagatctgtacacgtggtaccaatcgcatggattgcgagccgccatactgcacagtgatatggacacagccgaagtggacgcggcctttcgcgtcgtggagaaccacgagtgcgacgtagtcatctccgtcaacatgcttatggagggctacgatcacaggtatctcacggttctggcgcttttccgtccgtaccgaagtatcaacgcgttcgcccaaatcgttgggcgggttcttcgcgcaattcctgccgaagaaatcaccgctttcgagatcgacaacaacgctgtggtcatctatcaccaggagaccggtctggactccatgtggagtgagttccagaaggaggttgatcgggcgaagcaccagcgcactcgtgagtacatcattactgatgatgagtacgtcaggcgggaccaatcgctggccggggttaggtcatccagcgcattcgtcagcgaccaggactcctatctggatgatctcgatttcaacaagatattctcggagaagcgcgcagagatcgatttgaaggctagccaggtcattcaagccatgccgaacctcgaagggtacgatgctgaaactctggctagattgaaaagcgtactcgttgaggcagagaccaagcgcgcggccgagattatcgacccgaacctcgtggctaagcgccctgagattgcgaggaagcagcttcgagagatcctgaccaaaaaggcccaggatgaggtggctaccctcttgagcgatttgggcattcctgaaaaatcgtcgacgctttatcggaaattcgcgcagattttgccgatgattcagtccaatacgccgaatgacggtatactggttagctttatcaacacgaagcttgcgaagaagtttggtagggttgcggaccgtgacactggctcccttactaaatcaatcgagcatgttgccgtgatcatggtagagctgagggggatgttgagatga

SEQ ID NO: 357081 - DNA, 429 bp, Pseudomonas aeruginosa
atgagcctcgatacgattaaaacgctcgttgacgagctgaccaccctccacatcacgcgtggggttcagccaggcgacctagccgataacatcttcgaagattcctatgtgacatctagctcgcgtaagaccccgacaggtgcccagttcgagatgactttccaagaggtcgatgaagacgaccaggtcagtcaggtgacgatgcgatacacctacgatcaatcccgctatctgctgctggtggagcaaaaggtctcgggaaaaagattcgtggtgcagtgggatcgtgctgcatgcatccagaaaaaagtcgatcaactcgaagtgctgttgggttccgagctgcccaaggcgcgagtcaaagcgatcctcgccaccatcccctgtgacttcctgaagcttttccccaaactccaactggtcgcctag

SEQ ID NO: 357082 - DNA, 408 bp, Pseudomonas aeruginosa
atgctcaccggtctcaatcacctgaccctggcggtcgccgacctgccggccagcatcgccttctaccgcgatcttctcggctttcgcctggaagcacgctgggaccagggcgcctatctcgaactgggttcactgtggctgtgcctgtcccgggagccgcagtacggcgggccggccgcggactacacgcactatgccttcggcatcgccgccgcggatttcgcccgcttcgccgcgcagctgcgcgcgcatggcgtgcgcgaatggaagcagaaccgcagcgagggcgattcgttctacttcctcgacccggacggccatcgcctggaggcccacgtcggcgacctgcgcagccggctcgcggcgtgccggcaagcgccctatgcgggaatgcgtttcgccgactag

SEQ ID NO: 357083 - DNA, 423 bp, Pseudomonas aeruginosa
atgccccgtgacgactcggcggcctactcgtctcgctgcggtactttcgagtggtgcgatgccgactatgctcggtcctatttgcctcggcgcttctgtgagcaattggcgtcctcgattgctccgaccatacttggcatcgacgcacagcctggcgagtcgttgtggttttccaagcttgttgacctggggtgcagactggattctctcgagtcaggtctcgatagcgttgaggattgcgagtgtctgcgtaacgcccacatcgacatgcacggctacgagtgccaggagatggaggctgtctccttccagcagatggatgatatcggcttcgcgttgtgggatatcgccaatctatcgaaaagtcccaagaggctgcctaccgattgggacgagttggtctataggcggagcgactcatga

SEQ ID NO: 357084 - DNA, 1170 bp, Pseudomonas aeruginosa
atgaatacagccgtcaacgtcaacgtcgtgcacgaatccgaagcccagcgccagttcgcccgggtcaagctgccggcgcgcatccgctacatcggcgccaaccgcgaaggcgtcgacgcacgcctgctggatctctccgccggcggcttcgccttcaccgcgagcggcgcaccgatccagcccggcgacctgtacaagggcaagctgctgttccaggtcgacagcatcagcttttccctcgaagtggagttccaggtgcgctcggtggaccccgccagccgccgcgtcggctgcgagttccagaacctcaagccgcgcgaggtggcggccctgcgctacctgatcacctcctacctggccggcgaggtgatcggcgtcggcgacatgctcaacaccctccagcgcgagaacttcaccaaggcccgcaagcagggcggcggcaacggcgggatgggcttcttcggccgggtccgggcggtgaccctgagcaccgcgatcttcgtcgtcggagtcggcgccttcgccttcatcctcaaccagatgtacaacctgtacttcgtcacccatgccgattccggcgtggtcagcgtccccaaccagcagatcaccatgccccgcgagggcaccgtgcagagcctcctcgggcccaacgcggaagtcgccaaaggcgcgccgatcgccaccttctcggccaacctgctggacatgctcaagggcaacctgaccgaggagcagctcaacccgggcaacatcgagaagctcttcggccaccagatgaaagggaccctgaccagcccctgcgactgccgcgtggtccagcaactggtagccgacgggcaatacgccaacaagggccaggtgatcttcaccctcgccccgcgcgacagcgtggccagcatcgaggcgcgcttcccctaccgcaacgccgccgagctggcgccgggcacccgggtgaacttccaggtcgccggcgacggcgtcaaccgcagcggccgcatcgtcaacaccgcgccggtggacggcgacctgtcctcggaaatccgcgtgcagatccagcccgaccagccgctcgacgcccagtacgccggccgcccggccgaggtcagcatcggcggcctccccggccgcaccctgctgaacaaggccgtgaccctggccaccgctcgctga

SEQ ID NO: 357085 - DNA, 504 bp, Pseudomonas aeruginosa
gtgcgcctgctcatcgtgcgcgccaccgacgtgccgacctatgtcgagcatggcgccgccgatctcggcgtggccggcaaggacgtgctgatggagtacggcggccagggactctacgaaccgctggacctgcgtatcgccaactgcaagctgatgaccgccggcgccattggcgcgcctgaacccaagggacgcctgcgggtggccaccaagttcgtcaatgtcgccaagcgctactacgccgagcagggccgccaggtcgacgtgatcaagctgtacggctcgatggagctggcgccgctggtcggtctcgccgacaagatcattgacgtcgtggataccggcaataccctgcgcgccaacggcctggagccccaggaactgatcgccacgatcagctcgcgcctggtggtcaacaaggcctcgatgaagatgcagcacggtcgcatccagtcgctgatcgataccctgcgcgacgccgtcgaggcgcgacaccgtcactga

SEQ ID NO: 357086 - DNA, 213 bp, Pseudomonas aeruginosa
gtggtcgagtcggtgaaggccgcctccgacatctattcgccgatcggcggagaagtcatcgccatcaacgaagccctggccgacaccccggaagacgtcaacaacgacccgtacgcgtcctggttcttcaagctcaagccgagcaatccggccgagctggacaagctgctcgatgccgctggctaccaggccgccgtcgacgcggaaggctga

SEQ ID NO: 357087 - DNA, 174 bp, Pseudomonas aeruginosa
atggcgaccgccgtcgcccccgacttcgaggaaaacaagatgagcaatattcccgccgaactgcgttacgcccagagccacgaatgggctcgcctggaagccgacggcagcgttaccgtgggcatttccgaccatgcccaggaagcccttggcctgtctcttatacacatctga

SEQ ID NO: 357088 - DNA, 501 bp, Pseudomonas aeruginosa; identical to SEQ ID NO: 319553

SEQ ID NO: 357089 - DNA, 159 bp, Pseudomonas aeruginosa
atgttcgaagcgctggccaaggaaagcatcaacatccagatgatctccacctcggaaatcaaggtttccgtggtgatcgaagagaagtacctggaactggcggtacgtgctctgcacacggcgttcgagctcgacgcgccggcgcgacagggtgagtga

SEQ ID NO: 357090 - DNA, 828 bp, Pseudomonas aeruginosa
atgccggcgccgccacgatggcgctaccatgggcgctggcctcatgaagacctggatatcctgcaaggcgcacttgatgttttgcgtgtccacggccttgcaggtcttcctgtcatagctcacggccggggtcttcaagtggaaccgatcgctgagcaggatctgcccaggctgaatggtgaaggacagcggggcataggcgtcgggtatctgcgcttgcagcttgatggagggaacatcctcgatcttcgtgccttcggcccaaccggcatccgagaccatttcccgctggctgtattgctgctcggtccagcccacgcattggccggaggccatgtgcacggcgctgcagacattctgtgtgtaggttttgtctgcataggaggcgtcgcgccagtagttctccttcacgaaccggcgatacagcacggcggacaggttcaccgaaccaagtgggctggcagccggctgcccctttggcgccttgatctgggcaagggtgctgtcgatcttgtagtcgatccctccggacagcaggtaggttcccggcgggacgatgttgacctcgaggaagtcccacagatagacggcttccttgatcttctccaggtcgttgttggcaaaggcctgcatgtaggcgatcccgggcacgtccttgttcttgaatatgacccgatgcgagtagctggagaggtccgtcacgctcttgttgggcatgagtgccggtaccagcaccacggacatgccttcgcgggtagcctcatcgatcatgttcaggagctggttggtggggttctgctgggagccgccgagtccggcgttgcctag

SEQ ID NO: 357091 - DNA, 816 bp, Pseudomonas aeruginosa
atgagcgtcctgatcaacaaagacaccaaagtcatctgccaaggcttcaccggtagccagggcaccttccactccgaacaggccatcgcctacggcaccaagatggtcggcggcgtgacccccggcaagggcggcaccacctacgttccggctccgttctgcaaggactcgatcctggaagcggcattcggcggcatcaagctgatcgtctgcatcaccgaaggcatcccgaccctcgacatgctggacgccaaggtcaagtgcgacgagctgggcgtacgcctgatcggcccgaactgcccgggcgtgatcactcccggcgagtgcaagatcggcatcatgccgggtcacatccacctgccgggcaaggtaggcatcgtgtcgcgttccggcaccctgacctacgaagccgtgaagcagaccaccgacgccggcttcggccagtccacctgcgtgggcatcggcggcgacccgatcccgggctccaacttcatcgacatcctgaagctgttccaggaagatccgcagaccgaagccatcgtcatgatcggcgagatcggcggttccgccgaagaagaagccgcggccttcatcaaggccaacgtgaccaagccggtggtgtcctacatcgctggtgtgactgcccctccgggcaagcgcatgggccacgccggcgccatcatctccggcggcaagggcaccgcggacgagaagttcgccgccctgcaggacgccggtgtgaagaccgtgcgttccctggccgacatcggcaaggccctggccgagctgaccggttgggaagtgaagaaggcctga

SEQ ID NO: 357092 - DNA, 324 bp, Pseudomonas aeruginosa
atgaacctcaaagacctgaaggactacaaggggctctctggaaaggatgcgggtcgctcgctcttggacttcatgggcaaacaggagttggctgcgaatctgttccgtgtaactcaaacggaagccaaacttgccaatgaagggatcagaggccaaaaggcagcagagcgagcagcggaatcagttggccgtaaagtccgcgagaccatgattgagatcagtggtgacacaccagaaagccttccgcttgcaagggatatcaagcaagtcaaaggagatcttaaggcatcaagccgagagttcaaaaagctggacaagaattga

SEQ ID NO: 357093 - DNA, 963 bp, Pseudomonas aeruginosa
atgactcgcttggaggtgctgctggcggagttgtataccgaccatggtatcgacctgatcaggagcacggcgggtatgtcgaaggaagtcgaggagaagatcaccgaactcgccgaggagttggtgaagctgctgcagggccgccgggtcatcgaaggaggcttcgcgtcgaactcagtcaacagcctggtgagccggccaatcatgctcggcgtcggcaagaaccgactcagcgctgtggttgcgaatacgctcatcgagggcgctccgaccaagcaatggtggctcaagcaggctgcggatgtttcgttccggttcgccggtgtggtgcgcaatggcttcgtgaacggcgagaccacggaacagatggtcacccagatcgtcggccgccgggctcggggcgaccaaccgccggtgaagggcttcatggatgtcagcaagcgcgcggcccggaccttggtccacaacagcgcccaagcggtggccaatggcgccaggatggaggtctacaaggccaattctggcgagaatggaccggtgaaagggtatcgccagctcagcacattggactcgcacaccactgaaatctgcatggtctacgaccagaagacttgggatctgcagttcaggcctgtggggcactcgttgccgtacaagcaaggttgcccgcggcactgggggtgtcgcagtgccactctgccttggctcaagacgatgcgtgagttgggtgtcgacgtcgacgaggtgaagagcaccagggcgtcgatggacggccaggtgccggccagtctgaacttcgagacatggctcaagggtaagtcgaaggccttccaggacgagaagctggggcccggtcgcgccgacctctggcgccgaggcgtcatcaccttgagcgacctgctggaccagcggggcaacccgctgagcctggcgcaactcaagtcgctgtacgcgcccgactga

SEQ ID NO: 357094 - DNA, 1110 bp, Pseudomonas aeruginosa
atggcgcttaccgggcttgagcgtggcctcgaccacccagacgcggtgcagctcccagcgctcgcactgcgggttggcatggcgtggcaggaattgctcgtcctgcctgcaatcgaagtagaacttgtaggcgttgtaggggatgaacatttcctgacggcccaccagcttgtagtcgaagcggtcctggctgccggcgaacatctgcaactcgtcgaacaggttcaccccgccctggttcggcaccggggtgtcataggcgaactccggcgccaatttgatccggcgcatgcctggcgtataactccaggcccggcgaggcttgacggtcgggtcgaggtagtcggccatgatgatcagttgcccggcactgcgcgccgggtagctgtccagcgcccaggcgcgatagtacaggttcggatcgcgatcggcctgcctgacctggtagaaggaggtttcctcgaaggtagccgactccgccgtcttgatcacctggccccgggcatcgatgacccagctgttggaagatcgggtggaagtgaagcccggcccggtcttgtagcgcaactgctggttccagatcacctcgttgccgttttgcggaatcggaaacggcaggccaccgcgacaggccggatcgaccgccaggccgtccttcagggtctggcaggcggtggcgttgcgcaccgtggcatcgagcacctcctgcgggtaggccgccgtgcgatggctcgggtagacgtccatgtaccaggtctcggggttcttcttgagcagttccttctgcccttcactcagcttgtccgcgtactgcccggcattcgccgcagtgatgcgaaacagcggtttctcatccttgaaggggtcgacccagaagccgctgtccggcttgaagcccgccggtatctcacgcaggccgccctcgtagggtggaatgctgccctcggcgttgccggcttgaatagcaccgaacaaggtcaggctcttgccaagctcctgagcttgttcagccgggaccgcggccaggctgccgttggcgaaccctatcaagagggtcagcaaggcgatttgtcgttgcatggtcagtctccgctttcttggatttgttag

SEQ ID NO: 357095 - DNA, 897 bp, Pseudomonas aeruginosa
gtgaccgcggcgctgcccggcattccactggaggcctggcggaggcggggccgcaccctggatttcaagggcttcccgatccgctactgggaagccgggcagggtcggccgttgctgctgatccacggttttcccagcgccgcctgggactggcactacctctgggagccgctggcgcagcgctaccgcgtgctggtctgcgacctgctcggcttcggtgattcggccaagccgcgcgcccatcgctacagcctgctggagcaggccgacctgcaacaggcgctgctcggccgcctgggaatcgacgagccgctgcacgtgctggcccacgactacggcgacagcgtcgcccaggaactgctcgcccgccatcacgaaggccggctgcggctcgcctcctgcgtgttcctcaatggtgggctgttcccggaaacgcaccgcccggtgctcagccagaagctgttgctgagcccgttgggcgggctgttcggccggctgttcgaccgccgcgccctggcgcgcaacttcgccaaggtcttcggcccgcgcagccagcccggcgagaccgagctggatgccttctggagcctgatcgaaagcaaccaggggcagcgggtgatgcatcgcctgatccgctacatcgtcgaccgccgcgagcagcgtgagcgctgggtggcggcgttgcagcacggcggggtgccgttgcgggtgatcgacggcgccgtcgacccgatctccggggcgcacatggtcgagcgctaccggcaactggtcgccgatgccgactgcgtgctgctcgatggcatcggccattatccgcagatcgaagcgccggcggcggtgctcgaacattacctggcgtttcgcgcccgactggatgattcagagttttcttaa

SEQ ID NO: 357096 - DNA, 1278 bp, Pseudomonas aeruginosa
gtggtagccgttgatcttgtgatcgagttgcaccttgccgacccagccgttggcgaaattgtgctcgaggttggcgaagacggtgcgggtgtactgctcccaactgctccacttggctccgttgttgaaggagcgggagacgtcgttgcggttgccctggctgtcgaagagcgggaagctgcccgaccagcccgatcccttgggatcgttgtcctgatagtcggcgccgacggtaagcatggtgtcgggattcagatcgaactcgaggatgccgtaatagacgctggttttgcgctcgtagtgatccatgaacgagtgcttatcctggtaggcggctaccgcccggccgcggacgttgccggactcggtcagcgggccgctgacgtccagttcggagcggtaattgtcccaactgcccgcgcccagttcgacatggcccttgaattcatgggtaggtttcttgcggatcaggttgatcgtggcgccgagggaccccgcaccggtgagcaggccggtcgcccccttgagtacttccacccggtcgtagatggccatgtcactgagcgtattgcccgcggagtagccgacgttgcgggccgtcgagggaatcccgtcgtactggaagttgttgatcgagaagccgcgggcatagtagttgttgcggtcagtgtcgtaggccgagacggtgatgcccggcgtatggcgcatgacgtcgtcgatgttgttgaggccgaagtcgtccatgttctggcgggtgaccacggtgatcgactggggcgtctcgcgcggagtcaggaccaggcgggtcgccgtggcgatagtgcctggcgtataggagccgctgtcctcggtgatggtgcccaactggttggaggtgatcatggtggcgccgagatcgacgctgctgtccgccgcctcggcgacgctgatggttatcgcattgccctggaagtccaccgatgcgccggtgccacgaagcagctcggtaatcgcctggttcggctccagcttgcccttgatcgcactgctacgcttgttccggacctcttccgggcgatacagcacctggatatccgcctggcggccgaactcctggagtgcgctgcccagcgcctggggagggatgtcgaactcgacttcctgcgcctggacatatcccgccagcggcaggctcagggccatggcgagcgagtggggaagaatcctgcgttggaaggcacggcgcatcaaaaacgccttactcagaggactgagaccgtgtggtgctggcatgggtga

SEQ ID NO: 357097 - DNA, 1479 bp, Pseudomonas aeruginosa
atggaccaacagcagcgtgctgcaagccggacgcctgaacctggacatcggcaccttccgccagacggccgagggcaagctgctggcggtgcagtccttcactggccgcggcggcgactggagcaacgacggcctgctggccagcgacggcagcttgcgcctcgagctgagcggcggctaccgtggcaacggccgcgccaccagcctcggcgacttcgccctgaacgccgccagcctcgacctcggcaatgccgccagcctcgccggcggcgccaatgtcacgctcggcgccggcaacctgctggtcaaccgtgggcggatcaccgccgccggcgacctcgtggccagcgccgcgagcctgaacaactacggcaccctgggcggcggcggcaacctgcgattgaacgcgcccgccctgctcaacgagcgcgggttgctgttcagtggcgccgacatgaccctgcgcgccggcgacatcaccaacctctacggggatgtgtacagcctcggcaggctggatatcgcccgcgacgatgccggcaaccgtgccgccagcctgcgcaacctttccggggtgatcgagagcggcaaggacttcagcctgcgtgccagcctgatcgagaaccgtcgcgccgtgctggaaagcaagtcgggcctgtacaccgcgaagatggagcagaccgcctgcatcgaaggcgtcaacgcgggcgactgcagcggcaagcgcaacgccatctggaccatcacccagcgcgacaagaccgaggtcaccgccagcagcgccatggggcaactgctggccggaggcgacttcgccatcgacggcggcaccctgaacaacctttccagcctgatcggcagcggcggcaacctcaccgccaacctcgaagtcctcgacaaccagggcctggaaaccggcgagctggaaaccatccgcgtgctgcgtaccgctcgcggcggcgatatcggcggcatcgaccagaagtcgcgcaacttcaccaacctctactggtaccagagcgccaatttcgacccggcgcgcgcgggcgagattcccgccgcgctcaacgcgatcctcagcgactggtccttcgagtacgaattcccgagcaaggggccgaccccgatcagcagtggcgaccagtcctacgcagcggtgatccaggccgccggcgacgtcacggtcaatgccagcacgcgcatcgacaacggcgtcacccgccccggctacaccttcgtcggcagcggccgccaggtgggcgacagcgcggtgggcggcagcggggtttcggtggtcgtgccgctgacctcgcaactgccgcccgacctggcgcggcgccaggtcaacccggttaccctgcccggcttcagcctgccccagggcgacaacggcctgttccgtctcagctcgcgcttcgccgaggacggcaatggcagcgccgcgctcggtgccggcgccgaccgcacccagggcggtag

SEQ ID NO: 357098 - DNA, 1353 bp, Pseudomonas aeruginosa
atgccgcgccatgcgctcgacggtccgcgcctcgaacaggtcggtcgcgtaggtcagcgcggcgtacaggcggccgcccttctcgtaggtatccaggctcaggtcgaactgggtggtacggctcttccagtcgagctggccgaagctcaggccggccacgctgtccagcgcctcgatgtcggccaccaacggctggtggttgtacatcacctggaacagcgggctgtggctcaggctgcgctcgaccttgaacgcctcgaccaggcgctcgaacggcagatcctgatgggcctgggcgccaagcacggtgtccttgagcccggccagcagggtcgccaccgacgtgcggccgtcgaataccgagcgcagcacctgggtgttgacgaacaggccgatcagcccttccacctcggcgcggttgcggttggcgatggggacgccgacccgcaggtcggtctgcccgctatagcgttgcaggaggatattgaagccgccgagcaacagcatgaacagggtcagcccctggcgtcgggcggtgccgcgcagggcctcggccagggccggctcgatgctgaactcgtaacggctgccacggtagctgggaaccgccggacgcgggtggtcggtcggcaactccaggaccggatgccgctcgccgagcttgccgcgccagtactccagctggcgctcctgctcaccggcctccagccagctgcgctgccacagggcgtaatcggcgtactggatcggcaaggccggcaggccgggctccgcgccagtcgcataggcactgtagaaacgactgaattcttcgatcagcacgttcatcgaccagccgtcggacacgatgtgatgcagggtcaacagcagcacatgccgctcctcgcccaggcggatcaggcggacccgcagcaacggcccctcgcacaggtcgaacggctgcaacgactcgcgctgcgcctcctcgcgcaggcgggcttcctgctcggcctcgggcaggccgctgcaatcctcgaaggcaacctccagcgggcgttgcaggggcgcctgcgccaggctgtcgtcggcgccgcgcgggaacaccgtgcgcagggtttcgtgacgctgcaccaggctggcgaaggcgcgctccagcgcctggcggtccagcggcccgttcaggcgcaccgcgctgggcaggttgtaggcgccgctctgtggctccaggtgccagaggaaccacatgcgctgctgggcgtaggacaggcggtcgcgctcggccgaagacacgccggccggaatcgggaacagcgagaaatcgattccctcccctcgcagggtttcgaggaagacccgacgcttctcaacgggtag

SEQ ID NO: 357099 - DNA, 714 bp, Pseudomonas aeruginosa
atggcgcagcacctggccgttggccagggtggtgctcgccaggcggctgaaaccgtcgtagccatacgactcctggtagctgcgggtgacaccgtcgacttcgatatcccagcctctcgccttcaaccgcgcgagatcgtcgtagagcagcgcctggcgatagcccggcccggccacgccgaccagcttgcccaggcttttcgttcccgtgtcgtactgccagcgcgaagtgctggcctggccgcccaggcggtcggtctgctcgagcacccggccgagcaggtcgtacttgcgctcggtgcgactgccgtcgctggcggtacgcaccagggcctggcccagggcatcgtactgcacgctttcctggccgctgttcgggtcgaaaaggccggtgcgacggcccgccgcgtcgtagctcatgcggatctcgctgcggctgtcgccagcgacctgggtccaggccaggttgccgtcggcgtcgtagcggtagcgaacggacacctcgccggcgctgcccagggcattggtactgagcaccagcttgccacgcgcatcgtattcgcggcgctcggtcaggctccttccgtcgtagccgaggctatattgcttccaactgccaccagcagcgcgcgcgccgtagctgtagctcagttgcgccccactgggcaactgccgggccaacggccggtcctgggcgtcccaggtggtctgtag

SEQ ID NO: 357100 - DNA, 330 bp, Pseudomonas aeruginosa
atgccgcccactccggccgtggcttccgcccctccggtcaaggtgctcacgccggcggagccgagccggcagttggcacagtcctggtcagccgagacgggatcaaccctgcgcgacaccttggaagcctgggcaaagcgcgcacgctggaccgtccgctgggagccgctggatctcaactatccgatcgaagctcctctgaccttccacggctccttcgaggacgcggtatccgagctgttcccgctgtatgacgctgccgaacggcccttcctggtgaacgccagccggccgcagtccctgatcatcatcaaggagcgcaagaactga

SEQ ID NO: 357101 - DNA, 1710 bp, Pseudomonas aeruginosa
atgcgtgcccccctgaagaacctcttgccttgcctcctgatccccgcactggccagttgctcggtcacgcgggtgaacgagtcggcggaacgtgtcgaagctacggcagattccgcgtcgacgatcgcagcacagatgcgcaacacccgaccggatcgccgcgatacggtggttttctccgacaaaccctgggtcagcacgaagcccctgagcttttcgcacactttgtccagtgactgcatcgtgacgtggcgccctgcaggcgcagcgtcgctgcaggaggccgcccaggaagtcatcaaccaatgccacctggcggtcagtatcacgcccgacgcgctgaacccggccgcttttgccctgcaacctcagcagcgcgcgagcaacgccccgccgcccatccaaggcggccaggacatggccaccatgctgtttcctgcctccgtcgccaacggcatgtccctaggtgccggcggcagcatcgggtcgagcttcgggtcctacggcccgcggtctctgtacaacatcaaatggaacggcaaggtcagcgggttcctcgatctcatcgccgcccgcgccggcgtgtcctggcgctacaacccaaccgagaaacgggtcgagttctactacctggacactcggaccttccgcatctacgcctttgacgacgtcaacacggtggactccaccgtgcgttccggtatgacgacggccgccggcatcagcggggacggctccggatccaccggacagaatggcagctccggcatcagcggcgactccggcagcaagcagaccaccagttcggagctgaagacatcgatcctcagcgacatcgagaacagcatcaactcgatgctgacgccgagcatgggacgcatgtcgctgtcgcgtgccacgggcaccctgaccgtcaccgaccgaccagaggtcctcaaccgcgtccagcagctggtcaaccgggagaacgagagcatcaccaagcaggtgctgctgaacgtcaacgtgctctcggtcgccctgaccgacaaggatcaactggggatcgactggaacctggtctacaagtcgctcaacaacaagtggggcatcggcctgaagaacaccatgccgggcatcgaccaaagtgcgatctccggctccgtgagcatcctggataccgccaacagcgcctgggcaggatccaaggccatggtccaggcgctggcccagcagggccgtgtctcgaccgtccgctccccgtccgtgaccacgctcaaccttcagtcggcgccgatccagatcggccgctacgacagctacctggcctccagccagatctccaacgtcgcccaggtcggcagtaccacctcgctgatcccgggcgccgtgaccagcggctacaacatgagcctgctgccgttcgtgatggaaagcggcgagatgctgctgaagatcaacatcaacatgacctcccgccctacatttgaaatgcagaccagcggggactccaaagcccagttccctagctacgacatccagctgttcgaccagaaggtacgcctgcgcagcggtgagaccttggtgctctccggcttcgaccagaccaccgaggacaccaacaaggtcggcaccggcgacgccggattcttcggccttggcggcgggctgacccgcaataccaaacgcgaggtcatcgtggtgctgatcacccccgtcgtgctgggctga

SEQ ID NO: 357102 - DNA, 1326 bp, Pseudomonas aeruginosa
atggagaagcctgacatcggtagccgtggaccagacgtctcgatcctgagctaccacggcaacaagttcgtcagcggcctgttctggcggccgctatccagccagcggcagtacatgaaggaagcgcgcaagctgggcaaggaagagcatctggacatcgttgccatccgccattcgccgacagtgatccaggccggcttcgtttcgaagtcgcaaggcgcagtcaagggcatgtactccctggcctcggcgctttcaggccagttcgaaggcgacttcctggcctgctggaaggtcgacgaggaccgctacgcactggtcgccacgctcgatggcgcgatcgtccccggccaggacctggtcaccaccttcgacgaagccagggaccggatcaggaagctctctacgcgcggcgtgcttcgaaacgcacaggtcttcgttcccgaaggattcgaattccccgtcaaggacttcgacatcgaggaactgctcgcgccgaagcgcctgcggcgcgactaccgcctccggcaactcaccttcggcttgtccgccagggagtggacggcagtggccctgctcggttgcttggtaggcgggtcgctaaccgcctactacctatggaatgcccaccagcaagagctcgccagacaagccgcgctcctcgaggagcagaggcgcctcgccgagctggccgagaagaatgcccaggccaagcagccgctggacctggcgtcattgcagaagccctggacgctcatgcctgacctcgaggacatgctacgcgcctgtagcaaggcaacgggggtactgtcgctgtcgatccagggctggctcttcgaatccagcaagtgcgacggcagggtcctggtcgccacctaccaccgtaccggcaacagcacggcagccgacctgacagcggccagccagcacctgttcgccgaccgccccgccttcgttatcgacaacggcaacaccgcggccctgaaggtcgacctgaaagtcgccatcggtagcgatgagccgctgcagccagccgacgacgcgctgcaggcgctcaccagccatctgtaccgtcagggtgtcgagcccaagctgtcgatcagccaggagacaactccgccccttcctggcgcggaagcagcgacggagcagcaagtggtgttgccttcctggaagaaattcaccttcagcgcccagaccaggctcccggcagacctgaccttccaggggctgcccgccgccggggtccgcatcaccaacctcgaaaccacgctcaaggacagccagttggactggactgtcacaggagaaatctatgcgaactga

SEQ ID NO: 357103 - DNA, 534 bp, Pseudomonas aeruginosa
atgcgaactgagccgatcggcatggccgtggccgtgctcttcctcctcgcgtccggccaggcctgcgccggcaccgttggcgaactggcggagatccaggcccaggccatcctcaccgaggccaaggtgcgtctggccacggcgcagcggcaactggagggcaaaggcgaaaccggtcaggtcgtcagcgcccaggggcagacgttcgccatgccggtgccggcggcgccgccgacgatcacgcagccggttccgccggtggtgcggaccatctacggcgccggcggcaagatgactgccacattcttgttcccgggcgggtacgaggtggacgccgccagcggcgcggagctgccgggcaactaccgcgtcgagtcgatctccctggaccaggtcgtactcaccgacaaggacggcaaccgcttgcccgtgggcttctccagcgttgccccgacccaagccgcctcctcggcccaaggcgcctccgttccgccggcgctgcccggggcggtaccgcagccgttcatccagtag

SEQ ID NO: 357104 - DNA, 234 bp, Pseudomonas aeruginosa
atgcacgtcactggcgcgcagctcagtggccttacgaatgatcttgaccacgcgctcctgcatctgggtggcgcgctggccatcgctatcgaccaggccgtccatggcgacggcgcggtagagctggtgaatggtctgcaggtcggtgaggttgagctggtatcggaagccacgacgatcgagacggtcgatgaacgacagaacgtgaatgtcgttctggtggctctccgatag

SEQ ID NO: 357105 - DNA, 492 bp, Pseudomonas aeruginosa
ttgtggtgggacattccgccggagagtgtctatgcgttcggcctctatatcttccagcaggtacagcgttggcccaaggacggcgaggtggactacaagagcaacctgttccgctacgccgcctacctgacgccttcctgcaaagtcttcctggagaaggacttcgagtttcgtcgtaacgccggcgagctcagggggcgcgagcgcaccacctcggaaatccccggtcggggcattggcgagagcgatggccgcgtgatccaacactcgatcaatgactggaccgtcaacctggacatggacagcacggagtattacgccggcgagaagatcaagcgcgcgctggcccgctacccgttgcacatcatccgcgccgacgtcgacccggagaccaatcccttcggcctgcagtgggactgctactccgatacgcctcaacgtatcgaactcgaggagccggtcgcccccatcaagcgggagggaggtctatga

SEQ ID NO: 357106 - DNA, 885 bp, Pseudomonas aeruginosa
atgatccggaagtcgacagccacgctcttgctgatgcttgcccttcccgcactggcccaagcggtggagattctgcgctgggagcgcattccgctggccattccgttgacggtcggccaggaacgcattgtattcgtcgacaggaacgtgcgagttggcgttcctcgggacctacagggcaagttgcgcgtccagagtaccggcggtgcactctacctgctcgccaacgagccgattcctccggcgcgcctgcgcctgcaggacgcgaccaatggcgagcagatgctcatcgatatcgccgccaccgaagccgcagccgatcaacaaccgcgcgagccggtcaggatcgtcgccggcgagcccgtggctccgcactatggccagtcccgggaagcccagccatcggcagcagcgaaacagaccgagcaggcagaagcaccgaaggccgtgccgcgcgaaacgcccgtccccgtggttctgacacgctatgcggcgcagatgctctatgccccgcttcgcacggtggaaccggtggatggcgtcggtcaggtgcgcgtcaagcgacagctcgacctgaccaccctgctccccagcctacccatcacggctaccgccatgggcgcctggcggctggacgactactacgtcacggcggtgaagctgcagaacgccagcgcccagcacctggccctggatcccagggacctgatgggcaatttcatcgccgcgaccttccagcacccgtacttgggaccccggggcgacgcttccgacaccacaaccgtgtatctggtgacgcgcggccgcggccttgccgacgcgctcctgccctcctccatcagccagatcgatcccaaaggaggccgtcgtggcgctgaccggtaa

SEQ ID NO: 357107 - DNA, 1506 bp, Pseudomonas aeruginosa
gtggcgctgaccggtaatcccctcctgaaattgctggtcatccccgtcgtgatcggcgccatcctgatcggcgtgagcatgatgggcaagaaggaaagcgcgcagtcacaaggcgccgcaaccccgacggtaacgtcggaagaagcggcaaccctgggcatcgacggcgacacgcccgccgacacactgcgcaccatcgtggcggaaagccggcagctcaaggaccagatcagcaaggtcatccaggagaatgactcgctcaaagccgccaatgagaacctgcagggccgcctgcgcaacatcgatcagaacatcgagcagaagctcaacaacaccgcccaggagctgcagcaacagcaggagaaccgtagccagacgatcctggaccaagtacagaaacggctcgagaacctaacccacgttcccgaggccggcgacaccgacctgcccgtaggattcggcgtgcgaccagaggatggccagcactttcagggagcgggctcgtcttcatcggatatcgtctggatcgagccccaggacgcccgtgcggtcgatgccaatggccagccgctgaccgccggctccaccacccaaccgagcggattcagcttcccgacctccttcggcaatgcggtcgatcgcggccagaacgcgctggagcggatcgatgacgggctgcaccccgtcggccagcaacgatccgacctggaaaaccgcaagctcgtccgcaagacctacacgctgccacagaactcgacgctcatgggctcggtggccatgtctgcgctgatcggtcgtgtgccggtcgacgggacggtcaatgatccttacccgttcaaaatcctcatcggcccggacaacctcaccgccaacggcatcgagctgccggacgtcgccggcgcggtagccagcgggaccgcctcgggcgactggacactctcctgcgtgcgtgggcagatccgcagcctcacgttcgtgttcaacgacgggaccgtgcgcaccttcccggcgccgaccgaagaggtgaatgacaaccagagcaacaacaaccagaccgccagcgccgaccagaaaaccatccagggcggcctcggctggatcagcgacccctacggcatcccctgcatcgccggtgatcgccgatccaatgccaaggagtacctgggcaatcagagcctactcacggctgccggggccggcatcgccaaactcctggacgccgacgagaacaacaccagcaccgtcttcagcggcaacggcaccagcttcgggacgaccggaaccaacagcaactcggccctcaacagcatcctctccggcggcgtcagcgacatccggcagtggatgaacaagctgtacggcgaggccttcgccgccgtctacgtgcaacctggcgcgcgggtcgccgtgcatctcgatcagcaactggcgatcgactacgaactcaagggccgcaaggtcgactacagctctggagccgctcatgcaacagcagacctggactaa

SEQ ID NO: 357108 - DNA, 444 bp, Pseudomonas aeruginosa
atgcaacagcagacctggactaacccccttcttcgtctctgcgccggcctggcctgcgcgctgaccctggcagcgtgctccaccagcaaggaggagatgctgccccacggcgaggccaacatgctcgacgtctgggaacaaggtgcaaccagctcgataggcaacagccgtggccggctgctcctcgatgccaggcaaacgctgcggcgcccgatcgatccgcagcaggctgcctccgcgaacgaccaggccgactacacccgcacggccagcaacgaaatccacagccagttcaaacgactgcccaatcccgacctggtcatgtatgtgttcccgcacctggccggcagcgatcccgccccggtaccgggctataccaccgtgttccccttctaccagcgagtccagtacgccatgccgggcgagcgcacggaggactactga

SEQ ID NO: 357109 - DNA, 624 bp, Pseudomonas aeruginosa
gtgcgggttgaaccagcggatcaaccagttcctgatctcctgtccgcccatacgcgaagcgacgatgccggcgttcgccaggccgccttggatacgctcgcagatggatttcagatacgccgccgggtcctgtccgcgaatctgcgcatccgccttgcggatccggcggtagacgaccatccgcacgcgccgctgttgtcctcgccagggcagcttgctgacggcggtgtcgacgaacagtccgcccggcttcgaaattccctccaggtgatgcttcatgagcgccaggtacatctcgctgaaggccgatccttgtgctcgaggatggacgtactgcctcaactgctcctggaaattgtcccagctgatctcgtcctgggcgtagaactggacgatccagggcgaggtttcgtgctcgtcgaaggagttctgcagggcttctttcaatgcgtcccgagcgttctgcatccaattgggatcgcggccctcggtgcccaagggcaccagctcgaagaacgcggcgcgcgaacgcccatcttccaggagcatcacctgctcgtcgggcaggtactcagcccagggcagcaggtcgacgaacgatgggtcgtgatcgtagaggcgtga

SEQ ID NO: 357110 - DNA, 1623 bp, Pseudomonas aeruginosa
gtgcaggctgccggtggccgcggtgagcgcggtgggcgtggccagcgacagggcgcaggggcaggtggcgaccagcagcgacagcaccacccagaaggcgcgctggtggtcgacctgccaccacagcgcgccgaccgctgcggcgaccagcaggacgatgagcaggaaccactgcgccaccttgtcggccagttccgccaggcgcggcttgtccgcctgggcgcgttccagcaggcggacgatggccgacaggcggctgtcgtcgccaagggcgccgacctcgacggtcagcggcccctcgacgttcagggtaccgccggtgacggcgtcgccggcctggcgtggatggggcaggtactcgccggtgagcagcgactcgtcgacactggactggccgtcgaggatcactccgtcggccggcagcacggcgcctggcggtaccagtacgcggtcgccgacgcgcagttcgctgagcaggatgcgctcgccctggttggcggcgtccaggcgcaggcaggacgccggcagcaggttgaccagttgcgcggtggaggcggcggtgcgctcccgcgcgcggcgttcgaggtagcggccggcgaggaggaacagggcgaacatgccgaccgcgtcgaaatacagctcgccctggccggtgatcgtcgaccagatgccggcgacgtaggcgccgccgatcgccagcgacaccgagacgtccatggtcaggtggcgggtgcgcaggtcgcgcagggcgccacggaagaactggccgcagcagtagaagacgatcggcgtggtgaggatcaggctgacccagcgcaggatgcggtccatgccggcggaaaggtcgaggttgaattccggccaggtcgccatcaccgccatcatcacctggatccacagcagcccggcgacaccgagctggcgcagggcgtgacggttctccatggccaggcgctcggtggcgcggtcgggttggtagggatggccggcatagccgatctggcgcagttcgccgagcaactggctgagcggcaactggctgtcctgccagcgcacgtgcaggcgatggttggacaggttgagccgcgcctcggctacgccaggcaactggcgcaggtgcttctcgatcagccagccgcaggcggcgcaactgatgccttcgatcatcaggctggtttccgccagctcgccctcatggcggacgaagccgccctgtacgtccgggcggtcgtagagctgcaactcttcgctgagcgccttgggcaaggcttcgggattggcggcgttttcgctgcggtgccggtagtagctttccaggccgccggcgacgatggcctcggccaccgcctggcagcccggacagcacatggcccgcgtctcgccgagcacgcgggcctcgaagcggctgccggcggggaccggcaagccgcagtggtagcagggcaggggggcgctcatgggcgcttcgcttctgctccctggagcggttcgtcacccagctccatgaccacggtcggcgataccacctcttcctcgaaaagacgccactggccgctgccttcctggccgagcagttcgacgaagcgacggccctcgacggcgtcggtcagttgcccgacgtag

SEQ ID NO: 357111 - DNA, 810 bp, Pseudomonas aeruginosa
  misc_feature (792)..(801): n is a, c, g, or t
ttggcgtgcttcgacccagaaacaaaggtattcacaagagctttcagaccgcatcaggagcagagagtcagcctattctttgtccgaaatgccaaccaccatctgaacgtgcgcttcaccgtgtcgtctgggggggcgagcaatctggcgtccctaggaagcaccggcaacctcgcggccctgtcgagatacctcggacaggacgaagggtttatagcgttagctgcaaaaatccttgaagcagaagtccgaaagcaagccgcattagcggaaagcgatgccgcggaggaatcgatcaccggcgaagacgccgagaatggactagctgtcgatgaccccaaacttgaaggcgttcctgtccaaagcttcccggtaggacagatttggaaaaccatcacatcaacggagcttgaggcgcaaccgtcgttcagggttgcagcagagccgcggttccatcgagacaatctgggacttctcattccttacatgatggagtcgaaggcgcttgagggcttcgaggctgacgacagcattcgtctgatcctaagggatggggagaaggacatcgatgttggcgaaatcgacttggccaaaagcctccgcgatgcggtctacatcccggcctcgagcaagtcacgacgcgtaaaagctgactcggtgctgtatcttcagagtcagcagaacaaaacgtctatggcccgccgcaaaagtgcaatggatcggatcatcaaccgacaatctgtccagccagatctattggactacttcgacgaaaagtgcaagctagtcccnnnnnnnnnnagtttatga

SEQ ID NO: 357112 - DNA, 1428 bp, Pseudomonas aeruginosa
  misc_feature (1241)..(1250): n is a, c, g, or t
ttgctccagggccctccaggtacagggaaaactgagttcatcgccgcgtttgcgcactacctgatcgataaggtcggagtgagaaacatccttctggtgagccagtcgcatgaggcggtaaacactgccgctgagcggatcagagcacactgtcgtcgcttgggtactgctctcgatgtagttcgcttcagcaaccggggccaggtggtctccgaggagctcctcgatgcctactcccgaaacatcgttgaccgccagaggaatagcttcagtgccgaactcaaggaaagggtaggtgccttggcgtcgtcactcggattgggtacggagtttgcccagaccatggtggacgtcaaccaacggatcactcgccagataaagtccctggagagcctcgagaaagacatcatgcgagccacggacgacgaggatcgagccgccctggaagctctccgaaaagctgtgcagaacgatgtaagtctttccgctaaggcttaccttggcgattccgatttgagcgaagttcctccgcaaacgatccttgagcgagtctatgcacgcattcagtcggaccatggggtccgaccgccggagttcaagcactgtcaggatctgatccaactctcgcaggatttcagtgagcgcttgtcgagcaatcgcgctaactacgacgagtttttaatgagatcccgtagtctcgtatgtggaacctgcgtagggattggcctgcagcacctgaatcttgctgcaacccactttgactgggtgatcatcgatgaaggtgcacgatcctcgcccagcgagctagcaatcgccatgcaagtcgggtcccgaatcctcctggtcggtgaccattcacagctgcggccgacgtatgaggatgagcacaagaaagctattgctcaatctcttggcattcctgcgaactcagctgaattccagcgagtcatgcgaagcgattttgagagagtgttcgaatccccttacggtcgtgcagcacgagcaaccctcaaaacgcaataccgcatgcttccgccgatcggtgaccttgtcagcgaaatcttctacgagaacgaactcaagaacggtgagcggccgagccctgaatacttcgcccaaaagaccccaagctgcctgtctcacattgtcacttggctggacaccggaacgcttggcagtaaggcctttgatagcggtggtcaaagcatctcaaacggcgctgaggccgacgcaatcatccnnnnnnnnnncttttgcaggagatcgaagctgatgaagacttctgcgcgggaatggttagagaaatggcagagtcccaagaacctcctattggcgtcatctgcatgtaccgtgagcaacgcaagctggtccgcaagagattcgcagagaaatcatggtctgaggacttccgcagacttgtcaaaatag

SEQ ID NO: 357113 - DNA, 1122 bp, Pseudomonas aeruginosa
gtgggtgaactggtagttccagcgcagcttgccggtgttcaggtcgagggccaccaggccggcgctgaacttctcggcaccgggggtgcggttgccgccccactggtcgggcatctggttgcccagcggcaggtagacctggccgagcttctcgtcgacgctggccagcgaccacatgttcggcgagttgcgggtatagaacttgccgggagccaggggctcggtctcgtccgggttgccgctgtcccagttccacaccagcttgccgtcgtgcacgtcgaaggcgcggatcaccccggacggctcgttggtcgactcgttgtcggtgacgtggccgccgatgatcaccagattgcgggtgaccgccgccggcgaggtggagtagtagccgcccggggtgaacggaccgatgccggccgtcaggtcgaccgcgcccttgaccccgaagtcctcgcagaccttgccgttgtcggcgttgatcgcgatcaggcgggcgtcggcggtgggcaggaacaggcgccgcggacaactggcggcgaccgccttgccggcctcggagagcgcggccggcggcgcgccgacgtcgctcctggcgtactgctcttcgtcgtagtaggagacgccacggcaagtcatgtgggcgaagcccttgaagcctaccgggctctggatctgcggatcgaagcgccagatttccgcgccggtgtccgggtcgagggccagcaccttgctgtgcgcggtgcaggcgtagagcatgccgttgaccttcagcggggtgttctcgttggtcagttcgagcggatcgtcggcggtcggcaggtcgccggtacggatgcgccaggcttcctcgagctggccgacgttggccggggtgatctgcttcaacggcgagtagcggtcgccgaactcggtgcgcccgtaggcctgccagtcgccgtccggcatcgccggggcggtgctggtcatgccgctgtcgcggtcgatgcgaccgacgatctgccccggattggtgaactggctgcccaccgcggcggcgccggccaggaccaccgccacgcccagcgccgcggtgcccagcggcgccggaccgtcggccagcagcgggcggcggaaccagggtag

SEQ ID NO: 357114 - DNA, 987 bp, Pseudomonas aeruginosa
atggcccaatatgacagcgcctacaaactcctattctcccaccccgacctggtccgcgacctgctccgcggctttgtccccgaacagtgggtccagcacctggacttcagtaccctggaaaaagtcagcggccaattcgtctccgacgacctgcgcgaccgacacaacgacctgctatggcgcgttcgcctcgacaatgaccactggatctacctctacctgttgctcgagttccagagcaccgacgactactggatggccattcgcctgatgacctacataggtctgctttaccaggacctcgcccgacagagggtcgtcttgcctggacagcctctaccaccggtcttccctatcgtcctctacaacggtagcccccgatggagcggcccgctcgacaccgccgacctgttcgagatccctgcggactcgcccctggccgcctataaacccaaactgcgctatttcctgctcgacgaacgacacctggatgtcacaaccttgcccaaggacgacaacctggtagcccaagtcctgcacctggaaaacagcgctcacccacaacaagcgatccgcgccgtcgaaacgttgcaaaagctgttgcacgcccccgaatgtgatagtgtaaggcgtgccttcaacgtctggatccggcataccgtcgccgaaaaactcaaccggcaagccaaccagctaccgtcgaccgaaaccttggaggacatctacatcatgctcaccgaacacaccggacaatggtccgaaacctggaagcgcgaaggtcttcagcaaggtcttcagcaaggtcttcagcaaggacgccaggaaggtcaggcggcactattgacccgattggcggagcgccgctttggcccgctgtcggctgccgatcgcgcccggctggaagccgccacccaggcccagctcgaagcctgggccgacgccatcctcaccgcccagagcctggctgagctgttcaccgctcactga

SEQ ID NO: 357115 - DNA, 1287 bp, Pseudomonas aeruginosa
atggctgacaaaaaagcgcagttgatcatcgagggctcagcccccgtcgaactgcccgtcctatccggtaccatgggtcccgatgtagtggatgtacggggcctcaccgccacgggccacttcaccttcgatcctggcttcatgtcgaccgcctcctgcgagtcgaagatcacctatatcgacggcgacaaaggcgtcctcctccatcgcggctaccccatcgagcaactggcagagaaatccgactacctggaaacctgctacctgctgctgaacggcgagctgcccaccgccgcgcagaaggaacagttcgtcggcaccatcaagaaccacaccatggttcacgagcagttgaagaccttcttcaacggcttccgccgcgacgcccatccgatggccgtgatgtgcggcgtgatcggcgccctctcggccttctaccacgactccctggacatcaataacccgaagcatcgcgaagtctccgcgcatcgcctgatcgccaagatgccgaccatcgccgccatggtgtacaagtactccaagggcgagccgatgatgtatccgcgtaacgacctgaactacgcggaaaacttcctgcacatgatgttcaacaccccctgcgagaccaaaccgatcagccccgtgctggccaaggccatggaccgcatcttcattctccacgccgaccacgagcagaacgcttccacctccacggtgcgtctggccggctcctccggcgccaatccgttcgcctgcatcgcctccggcatcgccgccctgtggggaccggcccatggcggcgcgaacgaagcggtgctgcgcatgctcgacgagatcggcgacgtgtccaacatcgacaagttcgtcgagaaggccaaggacaagaacgatccgttcaagctgatgggcttcggccatcgtgtctacaagaacttcgacccgcgcgccaaggtcatgaagcagacctgcgacgaggtcctccaggagctgggcatcaacgacccgcaactggaactggcgatgaagctggaagaaatcgcccgccacgacccctacttcgtggaacgcaacctgtacccgaacgtcgacttctactcggggatcatcctcaaggcgatcggcattccgaccagcatgttcaccgtgatcttcgccctggcgcgtaccgtcggctggatctcgcactggcaggaaatgctctccggcccctacaagatcggccgcccgcgccagctctataccggccacacccagcgcgacttcaccgccctcaaggatcgcggctga

SEQ ID NO: 357116 - DNA, 384 bp, Pseudomonas aeruginosa
atgttcgacaactcgattcccgatggccaaggtggctacaaggatcgcggcggcttctggtgcagcgtcgaatggtggcatcaggatgcccagcgcttcgccgaactgttcacgaaaggtatgcgcgtcaaggtcgaaggcagggcgatcatggaccgctggccggacaaagagtcaggcgaagaagtccaggcgctgaaggtcgaagcctcgcgcatttccatccttccgcatcgcctggccgaggtcaccctgttgccgtctaccaacggccagtcgacacaacatcagcagtctcggcaggtgccgcagcaacctgctcagcaggatgcgcactcgcagcaggactacgacagcgccttcgacgacgacatccccatgtag

SEQ ID NO: 357117 - DNA, 381 bp, Pseudomonas aeruginosa; identical to SEQ ID NO: 357066

SEQ ID NO: 357118 - DNA, 186 bp, Pseudomonas aeruginosa; identical to SEQ ID NO: 357063

SEQ ID NO: 357119 - DNA, 186 bp, Pseudomonas aeruginosa; identical to SEQ ID NO: 323741

SEQ ID NO: 357120 - DNA, 288 bp, Pseudomonas aeruginosa
atgcaattggctcatggccaagccacccagcagcacgcgaatatcttcgaggggatagaacagctctacatgctcttctgctgtggcaatccggtgctgcagctcctcggcaaacaacttgagatccggcacggcctccaactccatgctggcgcgatagtcgcggtgagagtccatgagcgacatggctgggaaaggcgtctgggttttctgtgcgttggtgagctgctcgattcggctttcaagatcatcgatatgcacagccagcgtattcttgtgctgctctaa

SEQ ID NO: 357121 - DNA, 543 bp, Pseudomonas aeruginosa
gtggctaagactgcgctccggctgcaaggcctccaccagttgctcgaacggcaggtcctggtgcgcctgggcctccagcgcgcgttggcgggcctgggccagcagctcgtcgaagcccatccgaccgtccaggtcggccttgagcacctgggtgttgacgaagaagccgatcagccgctcggtctccacgcggttgcgattggcgatcggcacgccgacacggatatccgcctgcccgctgtagcgatacagcagcgcctggaacgaagccagcaacagggcgaaggcagtagccccctcctgctgggccacgcgcctgagcgcctgggacagatcaatatccagttccaggatgaactgggcaccacgatggctttgccgaaccgggcgcggccggtcgaacggcaactccagcaccggctgctcgccgcccagcaggccggtccagtacgccaactggcgctccttttcccctgcctccatccagctgcgctgccacagagcgtagtccgcgtactggatcggcaaagccggcagcgctag

SEQ ID NO: 357122 - DNA, 528 bp, Pseudomonas aeruginosa
gtggtcaacgccacggccagcgacccgaccggcaataccagcgctccggccagcaccaccgtggactcggtggcgccggccgcgccggtggtcaatccgagcaacggcgcggagatcagcggcaccgccgaaccgggcgccaccgtgaccctgaccgatggcagcggcaatccgatcgggcaggtcaccgccgacggcagcggcaactggagcttcaccccgtccacgccgctggcggatggaaccgtggtcaacgccaccgctaccgacccggccggcaataccggcggccagggcagcactaccgtggacgccatcgcgccggccacgccgaccgtcaacctgagcaatggcagcagcctcagcggcactgcggaaccgggcagcacggtgatcctcaccgacggcaacggcaatccgatcgccgaggtcaccgccgacggcagcggcaactggacctacaccccgtccacgccgatcgccaacggtactgtggtcaacgtggtggcccaggaccgccggcaatag

SEQ ID NO: 357123 - DNA, 399 bp, Pseudomonas aeruginosa
  misc_feature (151)..(160): n is a, c, g, or t
atgagttgcatcggtcgccagatagaccaattacgcctgcagataccgggcttcgcctgcaagcccggctgccacgattgctgcgggccggttaccgcctcgtcggaagagatggacgcagttccactcggccagggcggcgtcgtgttcnnnnnnnnnncccccctgccggtgaagagcgaggccgaacacgacgccgccctggccgagtggaactgcgtccatctcggaccgaacggctgcgaggcctatgaggaacgtccgctgatctgccggctgttcggcaccacgccgaacctgccctgcccggaggggcgggggcccgaagtgccggtggcggagcaggtggagcgacaggtgcatgcgctgatcgccagcactcgccaggtgctggtgtag

SEQ ID NO: 357124 - DNA, 882 bp, Pseudomonas aeruginosa
gtggagcgtctgggcgccggcgagaccatcccgcagatggaggcgagcctgcgggtggcggagggcggacgcaagtgcgtggtggtcgccgggcagccgatagaggtcggcgaggaggcctgcatgctcttcaccttcaccgatctcgaaccgcggaagaaggccgaggaggccctgcgcaagagcgaggagcgcttcgccaaggccttccgcatggcaccggtgccgagcctggtgctgtgcggcgacgacctgcaggtgctggacatcaaccaggccttcagcgaaaccttcggctaccaggccgaggaactgctcggcgagtccaccgtcgcctgcgggctgtggcaggacggcggcgccgagcgcctgggcgagctgctggcgcagagcggcagcgtgcgcaacgtccagctgcgcctgcagcacaaggatcgcaacggcctggactgcctggtctcggccgaggcggtgagcctcaacgagcaggactgcgtgctggtggccttgctggacatcagcgaccggcggcgcaccgaaatggagctggtgcacgccatcgagacggtgatgcaggacgcttcctggttcagccgcaccctgatcgaaaagctcgccaacgtgcgccgcgccaacgcgccgggcaccggcgccgaactggccgacctgactgcgcgcgagcgcgaggtgttcgacctcatctgccagggcctggcggacaaggagatcgccaaggaactgggcctggcgccgaacaccgtgcgcaaccacgtggcgaccatctacgccaagctcgatgtccacagccgtggcgaggccatcgtctgggcacgcgaacgcggattcgcgccggagccgcgcaacggcaacgggcgcaaataa

SEQ ID NO: 357125 - DNA, 546 bp, Pseudomonas aeruginosa; identical to SEQ ID NO: 352418

SEQ ID NO: 357126 - DNA, 258 bp, Pseudomonas aeruginosa
gtggccatcgacgccgccgccgcgctggcctggcgccagggctggctgagcttctaccggcggccgctggcggaagtgctcgacgaactcgctcgctactaccccggacgcattctcctgctcgacgacgcgctcggccgccagccggtcagcggcagcttccgcagcgacgatcccgaagccgcgctgaagtcgctgcaggcggtgctcggctatcgccagcagatcctgttcggacgcctggtggtgattcgctga

SEQ ID NO: 357127 - DNA, 1389 bp, Pseudomonas aeruginosa
atggggaaaactatcgtgaaattagctgaactcggggaccttcgcagaaagcttgatcgcgccaaaccagtcaatggagcgaccagaattgaaaagaatgggaacaacatcgaactccatttagtaaactccttatgcggactaaacggcagtggaaaaacacgaatactgaagagtatagccctagatgaaaacccatcaaatctagaagatttcatattccacaaaaatggagaaggccgtctatacataagtccatccatactaatatcagaagcaataagaaaatctatcgaactaaagaagagcccaaactatacagatgaggtcgatcaatacgacccgtacgaatttacgccagatcagatagagaaagtaaattacatcatccactctaaatttagcgcaatttcaatttatgaaattgaaactctcgtcgatctaaatggattagatgacaacaccgaaaacaacgagccactccaaaattccgaaatattcccatactgcacagctaaaaaaaattcctcactccttgattcggaaagcctctcccaaggcgagctatatgtaattttgttaatttggcttctaacaacaaacgaggaactttgccttgcattaatagatgaacctgaaacatttttgagcccactagctcaaaccagacttggacatatattaattcaaatctctgttcaacccagagatagaaacatccaaataatcgcagcgacgcattccccctttatcttagagtcaattggatacaaaaactcattatcagtatcaagattcccaaacaccttgagtattacgactgctgacaagagcctcttaagaaagataggcctacaccaagacaatcaaaatataattctggttgaagacgcaaaggcaaaactgctactagaggaaatattaaacaggtttattcccgcatggacacataacaacattataatgttctgcaataacggtgagtctgacctacaagaaatatataaaagaatcggcggcccccaagacaaaggtaaagtacttttggtttatgatgccgacataataaagacaaggagattttcggcagaggaagaacgctattcattaattttacccggatcggaagccccagagatcgaagtgattgagcacctacatgcacatactcaggacatcctaaatcttttcactcctgaacgcagagagagcttaattcacgcaatggagggtgcagccggcctaaaccatcatgactatttcattacaattagtagagattcaagaatacacgaacaagaaatatttaacaccattgcaagccactggtgctccaagcatgaaaaagaatgctatgattttatacaaaaatatttaagcctaatataa

SEQ ID NO: 357128 - DNA, 1143 bp, Pseudomonas aeruginosa
atgaaactagaatcaaaggacctcataataagaacactagtctcccaaatagcggaactagaaatagatttagagcctgatttccaacgaggagaagtctggaatacgcaaaagaaacagatgctaattgacacaataataagaaactggcaaatgccaccgatatttgttgtgctaagcggcgaatcaggactgaaggaagttcttgatggacaccaaagactaacttccatttacgatttttgtgaaaacaaattcaaaatagatggcaacattcaaccagaagacagcgaaatagaaagccttaacgggctttattacaaggatcttccggaagtccacaagagaagaatacagaactatccgattcgagtctttgaaattaccgactacaaccagtccgaacctttcgagttattctacagattaaaccaaagcgtaaagctcacttctgccgaaaggagaaatacgttctacggcaagatacgagaacaagtaaaaaatcttgtcgaacagatggactgcgttggctataacagggacaccatcggcttttcaaatacccgcctctcttaccacgacgtaatagtccgggtactactaaccctggaagccaaaagcttagagaaaataaccgacattgaaatcacaaacagatatagatcccatgaagccttctctgacgcactagtaagcgaagtctccaaggcgatttcacttcttataagtggaattatagaaacaaagaaagtaaagctcagcaaaccatcgctattttctctccttgcctttaccacagaaaacattacaacactaacaaaatccggactaaaatcaatacttgaaaactacagaacaacactagcaactaaaaacagcataatccaaaaatcaatccccttggactcttggctactaaaagaatacacataccgtttaagcacaagcgtaaacgatacaaagtctgtaattctaagaagattctttctattctaccttgcttaccaagtaaaagagctatcccatagcgactccctgcaagtcgccgacacaatcaacttacttaatgactacattactacgatgaccaccgaagaggcctacgaaatacttattcaccaaggatggggaaaactatcgtga

SEQ ID NO: 357129 - DNA, 1638 bp, Pseudomonas aeruginosa
  misc_feature (605)..(605): n is a, c, g, or t
  misc_feature (1573)..(1582): n is a, c, g, or t
gtggtcaacgtgaccgcgagcgacgccgccggcaataccagccttcccgctaccacgacggtggattcctcgctgccgtcgatcccgcaggtggatccgagcaacggttcggtgatcagcggcaccgcggacgccggcaacaccatcatcatcaccgatggcaacggcaacccgattggccaggtcaccgccgacggcagcggcaactggtccttcactccaggcatcccgctgccggatggcacggtggtcaacgtggtggcgcgcagcccaagcaatgtcgacagtgcgccggcggtgatcactgtggatggcgtggccccggcggcgccggtgatcgatccgagcaacggcaccgagataagcggtaccgcggaggccggcgcgacggtgatcctcaccgatggcggcggcaacccgatcggccaggccaccgccgacggcagcggcaactggacgttcaccccgagcaccccgctggccaacggcaccgtgatcaacgccgtggcccaggacccggccggcaataccagcggtccggccagcgtcaccgtcgatgccatcgccccgccggcgccggtgatcgatccgagcaatggagtcgncatcagcggtacggcggaagccggggccacggtgatcctcaccgacggcaacggcaacccgatcggccaggtcaccgccgacggcagcggcaactggagcttcacgcccggcacgccgctggccaacggcacggtgatcaatgcgctggcccaggacgccgccggcaacgccagcggcccggccagcaccacggtggactcggtagccccggccaccccggtgctcgatccgagcaacggtacggtgatcagcggtaccgccgaagccggggccacggtgatcctcaccgacggcggcggcaacccgatagggcaggccaccgccgatggcagcggcaactggagcttcactccgggcacaccgctgaccaacggcacggtgatcaatgcggtggcccaggacgccgccggcaacaccagcggtccggtcagcaccacggtggacgcggtggccccggccaccccggtgatcgacccgagcaatggtgtcgaactcagcggcaccgccgaacccggcgtccgggtgatcctcaccgatggcaatggcaacccgatcggccagaccctcgccgacggtagcggcaactggaccttcacaccgggcacgccgctggccaacggcacggtggtcaacgccgtggcccaggacccggccggcaataccagcggtccggccagcaccacggtggatacggtggcgccggccacgccggtgatcaatgccagcaacggcagcgtgatcaccggcaccgccgaggtcggcgccaaagtgatcctcaccgacggcaacggcaacccgatcggcgagaccaccgccgacggcagtggcaactggaccttcacccccggcacgccgctggccaacggtacggtgatcaacgccgtcgccgaagacgccgcgggcaacgccagcggtccggccagcaccacggtggactcggtggcgccgtccgctccgctgctgagcnnnnnnnnnncagcggcccggccagcaccacggtggactcggtggcgccgtccgctccgctgctga

SEQ ID NO: 357130 - DNA, 222 bp, Pseudomonas aeruginosa
gtgaccaccaagaagccgaccatgctggagcgctgtggcgtaaccgacgccgaagaccgcgcctcatggggcgagtgcgtggacagcctgctaggcccgcgcctgatgagccacgatcaagagaagcgccgccggaatgctttgcacttggccgctgctgcattgcggtcggctggtgaaagcgagatggctgcccaggcggatcatttggcaatcggatga

SEQ ID NO: 357131 - DNA, 1440 bp, Pseudomonas aeruginosa
atggccaaacgagcgcgcctcacagagatggaggcccatgcagtaaaaagccgccaatccgagccggtgggctcaaggggaaaaggaacattgctgctggagcgcaaggcgtcaggtgcgatcctggctttttacagggagcgcactgcatccaccgataaacggctccagctcggcatcctcgccaagaaaccacaaccaggcaccgaggagcgaaccctcaacgaattacgcgccgaggcattgcgcgtcgccaccgaggccggagcagcgggaagccttgagaagtaccttgaattgaaggcagagcgcgaagctgctgcagaggtagaccgcgccctactcaagaagaaggcagaagaagaatccaggcgcgggacctttggggagatgcttgaagcctacgccgatcacttggaccagtccggcaaggcaagcgctcgcaaagtgcgctcactgtttcgcgtcaacgtcctggagttccgccctacccttgccgccaaatacgcgaacgaaatccagcctgaagaaatttccgaactgctgtcagccgtactagaaagagcgccgaaagctcgcggaattggcaacaaggcggccgctccttctacgaatatgcgcagcactgccgacgaactgcgccgataccttcggacagctttcaatcacgctgccgcctctcacttggctgtcgggaagaagggcaagagcgctaacaagtggtttgccgttaccagcaatcccgctgcgctcattcccgctatcgaggacgccaagggcgggaacaccgaatcactcgcgcctgccgagctgaccgaactactccacttcctggacagccttccagagcgaaaacaggccatcgcaaagaccctgatctatctcggcgggcagcgtataaagcaactgcttgctgtccgctgggaggacatcaacgaagactctatttgcctgctggatgccaaaggacgcaaagcagaggcttgggagcatctgctgccgatcacgcagcgcatcaatgaaatcatggcgcctttgctcgccaatcaaatcggtcctggaccgtttgcactgctgcccgatatgcaggcgcacaaggacactgtttcccgcatcttcagtgacgcaagcaaagcactagtcgctgccggcaagaccagccccttcagttggcaacgcgtcagggcgacatgcgaaacgctgctagctgccaaaggggtttcgactgatgtacgggcctggctgttgtcgcatgggcgaacaggcgtacaggccaagcactacgaccgcaacagctacctacctgagaagaccgccgccctgcaaatgtggggcaactatctagatggcctggcatccggcgagccggggacggacaaaaacgtcatcgtcttggcgaaacggaggaaggtgggaggccgtgaaaatgaaggggcgtga

SEQ ID NO: 357132 - DNA, 135 bp, Pseudomonas aeruginosa
atggctgaccgcgccatcgccctgattgactgcaacagcttctacgcgagctgcgagcgggtgtttcgaccggacctggcacggaccccaatcgttgtgctgtcgaacaacgatctgaggggtgggaatcgttag

SEQ ID NO: 357133 - DNA, 189 bp, Pseudomonas aeruginosa
atgggagagccctacttcaagattcgacacaagcttcagcgcttgggtattcgcgcgttctccagcaattatgcgctgtacggcgacatgagtcagcgggtcatgactctccttgaggagatggcacccgccgtcgaggtgtacagcatcgataagaataagttgcatactgtggacgcccaaacgtag

SEQ ID NO: 357134 - DNA, 1788 bp, Pseudomonas aeruginosa
atggatttgaagcaacaggaagtaacttcggaggagttcgagcggttcttcaccggattcgaggcagagaacatcctcgaatgccatgatctggctgtcaagctggctgatttcgctgttgagcctgccgcgttcgtcgtacagtgcgcggcaacgatgatgctgcaccctagtgacaagagggtccccttcaggcccctatggcgtaccgagcgagggacaagcgcgcgtatcggcgacttcaatagcaaggcaatgcaagcgctcgctaacgccactcctcttatcaaaaaccatgagttgcgggctcgactcagcgatttagtatggctggaagtgcgtgacaaggaacagccaaagattgctgtcagcgcatacatccagtctgccaagcgactgtttgaggccggacgaaactttccggcatttgccagagttgagcgcgcgctaatgctcgttgcttcgctacgacaattgacagaccgtagcgctgtatatgattacatgaatgagcttttagcttcggacgaactgttgcgctctgacgtcaatctgctgaggctttgctgggaataccgtataaaagatgatgatttcctctatgccaaggcgctcgaaacacatcgacatttctttgatagtaaacagtatcggattgcagtttcagttctcgagacatcactcaaaagctgtcatggggacaaaccacgctcccatcaaatcctccagctaattgccgagtgccacgaagcggaagcgcggctgcataaaggttctatcgccgcgtcctgctacatgcaggccatcgaagccctagagcgcataccgggtacgcggtctaagcgagacgaactctacaaggaattgagagaggcacaacgtgatatccaacatgagatggggcttttctctcattcattcggaagtctgcgtgaatatgccgagcatgcagaaaaggttactgaagggacagacgtgtatgactcgatcttccgactcgcttttgccatatcaaaaccatctgatcttgaaaccttaaaagatactgtcggatcgagcttggatccattgttggctgatttcggtgggattcatatcgaccatgaggggatgacagtcgcggttacgccaagtgctgccgaaggcgaggacgcgcaagcagataccgcccatgactgggctatgcagagcctacggaacgatcatacattagaggtcaatgccagaatcctgcccgccttggacggtattgcgagcaaatattattttcatgaggagatcttggactctttcttggcgagaaacccgctagtaccggatggtcatcaggagttcttttcgcgtggtctggtggcgggactaaatggcgattacctttcggcagtccattatctcatcccccagttagagaactccctgcgttatcgcttaaagcagttcgagaaggagccttcaaagcgatacccggacaactctcaggagcgagacggtctaaaggccctgctcgatgaagagttgctgattgctgatctgggggcgccgctgctcggaaatttacgggctattctattggataaagtgtatggggacatgcgcaaccacctgtcccatggatacgtgcctgcccacgtcttcaagggtgatgcagcggtcatgctgtggtggctggtgttgcgaatggttctagcgccctacatcaagttttgggaacagaaatacggcgacaattttcgagatgaaatcagatcaggacgcttcgactttaccacatccattaacgagaattaa

SEQ ID NO: 357135 - DNA, 279 bp, Pseudomonas aeruginosa; identical to SEQ ID NO: 82566

SEQ ID NO: 357136 - DNA, 1332 bp, Pseudomonas aeruginosa
atgacaatgaggctgtcgcgctttcccatttcgactctgctggactcggcctcgggacatctcgaggcccacttgtttaagaagcggcttgatgccgagagcggcgaaccgctggctcaacaatattccggcatcattttcagcggcaacccgcatgaaaccgttcctcggcgcctgctgctggataaacgcctcaccccgctggagcggaactgctggcaagtgttccgcttgctcatcaacgacgacgggctgaccgcgttccctacatacgagcaactacgcccttatctcggcatgcagccgggtaagatcgcctcgcgcgaaaccatcgccaaggcactcaaggtccttcggttgacacgctggctcagtctcggccgtcgcctgcgcaacgacctcaacgggcaagtacagggcaacgtctacatcctccacgacgaaccggtatccccggcagaagccctggagctggaccccgactacatgcagttgctgagccagtccaccggcgacagcaaccgagccatacgcgaaatcggccaggtcacatggcgggagttcagggatgacccggacgttggtcgccgcctcccaacccatctggagaagctcgagggacgcttgaaccaccagcaatgggctatcgatagtcagctcgaagcagatccagcggcagagttcggcatccgaactctgcccgatctacctcattcaaccccgagttcggatgccgaactcagtgaaatcagcggcaagcaatgcgctttaccgctgagttcggatgccgaacccagacagaatccgccgagtacgcccttggttcggatgccgaactcatatagtacgtatacatacaaacaagattctgtatttaaaaaaccagtacaaccgcgaacacgcgaggaagcacatccgaactggcaggatctcctgaacggactggagggcgagcaacggttccaggcggtaagcgcgctccgacgggtgtccgaggagcttcggctacccatcatcgagcagtggcggcaccgatgtgccggcggaaccgtcggtaatccgttcggctacctcatgacgctcatccagcgtgcagtccagggaaagttcaacgcttcttgggctccggaagaaccggctgaacgaaccatcccagcagcggaacgccccagtcgtgctccggcaccaccaagccccacaacgcctacacagcctcaggttcagccgaagggggatacccggacagggaacgaagtcctcagccggctcaaggacctcattcggcccaggcacggatcgagcgtgccatccgagcggggtgatgagccatga

SEQ ID NO: 357137 - DNA, 708 bp, Pseudomonas aeruginosa
atgacccgggacggcattgcggtagaggtactcgttggcgatggcgccgtcctggaagaacagcgccgtcgccaggtgtccagcgccgggagcgctaccgaaattgctcaaggccacctgccaggcggcgccctgggcgatactggtgttggttttcgagatgtagcccccggtggctcccatgagctgcgcgatccggcggatcgagagttcggaagctacctgtccacccgtggtcacgatcagcgtttcgagctggttggccgccggcttgcgggccagtacctggtattgctggccgtagatgttggtgtcgcggaagcctgcgggcaggtaacgggtgttgcgcaacatcgggacggtgatcaccgccggggccgtggcgccggcgctggccagaaccgtgctgaagttgtccttcaggtacttctccgctgccttggtcacctgctgttgctgctgggccgcgtgctgctcgtccaggccgtccaggtagctcatcaggaccgatatgccgccggcggtcgcgatggcgatcacgaccagggcgatcatcagttcgatcgagatgaatccactgctgcgcttactcctcatggtgttatctccacaggctttgccgggactggcgagcttggtcgtcctgcaggagatgagcctcctttcggcggatcttgtcgcgcatggacgggccgtcgtcgccggtga

SEQ ID NO: 357138 - DNA, 990 bp, Pseudomonas aeruginosa
atggcgggctttcccgaagtgttcgtgaacctcgaccccatcgtggtgatgttcctcgcgtggctggtcgtggtcttgtgtttcttcgtgctggcgatccaactgttcatcacgctgatcgagttcaagctgaccacgctcgccggattcgtgctggtgccattcgcgctctggaacaagaccgcgttcctcgccgaaaaggtcttgggcaacgtggtggcctccggcgtcaaggttctggtgctggccgtgatcgtcggcatcggctcgggcttgttcgctcagttccaagtccatcccgccgagccgtctattgaccacgcgctggtcatcatgctggcctcgctcaccttgctggcgctcgggatcttcggccccggcatcgccacgggcctcgtctccggtgcgccgcagctcggcgcgggtgcgatggctggtgctgccgtcggtgccgctggcgcggccgttgccgtcggtgctgccgcgacgggcgtaggtggcgcagtcatggccggggcgcgcatggcgcctgccgccgccaagcttgccggcagcggcgcgcgtgccgccgcctcgacggccagcagtgcgaagtcggcgtttcaggccggttccgccgccgctggcggcggcgcaaagggcgcgatggcgggcctgggcaacgtcaccaagaccggcgcgcaggcagccgggcgaggcgctgcatcccgcgcttccgctgccgggcaacgcatggccgctcccttccgcgctggctggaatggcgctgctgccgatggcggcgcgggtgcggcatccggtcagggtgccgcaggcgaggccgcatccggcgccgctacggcgcagacacaggaacagcccgcttgggccaagcgcctgcatcgccgccagcaactcacccacgccgcgaccaccaccgcccacgcgctgcgcggtggcgatggcggcggctccggccaggggccgagcctgcgcgattccgattcataa

SEQ ID NO: 357139 - DNA, 975 bp, Pseudomonas aeruginosa
atggcgggcttccccgaggtgttcgccaatctcgatcccatcgtggtgatgttcctcgcgtggctggtcgtggtgctgtgcttcttcgtgctggcgatccagcttttcatcacgctgatcgagttcaagctgaccacgctcgccgggttcgtgctggtgccgttcgcgctgtggaacaagaccagctttctcgccgagaaggtgctgggcaacgtcgtggccgctggcatcaaagtgctggtgctggctgtgatcgtcggcatcggctcgggcctgttcgcgcagttccaagtccaccccgccgagccgaacatcgaccacgcgctggtcatcatgctggcctcgctcaccttgctcgcgctcgggatcttcggccccggcatcgccacgggccttgtgtccggcgcgccccagctcggcgcgggcgcgatggccggtgccgccgtcggcgcggccggaacggcagtggctgtcggtgctgccgcgacgggcgtgggcggcgcggtggccgctggcgcgcgcatggccccggctgccgccaagctggccggcagcggcgcgcgtgccgccacgtcggcggctggcagcgcgaagtcggcgttccaggcgggttccgctgccgccggcggcggtgccaaaggcgcgatggcgggcttgggcaacgtcgccaagaccggcgcgcagtctgccggacgcgctgccgcatcccgcgcttccgctgccgggcagcgcatggccgcaccgttccgcgcgggctggaacggcgacgctggcgcgtcagccggccaggccgccaccagcgaagcgccggcaggcgctgccgctgcacaggcgcccgagcagcccgcttgggccaagcggctgcatcgccgccagcagctcacccacgccgcgaccaccgctgcccacgcgctgcgcggtggcgacggcggcggctccgggcaaggcccgagcctgcgcggctccgacgactga

SEQ ID NO: 357140 - DNA, 660 bp, Pseudomonas aeruginosa
atgacgacagtcgcccatgcgcccgcgttgaaaactgttttgctgccgtttgagcagcatagataccgcgtaaccccatccgcgccggccgagccggtagttgtctgtgtccccgctgtcagcactgtcgtgaagaactcgaccccgtaccttgaaacggatgtccaggtgcggcccatcgcagccagcagtgcttgcacccgcgcattgagcgccggccctgccccaccatttgtgctgttgtcgaatgcgaactttcccccatctgcgaggctggcgccgttccagccattgatgaaggtgcttggagtccatgacgttgtgaacatcgtactcagcggattggctgcggttcccgcgaagcgacccatgtcgggcatcaggttcatgaacggcagaacgttgagcgccgatttcgccgccgatcccagctccgcccaaacaccgttttcgcgggcatatggctttccatcgctcggcgcgtcggccattccgcccaccagctcagtccaggcgctgccggaatactcatacgtcttgacctggccgctcggcgtcgtctcgttcgccacctgcacccgccagcccaacctgggcggcatgtactcccaaatgggcgtggtcgcacccgttgcccaccagcgcgctaggcggttctga

SEQ ID NO: 357141 - DNA, 657 bp, Pseudomonas aeruginosa
atgaccagcttcctcaagtgggcgaaatggttgaaccaagacgaggtgaccgaggctgtcattcgccaggtgatctcaccctccagccaggtcaagggtaacgtctacaccgattacggcgggcaggtgggcggcaccgtctggaacggcatcgcgagaaccgcaggaaccttcggcgttgccctgggcagcctggcctatttcccggcgatggatatggtccgccaagcgctgccgatggtgatgtcgttcctcaagatggccatggtcatctgcattccgatggtcctggtcatcggcacctatcaactgaaagttgccatgacgatgacggtcgtcttctttgcaatgatgttcgtcgacttctggtttcagttagccagatatatcgatagcacgatacttgatgctttctatggttcgggatcaccgcatctttcgttcgatccagtcatgggactgaatacggcgactcaagatgcaatcttgaacttcgtgatgggggcaatgtttattatattaccgctactatggattactgcagtaggatggtccggcatacaaaccggagcaattcttaatgggctagcagacggaaccagaggggttcaagaggcaggtgggaaagctggagaaagaatcgaacgtagcgtgtaa

SEQ ID NO: 357142 - DNA, 150 bp, Pseudomonas aeruginosa
atgacctttctcctgctgtggtccgcctgggcgatgtacagcacctggcgcggctgggccaccaacaacctcgacagcgccactgccggcgtttccgcgatacggatcgtggtcctcctcagcatcacctctttcttcctcctcagctga

SEQ ID NO: 357143 - DNA, 150 bp, Pseudomonas aeruginosa
atgacctttctcctgctgtggtccgcctgggcgatgtacagcacctggcgcggctgggccaccaacaacctcgacagcgccactgccggcgtttccgcgatacggatcgtggtcctcctcggcatcacctctttcttcctcctcagctga

SEQ ID NO: 357144 - DNA, 228 bp, Pseudomonas aeruginosa
atgttcaaacacaaagaagacaccttggaacccgacgaccacgccttgctcaaccctctgcgctgggccgaggtcgtgcgtctgggccaggaaggctgggagctggtgagcgttcagccactcatgcggggcgtaaccgagatcggtaatcaaaacgcccaaggctgggcttggggcgtcgctctgcccgtcagctacctgctgtttttcaagcgcgcaacctcataa

SEQ ID NO: 357145 - DNA, 150 bp, Pseudomonas aeruginosa; identical to SEQ ID NO: 357142

SEQ ID NO: 357146 - DNA, 162 bp, Pseudomonas aeruginosa; identical to SEQ ID NO: 336412

SEQ ID NO: 357147 - DNA, 150 bp, Pseudomonas aeruginosa
atggtcaacatgtaccccctggataccgtctgccaaagccagcactttgaccgggattttggtgagcggctggctgtacgacagcagcaccatgcggtacagcgcctgatcgacgagcaggccaaagcgttccacgcagtacatatctga

SEQ ID NO: 357148 - DNA, 270 bp, Pseudomonas aeruginosa
atggcgcagaaccaggccggcataacgagaataggcatttgccagatactggttctgcctgaatcgctcctcagacgtcgcgcgattagctaccgtcgtcttagccagaagatcccaaagaatcgccaaatgccggtaatgcgggtcatggctgaggatgttggtcagatgcagcgcgcctgtaacctgcgcctgccggctaaccagcaggtacaagccactttgctgcagccccgaaatggttcggtgcagacgctgaagagtccctag

SEQ ID NO: 357149 - DNA, 912 bp, Pseudomonas aeruginosa
atggctggcgagctccgcccagggcaggctcgccagttcacggaacgcctcgccgcgctcgctccagtagtcttccagcctggtcctgcgctcgcgcagctggcgctccaggcgccattgctgctggaggaagccgaactcgggggccgccgcttcggtcgtggggtcggcgttgagcacggccaggcgggccagcagcacgctggcgaagtcggcgtcggcgaccaggtgatgcagccagacgccccagcgcgcacgtcctccgcagcgcccgtggaacagtcgcagcaggccgcgctcgaacagggaatgcgggcgttgcagcagcgctgcgatgagcgtgttttcgtcggcgaaggggccgacttccagcgccgggctctcctcgggctgcccgtggacgaccagttcgaaaccttccgcgccgctgtccacctggctgtcgagcaacgggaactcttcgcgcaggcgccgccccaggcgcgtcaggtcggatgccggcacctcggccggagccaggtagcagaggccgaagcgggtcaggtcggcgccgagcagctcgctgaagaccatcccgcaggaccagggcgacaggtcgacgcgcaaggactgcgcggcctcatccggcatcggttggtgccgcaggcggtcgcgctcggagggggacaggcggtgccaatcgccgaccaccaccaggtgctcgcggaaccagtggtagcgcacctccgcggagagaccgacgttcatgccgcgctcctcgacagcaccagcggctgctccggcgtcgccgcccgttccagcagacgctccggcgccaagccgtggctgcgcaggagacggctgaactggtcgaggcgcgagtttgcctgcaagtcggcgagtcccaggtttgctcccgcacccgccgattga

SEQ ID NO: 357150 - DNA, 1035 bp, Pseudomonas aeruginosa
  misc_feature (1018)..(1027): n is a, c, g, or t
atggcgaacgctgctgctggtgttcttcgccgcggccatcgtgatgccgcacatgttccacatgatcttcaccgagaacctcaacccgcgcgcgctgatttccgccagttggggcctgccgctgttcctgctgctgatgagcctggcggtaccgccgatcctctgggccgggctgcgcctcggcgcctcgaccacaccggagtactacaccatcggcctcggcctggcggtggacagcccggccctggccctggccgccttcatcggcggcatctccgccgccagcgggctgactatcgtgatgaccctggcgctctcgggaatggtcctcaaccacctggtgctgccgctctaccagccgccggcgcagggcaacatctaccgctggctgaaatggacccggcgcctgctgatcgtcgccatcatcatggccagctacgccttctacctgctgctgggcgccgaacaggacctctccaacctgggcatagtgtccttcgtcgccaccctgcaattccttcccggcgccctctcggtgctgtactggccgaccgccaaccgccgtggcttcatctccgggctgatcgccggcatgctggtctgggcgatcaccatgctgctgcccctgatggggaacgtacagggcctgtacctgccgctgttcgacgtgatctacgtgctggacgattcgaactggcacctggcggcgctgtcctcgctggcggccaacgtgctggtattcaccctggtgtcgctgttcaccgaggccagcgacgaggaaaaaggcgccgccgaggcctgcgcggtggacaacgtacgccgtccgcaacgccgcgaactgttcgccggttcgccgcaggagttcgccagccagttggccaagccgctgggcgccaagaccgcgcagaaggaggtcgagcaggccctgcgcgatctccacctgcccttcgacgaacgtcgcccctatgccctgcgtcgcttgcgcgaccgcatcgaggcgaacctttccgggctgatnnnnnnnnnncgggctga

SEQ ID NO: 357151 - DNA, 645 bp, Pseudomonas aeruginosa
atgcagctctacagcttcttcaacagctccacgtcctatcgggtgcgtatcgcattggccctgaaaggtctggattaccaggtagtgccggtcaacctgcggcagggcgagcaactgcgcccggccgaccgccagcgcaacccgatgggcgcgctgccgaccctggtcgacgccgacggccgtcggttcagccagtcgctggcgatcatcgactatctcgacgccgtgcagcccgaaccgcgcctgatccctctcgacccactgcatcgcgcccaggcgctggaactggccctgctggtggcctgcgacatccatccgctgaacaacgtgcgggtgctcaagtacctgacccaggtcctcggcatagacgccgaggaccgccagcgctggtacgcgcactgggtcgccgagggcctggcggcggcggagaccctgctgaaccgacaccgtcgcggcgccttcttcgccggcaccgcagcgggcatcgtcgagtgctgcctggtgccgcaactggccaacgcccggcgcatgggctgtgtcctggcgccctacccggcgttgctcgaactggaggggcgctgcctggcgctcgaagccttccagcgcgccagccccgagcgccagcccgactacctgccggactga

SEQ ID NO: 357152 - DNA, 834 bp, Pseudomonas aeruginosa
atgaccgtgaagatttcccagactgccgatgtccagcgcttcttcgaagaggccagcggccagctcaacgaacgcggcgatccgcgcaccaaggccctggtgcggcgcatcctcgacgacacggcgaagctgatcgaagagatgcaggtcacgcccgacgaattctggaaagcggtggactacctgaaccgcctgggcagccgccaggaagccggcctgctggccgccgggctgggcctggagcattacctggacctgctgctcgacgcccaggacgccgaggccggcctcaccggcggcacgccgcgcaccatcgaagggccgctgtacgtcgccggcgcgccgctgagcgatggcgaggcacggatggacgacggccgcgacgccggcaccgtgatgttcctccagggccgcgtcagcggtcccgacggccagccgctggccggggccatcgtcgatgtctggcacgccaatacccaaggcacctattcctacttcgacagcgacggcccgacccaggaactgctcgaccgcctcggccgccacggccagcggccggcgcacattcacttcttcgtctcggcgcccggccatcgccacctgaccacccagatcaacctggcgggcgaccgctacctgtgggacgacttcgcctatgccacccgcgatgggctgatcggcgacctgcgcttcaacgacgaccccgccgcggcccgcgaccgcggcgtggagggcggacgcttcgccgaactggatttcgacttccagctccagtccagcccggcgcccgccgccgagcgccgcagccagcggccgcgggcattgcaggagtaa

SEQ ID NO: 357153 - DNA, 702 bp, Pseudomonas aeruginosa
atgctgagtttcgacaaggtttccacctactacggcaagatccaggcgctgcacgacgtcagcgtggaagtgaagaagggcgagatcgtcaccctgatcggcgccaacggcgccggcaagtcgaccctgctgatgacgctctgcggctcgccgcaggcggccagcggcagcatccgctacgaaggcgaggaactggtcggcctgccctcctccaccatcatgcgcaagagcatcgcggtggtcccggaaggccgccgggtcttctcccgcctgacggtggaagaaaacctggcgatgggcggcttcttcaccaacaaggacgactaccaggtgcagatggacaaggtgctggaactcttcccgcgcctgaaggaacgctacgaacagcgcgccgggaccatgtccggcggcgaacagcagatgctcgccatcggccgcgcgctgatgagcaagccaaagctgttgctgttggacgaaccttcgctcggcctggcgccgatcatcatccagcagatcttcgagatcatcgagcagctgcgtcgcgaaggcgtcaccgtgttcctcgtcgagcagaacgccaaccaggcgttgaagctcgccgatcgcgcctacgtgctggagaacggccggatcgtcatgcacgacaccggcgccgccctgctgaccaacccgaaggtgcgcgacgcctacctcggcggctga

SEQ ID NO: 357154 - DNA, 1254 bp, Pseudomonas aeruginosa
atgagccagtccctcaagcgcgcgctgttcagcgccctcctcgtgatcctggtgtcctatccgatcctaggcctgaagctgcgcaccgtcggcatcaagctcgaggtcctcggcgccgatgcgcagaccctctggaccatcgccgcggccgccctggccatgttcgtctggcagctgttccgcgaccgcatcccgctcaagctgggtcgcggcgtcggctacaaggtcaacggcagcggcctgaagaacttcctcagcctgccatcgacccagcgctgggcggtcctcgccctggtcgtggtggctttcgtctggccgttcttcgcctcgcgcggggcggtggacatcgccaccctgatcctgatctacgtgatgctcggcatcggcctgaacatcgtggtcggcctggccggcctgctcgatctcggctacgtcggcttctacgcggtaggtgcctacacctacgcgctgctcgccgagtacgccgggttcggcttctggaccgccctgccgatcgccgggatgatggccgcgctgttcggcttcctcctcggcttcccggtgctgcgcctgcgcggcgactacctggcgatcgtgaccctcggcttcggcgagatcatccgcatcctgctgcgcaacatgaccgagatcaccggcggccccaacggcatcggctcgatccccaagccgaccctgttcggcctgaccttcgaacgccgcgcgccggaaggcatgcagaccttccacgagttcttcggcatcgcctacaacaccaactacaaggtcatcctgctctacgtggtggccctgctgctggtgctgctggccctgttcgtgatcaaccggctgatgcgcatgccgatcggtcgcgcctgggaagcgctgcgcgaggacgaagtggcctgccgcgctctcggtctcaacccgaccatcgtcaagctctccgccttcaccatcggcgccagcttcgccggtttcgccggcagcttcttcgccgcccgccagggcctggtgacgcctgagtccttcaccttcatcgagtcggcgatgatccttgcgatcgtcgtgctcggcggcatgggttcgcagctcggcgtgatactcgccgcggtggtgatggtgctgctccaggaaatgcgcgggttcaacgaataccgcatgctgatcttcggcctgaccatgatcgtgatgatgatctggcgtccccagggactgctgccgatgcaacgcccgcacctggagctgaagccatga

SEQ ID NO: 357155 - DNA, 654 bp, Pseudomonas aeruginosa
  misc_feature (33)..(42): n is a, c, g, or t
atgacaattggtgttgtcggtcgtaaatgcggnnnnnnnnnnaaatgcggcatgacccgcattttcaccgaggaaggtgtctctattccggttacggtcatcgaggtcgagccgaatcgcgtcacccagttcaagactgaagaaaccgatggctaccgtgcagtgcaagtcaccgccggcgagcgtcgtgcttctcgcgttaccaaagcgcaagctggtcactttgccaaggcgaatgtcgccgccggtcgcggcgtgtgggaattccgtctgggcgaagagcagtatgccgctggtgaccagatcactgtcgatctgttccaggcaggccagatggtagacgttaccggcgagtccaagggtaagggcttcgcgggcaccatcaagcgctggaacttccgtggtcaggataacacccacggtaactccgtttcccaccgcgtcccgggttccatcggccagtgccagactcctggtcgagtgttcaagggcaagaaaatgtccggtcatctgggtgcggagcgggtaaccgttcaatccctggagatcgtgcgcgtcgatgctgaacgcaatctgctgctggtcaagggtgccgttcccggcgctaccggcggtgatgtgatcgtgcgtccggcagccaaggctcgcggttaa

SEQ ID NO: 357156 - DNA, 729 bp, Pseudomonas aeruginosa
atgtgtataagagacaggggcgatgccgtcccaggtcaggcgctgcatgtagggcatgggcgcgctgttgtagaggtcggacttgtggtcgacgctcttttgcaggatcgagaacactccggtcggggtctcccggcccttcttgccggagctgagggtgctgaccccgatggcgataccgttgcggtagatgtaggccttctgttcggtaaggctgaccacgatggtcactggtccctgcggggaaacctccgggtaccagaggtactcgccgggcttcatgctcttcagccgcgccttgatgtcggccggcggcaaaggcgcgttcgctgggctggcgggcgccgcgtggaggctgccgacggcgaaggccagcagcagtacggcaagggatcttttcattggcgctttctcttgctccatgcgggaaaggctgtcgctccgacagatgccattcagcttagcgtcgctcgcgacggccggccaaacccctgcggtccggcctctttcggtggacaggcggcgggcggcggggtttcacaccgaacagatttcttcagcattcagggggcgccaggcacccggcggcaactgcgggtcgagacaaatatcgcccatgcgctcgcggtgcaggcgcagcaccttgttgtcgaagtggccgaacatgcgcttgacctggtgatagcggccttcgtgcagggtcaggttcgagctgcgcggggagggtga

SEQ ID NO: 357157 - DNA, 138 bp, Pseudomonas aeruginosa
atgatcgcaaccaccttgatgatcgcgaaccagaactcggcttcgccgaaggccttgacgttggccaggttgatcgcgttgacgacgacgaagaacaacgccgccgtggcccaggtcggcacctccggccaccagtag

SEQ ID NO: 357158 - DNA, 315 bp, Pseudomonas aeruginosa
atggaagcgcaggccgcccttgtaggggccgatggcgctgctcatctgcacccggtagccacggttgacccgtacccggccctggtcgtcgacccagggtacgcggaacaggatcgcccgctcgggttcgacgatgcgttcgatgatgccggcttccaggtagtgcgggttggcctcgaggaacggccagagggaacgcagcacctcttccaccgcctggtggaattcgggctgatcgggatcgcgccgcttcaggcgctcgaggaaagcgtcgacggattgcgtcatttttctcaccggtttctagttttgtga

SEQ ID NO: 357159 - DNA, 423 bp, Pseudomonas aeruginosa
atgggcctcgacctcgccacgccgcgccgggccgaaggcgctctgccgggccgccggtgcggcgttgtcgacgctggcgacgaacggcaggcgtacccgcagtcggcgtcgctggccgcgaggcagagcctggaggacctgagcgctgccgtcttcgaccttctcgacctcggccaggccgaccaccagtggccagcccaggcgctcggcgaggaggaagggcagcatcccggagccttccccggtttccgcctggctgccggtgagcaccagttgcgcgcgggagtcgcgcaggtgctcggccagtgcgggcagggcgtcggcgccggccggctgttccagcacggacaagcgttccaggcccatgccgagatagccgcgcagcgcctcggcgtgcgggtcgccggcgtgcagcacctgtag

SEQ ID NO: 357160 - DNA, 492 bp, Pseudomonas aeruginosa
atgagcagtcgccgagagctgttccgccgcctcggcgggcacccgccgacgcgtcgcccgccgtggaccgccgccgacttcgccgcaggctgcacaggctgcgccgcctgcgtcgaggcctgcccggaaggcgtgctgaagctcggcgccggtcggctcgtcgaactcgacctctccagcgccggctgcacgctgtgcggggaatgcgccagccgctgcgaggccggcctgttcgatggcgcgcgcccggccttcccctggatcgccacgatcggcgaagcctgcctggccctggccgggatccactgccgcagttgccaggacgcctgcgaacccgccgcgatccgcttccgcccggcccctggcggcgtcgccctggccgagctggacagccagcgctgcaacggctgcggcgcctgcctggcgccctgtccgagccaggccatccaactgcgcgcgctatccaccaaggagtctccacgacatgcctga

SEQ ID NO: 357161 - DNA, 1299 bp, Pseudomonas aeruginosa
atggcctggaagatccgcttctacagcgggctgaaccagggcgccgaagtctcgctcggagagggccgggtggcgcttggcagcgatccgttgcaggccgacctggtgttgctcgacgagggcatcgcggcagtccacctggtgctcgaggtcgatgcccagggcgtgcgcctgctggaatgggcggagggctgcgagcctcgccaggacggccaggcgcaagtcgccggagcgatcctgcaggcgcttgccgggcagacctgcggcccgctgcgctgggcattctgcgacccgcagcggagttttcccgagcgtttccccgaagccgaggtgcagaccgcgccagtgcgccgcaagtcgtccgcccgtgccggcggggcctggctgctcggcgtcagcctggcgctggcgctgtgtctgctgggcatgctcgtcgaaccctggtcggcccgccagcacggcatggccggcgaggagcccctggcgaaggtgcgcgcctacctgcgcgagcagggcatgagcgaggtggatgtgcagcgccagggcgacagtctcctgctcggcggctacctggaggacaacgcccggcgcctggcgctacagcgctacctcgatggcagcggcgtggactaccgactggaagcacggagcatggaagacattcgccagggcgtggatttcatcctgcagaaattcggctatcggcagatcctcagcagcaacgcggacaagcctggctgggtccggctcaacggcgaactggcggaacaggacgaacgctgggcgcggatcgacgcattgctggagtccgaggtgccgggcctgctcggggtggaaaaccaggtccgggtggccggctcgcacctgcgccgcctcgagcgcctgctggcggacgccggcctcgaccggcaactgagtttccgcgagcgcggcgaacgcatcgagttgagcggcacgctcgacgaggtccagctcagcgccttctaccgcctgcagcgcgagttccagcaggaattcggcaaccgcccgagcctggagctgctcagtcgcggcaagcgcgccagcggcgacgaactggagttcacgattcgctcggtgtcgctggggcgggtgccctatgtagtgctcggcgacggccagaaatacccggtgggcgcctcgacatcccgcggtgtgcgaatcctcgccatcgagccggagtcgatcctggtggcccgcggcaagcagcgtttcatcatcaatctcaaaggggaggtgctccatgatgacagccttggaaacgcgactgtcggtcgctga

SEQ ID NO: 357162 - DNA, 357 bp, Pseudomonas aeruginosa
atgaagtacacgtcggacgcgaggaactggtggcccagcagcttttccagggcggaaatccaggcgctgacgttgagcgccgcgaccaccccgaggaccccgccgaccagcgtgccgatcaccccgatcaccgtgccctggaccatgaaggtagccatgatctgccccggcgtggcgccgagggtacgaaggatggcgatgtccgacttcttgtcggtgaccaccatcaccagggtggaaatgatgttgaacgcggcgaccgcgacgatcagcagcagcaacaggccgatcatggtcttttccatgcggatggcctggtacaggttgccgtggctgcgcgtccagtcgcgggcgtag

SEQ ID NO: 357163 - DNA, 231 bp, Pseudomonas aeruginosa
atggcccaggcggtcggcatcgagcaggctcggtcgttcaggtgccgtggcgaatgcctcgaggaggaagcgccgggcacggccgacggccaggtgacgatcgcgctcgccaagggtgtcgtggaagaagccgggcaggatgtgcttttccttgcgcaggctgccgagacgctcgaagaagcgctcctgcggcgcacgatggacgacgaagtcggccccggaaatcagtag

SEQ ID NO: 357164 - DNA, 876 bp, Pseudomonas aeruginosa
atgaaccctccgcaaccacgcctcatcgataacggcaacggccatccgctggccagccattggtaccggcctgccggggagccgcgcggctatctcctgatcgtcccggcgatgggagtggaacagcgcttctacgcgcccttcgccgcctggctggcagagcgcggctacctggccatcaccttcgactacctgggcatggggcaatcgcgcaacggctcgctgcgcggtctcgaggtcgatgtgctgggctgggcccgtcatgactgcagcgccatgctcgccgccgcgctcgccgagagcgggagcaagcccctgtactggatcggccatagcctgggcggccagatcctgcccttcgtcgaagggcgcgagcgtatcgatagggtcttcagcatcgccagcggcagtggctactggaaggaaaacagcccgcggttgcgcaacaaggtctggttgttctggtacctcgtcgcgcccctgctgacgccgctgctcggctattttcccgggcgccgcctgggcatggtcggcgacctgccgcgcggggtgatcgaacaatggcgacgctggtgcctgcatccgcagtacgccctcgcggatggcgaggccatccgccgcgccttctccgccgtacgcacgcccatcgtgtcgctgtcgttcaccgacgatgaaatgatgtcccgacgcagcatcgagtcgctgctgggcttctaccgcgaagcgccgaaaaccgcctggcgcatcgctcccgaggaaatcggcgcccgccacatcggccatttcggcttcttccggccgcagttcgccgaatcgctatgggcgggctacctgttgcctgagctgggctccggcaacgccctcagccgaggttga

SEQ ID NO: 357165 - DNA, 330 bp, Pseudomonas aeruginosa
gtgatctcgatccacagctcgttgccgcgcacgctcaactggtcggaggcgatcaggtcaccgaaggcatcgcgcacgctgtcggcgatccgctccagcgagtcggcgctggccgcgttgtcgctgggctgctcctcgacgctggtgcgctccggctcggtggtgcgcggccgctcgtcgccgatgggaatcggcttcaacgagcggtcgggctggttgaacaccccggtgagggtctccgagaggatcttgtacttgccctcgttgatcgaggaaatcgaatacatcaccacgaagaaggcgaacaacagggtgatgaaatcggcatag

SEQ ID NO: 357166 - DNA, 654 bp, Pseudomonas aeruginosa
atggaacgcgcaatcccgaccttcccctgccgcgatctggacagcgccagcgccttctaccagtccctcggcttccaccttggcgctcgctatccgacctacgccatcctccagcgcggcgccctggagctgcacctgtcgctgttcgaggcgctcgaaccgaagatcaattgcagcgctgcctacctgcgcctggaggacgcccaggcgctgcatcgccaggccgcggccctcggcctgggcggccaggggattccacgcatcacggccctggcagaccagccctggggcatgcgcgaattcgccctgatcgatcccgatggcaacctgctgcgggtcggccaggagctcgatgcgacgccagagcagcaccgggttcgcctggccagcgccgacgacgtccccgcggtggccgcgctctggcaagccaatgtccgcgaagccggggaaaccctggatgccggcgaccaacaggcgatccaggcactgctcctggccgcctcgcgcaaccgcttgctctggctggcggaggcccagcagcatccccgcggtttcgtcctccgcgcgcaatcggcccttgacgcgccgctgtccaacctgttctggcagggcctgggctgggacgccgactacctgaccttcactcgctactga

SEQ ID NO: 357167 - DNA, 1236 bp, Pseudomonas aeruginosa; identical to SEQ ID NO: 322803

SEQ ID NO: 357168 - DNA, 1389 bp, Pseudomonas aeruginosa
atgaacggtgacgccatccgacaccgccgatgggcgcacgtcgatcttgtcggcggcaatcttccaggtgccgttgaggccattgctggcgagcgtgttcacctgggtgcccagggccacctccaccgcctgcccccggacctcgaccgtgccgccgtgccccggtccgttcagcgcattggcggacaaggcgcctcccaccatgaccttgccgtccgggccgccatcgagcacgatccgcccgttcttgccgcgcagcgaacgggcctcgatggcaccctgggagttcaccaccgtgttgagcagcgcattggcggtcctggccgccatcaggactcgccccccgtcggccttgagcaggccgccgttgcttgccagcgcattggcgaccccggcgtcgacgcggatgtcgagcagcttgttgccgtcgaaattcagcgtcaggtcgctgcccgcgccgagcccgacaccgcccatctgcgccaggaccgtcccgcggttgtcgacctgcgcgcccagcagggcgatgctgccgccttccgccgcggtgatggcgcctccctggttgaggacaccgttggtagagggacccgtgaaacggtatctggaggagttgccgttgaactcggcatccgtgatgtccagcgtggaagccaccaggccgccgacattgacctgggcgccgcgaccgaagagcacgccgttggggttgaccaggaagacctggccgttggcatcgatccggccctggatatcgctggccttggtgccgatcacccgattcagggcaatcgagctactgctcggctggttgaagatcacccgctcgccggcggcaacgctgaaggagtcccagttggcgatcagcttgtcgaccttctggttgaccgacaggctgttgccgcccgacaggtgtatctccccgttcgcgctcccgccgaccaccgttcccccgcttggcagcgcataggccggagccagggccgtggcgcccagcagggccaggacggaggcgatcgccgccttggcgccggcgggcttgccgcgcctgcgactgccttcgctgacgacgttccagcagccctgggatacgttccagaccagtgcatagcatttgttcatgtgcttccttcctccagtgaaaccccgcgacctattcgcagggccgtgctacggcaggagcccaactccccgggccctgccgaactcctacgggtatctctctgccggcgcgtcgccgcgctcgatctggccgtcatcccccaccgcatcgaaatggacccgcgccgcctcgccgggcacggccggcagactcaacggggtaacggcgaaaggcggcaaggtgacgctgccgagggacatggcgaggtcgccctcgcccagctctag

SEQ ID NO: 357169 - DNA, 987 bp, Pseudomonas aeruginosa
atggcgcaacctggcccgcaccgaccgggcgccgcgaaggaacatcgacctcgccgactggaaagccgactggcgcgaactgatcgccgcgctcgacaggttttcccggagccacggctatcgccagccgttcgccgcgcaagggcacgcagccctggaaaacgcctgggcctggggccaggccgcggaaaacgccagtacgctgctgctcaaggccatcgaccggggcctggccggcgccgaactgcgctccatctacctggagaccgccgcgctgtggctggactacagccggctgctcggcgccgcccgcgacagcctgcgcgagcagggcgaggtcgacttcgagacggcgccggccctggcgccgcgcacaggccagtatccgttcgcgctgcaactgctcgccatgggcgtgctgctcgatgcccaggagctcatcccggcgctggtcgaggaggtcctgcagttcgataccgaccgcctgctcgactatctcggcgcggccgccctcggcctgacttccgccagcgaggaaaccttccatccacggccgttcgggcagttgcgggcgttcttcgaagaggcggacggcagcgacgcccaggcgctggcgccttacctgcaaagccagtaccgggagttcttccagctttcccccaaggcgcagaagaagacccgccgcctgaccggcccctacgcctggggctggtgggccatggaggtgtcggcgctgggcgtgctctacggctgggacgatggcgtcctgcgcgcctcgccgcattacctcgccggccgccgctcaggcccgccggcggcgggcgaggaacgcggcggccaggtcgaggctggtgcagagcaggaagtagagcagggcgacgaacaggaagatctccgtcgggtggaccatcacccggttgctcacctgggtggcgacgaaggacagctcgccgacgccgatcacgtaggccagggaagtgtccttga

SEQ ID NO: 357170 - DNA, 384 bp, Pseudomonas aeruginosa
atgcggttgcgcctgatcgcggttggctcgcgcatgcctcgctgggtcgaggaaggctggcaggaatacgtcaagcgcctgccggccgagctgtccctcgaactggtggagatcccgctcaacacccgcggcaagaacgccgacgtggcgcgcctgatccgtcaggaaggcgagggcgaactggatcgctggcgtctcgacgcacgcaccgtgaatctcatggtcggcggcccggaagggctggcgccggaggtctgcgcgcgcagcgagcagcgctggtcgctgtcgccgttgacgctgccgcacccgttggtgcggatcctggtcggcgagcagatctaccgggcctggaccgtattgtccgggcacccctaccacaaatag

SEQ ID NO: 357171 - DNA, 1008 bp, Pseudomonas aeruginosa
atggaaaccgcgcatgggtttgcagcccctgctgtaagcgcgctggcccggggcattcgcgagtactcgctgttccaggcggtcctgctggtcatggatcgcctccgcgagaaatatcccggcctgggagacgaggcgctctacgatcagttggaattccaggccaatcctagcctcggtttcccgggcagcgatgtcgatcgggtggagttcttcgaagagcgcggcatgctgcgggcgcggctgcgtttcaacctgatcggcttgttcggtgccagttcgccgttgccggcgttctacagcgagcaggctttgggcgacagcgaggagggcaatcctacgcggaacttcctcgatctcttccatcaccgcctgcatcggctgctgttgccgatctggcgcaagtaccgctaccgggtgagcttccagagcggcgcgagcgatgcgttctccgctcagttgttcgccctcgtcggattgggcggggaagagatccgcaaggccagggaactgaactggaaacgcctgctgccctacctgggcctgctcagcctgcgggcgcactcggcggccttgatcgagtcggtgctgcgctactacttcaagcatgccgaactggtcgccgagcagtgtatcgaacggcgcgtcgcgatcctcgaagagcagcgcaaccggctcggcctgttcaacagccagcttggcgaagacgcggtgctgggcgaacgggtccgcgaccgcagcggcaagttccgcattcatatccgccagctcgactggcagcgcttccacgagttcctgccgatcggtcccggctaccagccgctttgcgcgctggttcgcttcaccctgcgcgacccgctcgactacgacatccggctggtcttgcgccacgaggaaatccgcgagttccgcatcggcgcgcagaacgcctgccgccttggctggaccagctggctgggccgggagcgcgcggatggcgtggtgacgctgggcagcaagattcattaa

SEQ ID NO: 357172 - DNA, 825 bp, Pseudomonas aeruginosa
atgaatgcccacaacgccgcccttggcggcactccgcagcgcctcaagcgcggtatcccgctggccctgcgcggagtggcgcggcgcttcggcgagcgcgaggtgctcaaggacatcgacctgctggttccggccgggcagttcgtcgctatcgttggccgcagcggctgcggcaagagcaccttgctgcgcctactggccggcctcgaccagcccagccgcggcgagttgctggccggctcggcggcgctggccgaggcccgcgaggacacccggctgatgttccaggactcgcgcctgctgccgtggaagcgggtgatcgacaacgtcggccttggcctgcgcggcgactggcgggcgaaggccctgcaggcgctgcgggcggtcggcctggccgagcgtgccaacgagtggccggcggccctgtccggcgggcagaagcagcgcgtcgcgctggctcgcgcgctgatccacgagccgcgcctgctgttgctcgacgagccgctcggcgcgctcgatgcgctgacccggatcgagatgcagcaactgatcgaaggactctggcgcgaacacggtttcaccgtcctgctggtcacccacgacgtcagcgaggcggtggcggtggccgaccgggtgatcctcatcgaggacggcgagatcggcctcgacctgccggtggaactgccccggccgcgctcgcgtggctcggcgcgactggccgcgctggaagccgaagtgctcaaccgggtgctggcgcagccggagctgccgccgcaacccgagcccgtttcacccctgcccacgcaactgcgctgggcgctctaa

SEQ ID NO: 357173 - DNA, 402 bp, Pseudomonas aeruginosa
gtggaccacgtcgtcgcggctgaccagggtgcggaacgccgcctgcaggtcgtgctggcgcagcacgtggtcgatgcgtgccggccaactgctggtgaccagcgccaagggcacgtccagccaacgcaactggcggatcaccgcggcgacgccgggcagcaggggacagtcggcgccttcctccagcgcatcgacccgttgcttgaggatccgccggcgctccatcggcaggtggccgaacagatagtccagggtgtagccgcccgggcgaccgtgcacgtgatcgcgcaggcagtccgggccgagcgccacgccctgttcgccggcaacccggctccaggccgcggcgatggcttcgcgggagctgatcaggacgccgtccatgtcaaacagaacggctga

SEQ ID NO: 357174 - DNA, 1281 bp, Pseudomonas aeruginosa
atgcacgccatcctcatcgccatcggctcggccggcgacgtatttcccttcatcggcttggcccggaccctgaaattgcgcgggcaccgcgtgagcctctgcaccatcccggtgtttcgcgacgcggtggagcagcacggcatcgcgttcgtcccgctgagcgacgaactgacctaccgccggaccatgggcgatccgcgcctgtgggaccccaagacgtccttcggcgtgctctggcaagccatcgccgggatgatcgagccggtctacgagtacgtctcggcgcagcgccatgacgacatcgtggtggtcggctcgctctgggcgctgggcgcacgcatcgctcacgagaagtacgggattccctacctgtccgcgcaggtctcgccatcgaccttgttgtcggcgcacctgccgccggtacaccccaagttcaacgtgcccgagcagatgccgctggcgatgcgcaagctgctctggcgctgcatcgagcgcttcaagctggatcgcacctgcgcgccggagatcaacgcggtgcgccgcaaggtcggcctggagacgccggtgaagcgcatcttcacccaatggatgcattcgccgcagggcgtggtctgcctgttcccggcctggttcgcgccgccccagcaggattggccgcaacccctgcacatgaccggcttcccgctgttcgacggcagtatcccggggaccccgctcgacgacgaactgcaacgctttctcgatcagggcagccggccgctggtgttcacccagggctcgaccgaacacctgcagggcgacttctacgccatggccctgcgcgcgctggaacgcctcggcgcgcgtgggatcttcctcaccggcgccggccaggaaccgctgcgcggcttgccgaaccacgtgctgcagcgcgcctacgcgccactgggagccttgctgccatcgtgcgccgggctggtccatccgggcggtatcggcgccatgagcctggccttggcggcgggggtgccgcaggtgctgctgccctgcgcccacgaccagttcgacaatgccgaacggctggtccggctcggctgcgggatgcgcctgggcgtgccgttgcgcgagcaggagttgcgcggggcgctgtggcgcttgctcgaggacccggccatggcggcggcctgtcggcgtttcatggaattgtcacaaccgcacagtatcgcttgcggtaaagcggcccaggtggtcgaacgttgtcatagggagggggatgcgcgatggctgaaggctgcgtcctga

SEQ ID NO: 357175 - DNA, 786 bp, Pseudomonas aeruginosa
atggccctggaggcgctcgacggcgtcgctcgcgccgaggtccgggtcgactgcgtgatccagccgcacaaggcacagccgcaggtcgaggtgatgggcaacgtgaagaacatcgtcgcggtggcttccggcaagggcggcgtcggcaagtccaccaccgccgccaacctggccctggccttggcccgcgagggtgcgcgggtgggcatcctcgacgcggacatctacggacccagccagggcatcatgttcggcctgccggaaggcacccggccgaaggtccgtgagcagaagtggttcgagcccctggaggcgcacggggtgcaggtggtggacatgccgccgggcaccggcgacatccagctgaccctggcgcagaaggtgccggtggccggcgcggtgatcgtcaccaccccgcaggacctggcgctgctcgacgcgaagaagggcgtggagatgttccgcaaggtgaacatcccggtgctcggcgtggtggagaacatggcggtgcacatctgctccaactgcggccatgccgagcacctgttcggcgagggcggcggcgagaagctggcggcgcagttcggcgtcgagctgctggcgtccatgccgctgtcgatcgccatccgcacccaggccgacagcggccggccgacggtgatcgccgacccggaaagccaactggcgatgctctaccaggaaatcgcccgccatgtcggcgcgcgcatcgttctcagcgagcgggccagcgtcggcctgccgaacatcagcatcagcgacgactga

SEQ ID NO: 357176 - DNA, 918 bp, Pseudomonas aeruginosa
atgacgctccaggccccttctcgtccagatgaagcgctgaaaggggcctcctccgcaacgaagaacgagggttcatgcgccacgggaatgaactcgcgaagaaaggtcgcttggcgctggcgcgctttgggccgaatatcggggcaaccacaacgtgcgcagcgaggccctcatgtccgactcccttccccagcgcaacggcgggcagatcctggtagaggcattgcggcgcaatgccgtcgataccgtctactgcatccccggggaaagctacctgccggtgctcgacgcgctgtacgacgccgacggcatccgcaccatcgtcacccgccacgagggtgccgcctcgaacatggccgatgcctacggcaagctgaccggccgaccaggcatctgcttcgtcacccgcggccccggtgccacccatgcggcgaatggcgtgcacacggcgcagcaggactcgacgccgatgatcctgttcgtcggccaggtggaaagcgccttcaagggccgcgaggcgttccaggaagtcgactacgtgcagatgttctcgggcctggccaagtgggccgtggaaatcgaccgtatcgaacgcatcccggagatcgtcggccgcgccttcagcgtcgccacctcgggccgaccgggcccggtcgtggtcgccctgcccgaggaaatcctcttcggtttcgcgcaggtcgccgatgcgccggagccaagggtgcttccggggcggccgggcgccacggcgatggcggaactgcgcgaactgctggcgaacgccaggcgccccctgctggtacttggcggcagcggctgggacagtgccgccaggaaacggctaggcgccttcgtcgaggccaatggcctgccggtggccacctcgttccgtcgccaggacctgttcgacaaccgtga

SEQ ID NO: 357177 - DNA, 696 bp, Pseudomonas aeruginosa
  misc_feature (646)..(655): n is a, c, g, or t
gtgtgccttcgccgaggccctggccgacctcgcgccgttgccctcgagcacctggcaggactggcgcgaagccgcccatgccgattacctggcctactcgaccccggccgcgagcgaccccgccgtccagggcgtcgacctggcgtccgtggtcgcgtacctcagcgaaaacctgccggacgacgcggtgatcgccaacggtgccggcaactatgccgtctgggtgcatcgcttctaccgctatcgccaggcccgcacgcagttggcgccgaccaacggcgccatgggctacggcctgcccgccgcgatcgccgccagcctgcgcgatccgcagcgcagcgtggtgtgcttcgccggcgacggctgtttcatgatgtatccgcaggagctggcgaccgccgcgcagttcggcgcgacgccggtggtgatcgtggtcaacaacggcatgctcggcaccatccgcatgcatcaggagcgcgaatatcccgggcgggtatccgccacccgcctggacaaccccgacttcgtcgccctggcgcgagccttcggcgcccacgccgaacgagtggaatgcagcgccgacttccccgccgcgttccgccgcgcccgcgaaagcggacgcccggcgctgctggagctgctgacnnnnnnnnnnggcatcctcagccggcgcggaaggcgatccaggcctggtag

SEQ ID NO: 357178 - DNA, 726 bp, Pseudomonas aeruginosa; identical to SEQ ID NO: 327625

SEQ ID NO: 357179 - DNA, 1206 bp, Pseudomonas aeruginosa
atgaacttcccctggcgcgacggcaaccgcgtagaactgctgatcaacggcgaagagtactttccgcgcctgttccagtgcatcgccgaggcgcgccgggagatcctcctggaaaccttcatcatcttcgaggacgaggtcggccggcagttgcaggaagccctcagcgccgccgccgagcgcggtgtcgaggtgcaggtcacggtggacggctacggcaccgcctcgctcagcccggactacctggccaggctgaccgcctccggggttcgcgtgcacctgttcgacccgcgcccgcgcctgctcggcatgcgcaccaacctgtttcgccggttgcaccgcaagctggtggtgatcgatcgccggcaggccttcgtcggcggcatcaattacggcgaggaccacctggtacgtcgcggcaacatggccaagcaggactacgcggtgcgcgtcgagggcccggtggtgcgcgatatccgccaggcctgcctggcgctgctcgaaccggacgccgactacccgccgttgcggccgtcgggcgccgggcagccggcgcgggtgcgcctggtgatccgcgacaacgaccagtccagcgacgacatcgagcacgagtacctgcaggcgatccgccaggcgcggcgacgcctgctgatcgccaacgcctatttcttccccggctaccgcctgcttcgcgagctgcgcgatgcggcgcgccgcggcgtgcgcgtcgacctggtactacagggcatgccggacatgccgctggtgcgcctgtgcagccggctgctctacgactacctgctgcgcgagggcgtgcgtatccacgaatactgccagcgtccgctgcacggcaaggtcgcggtgatcgacgacgactggtcgaccatcggttcgagcaatctcgatcccctcagcctgtcgctgaacctggaggccaacctggtgatccgcgacgtcgccttcaacggccagctctaccagcacctgcgcgagctggcgcgccgccactgccggcgcatcagccgccgccacgcgaggcgcggctactggtggcgagcgccgctgattttcctcggcttccacttttccaggcactttccggctatcgccggttgggtacccgcccatctgccacgcctgaaatcgctggagccgcgtccgtcgcggcgctggcaggaacgccagggccagcggggcaacccatga

SEQ ID NO: 357180 - DNA, 633 bp, Pseudomonas aeruginosa
atgaacctgcccgccagcgatggcgttgcccacctggaactggccgccggcgtgcataccgaacccgatgatctgattggccagcgcgtcgcccacaacctgctgcgcctgcgcggcaagcgcaatctctcgctggacgccctggcgcggatttccggtgtcagccgggcgatgctggcgcagatcgagtccgggcgcagcgtgccgtcgatcaaggtgctgtgcaagatcgcccagggtctcaaggtgtcggtggcagccttcctcgacgatcgcgccttcgccggtgtcgccgtgctgccggcgcaacagagcaagcgcctggtcagcgccgacggcgccttcaccagccgcgcgctgttccccttcgatgtggcgcgccaggtggagttctacgaactgcgcctgcgcggcctcggccaggaagacgccgaagcccacgcccccggtatccaggagaacctggtggtggcgcagggggtactggaggtgcgggtcaacgaagagcgcttcctgctcgccaccggcgactcgatcctgttctacgccgaccagccgcacagctaccgcaaccccgccgatagcgaagccctggcatacctggtgatgacctacccggagcgcctggactga

SEQ ID NO: 357181 - DNA, 258 bp, Pseudomonas aeruginosa
atgcacctggcggttggtgttggtcacgcagacatcgtcgaggtcgaacagggaaatctcgccgacgccgctgcgggccagcgcttccgccgcccaggaaccgaccccgccgatgccgaccaccgcgacgtggctatcggccaggcgttgcagcccctcgcgaccgtacaaccggccgataccgccgaagcgctgttcatccacctgcatcaccaaccacctctgaaaccgaatcgcggattgccgcgcgcattataa

SEQ ID NO: 357182 - DNA, 1005 bp, Pseudomonas aeruginosa
  misc_feature (5)..(14): n is a, c, g, or t
atggnnnnnnnnnntggtctggatggtttcctccgccaggtggtcgagcttgaggaacaccgggccattgccgccttcgagttcctggtggaactcccacatcatctgcccgctccagtagtcgcattcgatgaagcgctcacccctggcgttggcggtatagccacccagcgggccggtgacgtaggcacaggccgggccgttgtagtccttgatcagcgggttgatctggaagcattccaggttggccagctcggcgccggcatgataggccatggcgtagccgtcgccggcgttggtcgggttctcgtaggtacccatcaggtagcccgaggacggcaggcccaggcggcccgccgcgccgcagcaaaggatcaccgccttggcgcggatcacatggaagtcgccgctgcggcagtcgaaaccgagtacgccgttcaccgcgccctcggcatcggtgagcaggcgggtgcagaccaggcggttggcgatggggatccgcgcacgcttgagctggcggtagagcaccttcttgatgtcgtgcccttccggcatcggcagcacataggcgcccatgtggtggaccttcttcaccgcatagtcgccggtctcgtccttttcgaacctgacgccccagcgatccagctgccgcagggtctcgaagctgtggctggcataggcgtataccgccgcctggttgacgatgccgtcgttggccacggtgatttcccgggtgtactgctcggccgtggcgtggccggggacgatggcgttgttcaacccgtccatgcccatgctgatggcgccgctgcgcttgacgttggccttgtccaccagcagcacgcgcagttcgcggtcgtgctccttggccttgatcgccgccatcggcccggcggtgccgccgccgatcaccacgatgtcgtattcctgctccagggtgttcatgcccgctctcccttctgccgatcgatgcgcaggcgatactggaaagcgtcgccgcggtag

SEQ ID NO: 357183 - DNA, 414 bp, Pseudomonas aeruginosa
atgcgcctgggattgccagccctcgccgcggggctgctggccctgcgcttcctggcggaattgccgtcggtcggctggctgctgggcatggccgccgccggactgttgctgctgttcggccggctgtactggctggggttgttcctgctcgggttcgcctgggcctgcggctcggcgcaagtcgccctggacggacgcctggccgccgagctggatcatcccggcttcgaaggacaggcgggtacgggtcgaagccttctcgaagaccatgcccaggacccggctcttcagcggctcgtagagcacgcctcggttgcgcaggtccttcagctcgctgccgcggcggatcagaccgatcagctcttcggggctgtaatccataaacgagagaaagtgccgtacgctcatcgctga

SEQ ID NO: 357184 - DNA, 1164 bp, Pseudomonas aeruginosa
gtgctggaaagcgtgccgtcgctgatccagggcatgctcgccgaagagcgccaggccctcgacggcctgcgctggatgctgcccaccggcgaggcgatgccgccggaactggcgcgccagtggctcaagcgctacccgcggatcggcctggtgaatgcctacgggccggcggaatgctccgacgacgtggcgttcttccgcgtcgacctggcctccaccgagagcacctacctgccgatcggcagtcccaccgacaacaaccgcctgtacctgctcggcgccggcgccgacgacgccttcgaactggtgccgctgggcgcggtgggcgagctgtgcgtggccggcaccggcgtcggtcgtggctacgtcggcgatccgctgcgcaccgcccaggccttcgtcccgcatccgttcggcgcgccgggcgagcgcctgtaccgtaccggcgacctggcgcggcggcgcgccgacggactgctggaatatgtcgggcggatcgaccaccaggtgaagatccgcggcttccgcatcgagctgggcgagatcgaggcgcgcctgcacgaacgcgccgacgtccgcgaggcggcggtggcggtgcaggaaggggcgaacggcaagtacctggtgggctacctggttcccggcgagacaccgcgttccagcgccgattcgccggccggactgatggtggagcagggcgcctggttcgagtggatcaagcagcaactgcgcgccgacctgccggactacatggtgccgctgcactggctggtgctggaccggatgccgctcaacgccaacggcaagctcgaccgcaaggcgctgccggcgctggacatcggccagatgcagaaccaggcctaccaggccccgcgcaacgaactggaggaaaccctggcgcggatctgggccgaggtgctgaaggtcgagcgggtcggggtgttcgacaacttcttcgaactcggcgggcattcgctgctggccacccagatcgcctcgcgggtgcagaaggccctgcaacgcaacgtgccgctacgggcgatgttcgaatgcaccacggtggaagagctggccagctacatcgagtccctggccccgagcgagatcagcgagcagaaggccgagcgcctgaacgacctgatgtcgaagctggaaatgctctga

SEQ ID NO: 357185 - DNA, 807 bp, Pseudomonas aeruginosa
ttgcagcacgcgcgggtcgagcgtgacccagccgctgctgctgttggtcaggcgcacggccgtgacccactggtcttccagacgccacgacgcgagcgcgaccgcgcgcaccggcagcgtcggcatcagcgtgccgaggtcgaggtcacggcgcaggttcacccgcatgacgccaggcagcgactccacagtgcgcagcggcgcgtagaggttctgcgcggcgaagcgcgtcaggacgaccggaaccggggtttcgcgccgggtcgcccgcgtacctgcttggtcctgggcgcgtgccggggcctcatcggcaccgcctggctgatcgccgtagcgcgcaggggtgctgctgccctcgacgatgcgcaccggctccagctcggcttcgccgtctttgggcggctcggccgcaatgtcgagcaggatcagcgcgcccgtgtcggcgtcctgcaattgcagccgcgtgggctcgatcggctcgctggcgcgcaggtacaccgcgccacctgcgctctgcacgcgcaggcgttcgcccacgcctgcgggcacgcccacgcggacgttccggtcgatgaacacgatgcgctcctggccgaccttcagcggcaccgccagcggcatgcgttcccaccgcagaatctccacagcatgggagacgggtgccgcggccacggccagcagccccagcagcacgagtacaggatgcttcatggggtgtttcctccttggggcgcttgcggagacaggccgccaggtgccgggcgagtcggctccggtgcgctgatgcgctggggcgcgccgtcgtag

SEQ ID NO: 357186 - DNA, 255 bp, Pseudomonas aeruginosa
atggtggtaccggaggtggcggtactggcggtggcggcgatggcggcacaggcggtggtggtgatggtggcggcgatggcggcacaggtggcggtggtgatggtggcggcacgcctggaacgggtggcggcgatggtgatggcggcggaacgggtggtggcactggcggcggtgacggctcaggggagggcggtggtaccggtggtggaactggcctggaaggcggctgtaaggacgatagttgcgcgttcgtga

SEQ ID NO: 357187 - DNA, 624 bp, Pseudomonas aeruginosa
  misc_feature (564)..(573): n is a, c, g, or t
atgacgctgtctagggcaaggccaaatctcgagggctttattacacaggaacaagtgttttttcagtcgttaccaatttcaacaccgtgggcgtcaccggtgtggggcgtcggaagttggttgccacaacggaataaccaacatgctcttaccttcgaaacgcatcggcaagccctcgagaagacaggctatcccgccccgcctaagggaccactcccctgcaatttccaagattttagcaaggccttgatcgtgtatctgcaacgcatccggaacctgaagttttcgatggtcgcggcctacaatattgccgtccgacggctttacaatcccttgtttgaacgatgcgtatccgaccccacacagttgacgcgaggcgattttgatcgagtcgtaggatttctccgcgaaagtggttacaagaacttttacgacgcgatctctcaccttcaagtagtagcggatacgatcgatagtctgcaaataaccgagatcgccatccactttgagcatgatgcaaaaccagaaaagcgccgtcacgattacatttcattgcacgatccnnnnnnnnnngatttacgctgttttaccgcacgatcaggatcgtgcggtaaaacagcgtaa

SEQ ID NO: 357188 - DNA, 354 bp, Pseudomonas aeruginosa
atgatccagggcggcggtttcgagccgggcatgaagcagaagcccactcgcgcaccgatcaagaacgaagccaacaacggcctgaccaacaaggtcggcagcatcgccatggctcgtaccatggacccgcattcggccagcgcgcagttcttcatcaacgtcgccgacaacgatttcctcaaccataccgcccccaccacccagggctggggctatgccgtcttcggcgaagtggtcgagggcatggacgtggtcaacaagatcaagggcgtggccaccaccatgcgcagcggccaccaggacgtgccggccgaggacgtgatcatcgagaaggccgaaatcgtcgaagaatga

SEQ ID NO: 357189 - DNA, 990 bp, Pseudomonas aeruginosa
atggagggctggaagacgactttggataatcataggcctgtcttgcgggagagcgcccatgaacgatccgatccgtcgcggtacgctggaaatgacttcggccatgctgatctgcggcaccattggctggctggtgctgctctccgggcagcccgtgctggacgtggtgttctggcgctgcgtattcggtttcgccacgctgctggtcgcctgtgccgcgctgggcttcctgcgccgcggcagcctggggcgcgaggcgttcctgctggcgctcctcagcggggtgttcatcgtcggcaactgggtgttgctgttcgcatcctactcacgggcttcgatcgccatcggtaccgcggtctacaacgtccagccgttcatgctggtggggctaggcgcggcgtttctcggcgagaaggtcacggcgcgcaagctgggctggctggggctttcgttcgccggcatgctggcgatcgtcaacgcccacggcgacagcgacgccccgcgcggggactacctgttcggtatcctcctggcgctcgctgccgcgctgctgtatgcctttgccgcgctgatcgtgaagcgcctgcaaggcacgccgccgcatcttatcgccttgatccaggtgggcaccggcgtgctgatgctcgcaccgctggcgaaccttgccgaactgccccggcacgttgctccctgggccagcctggcgaccctgggaatcgtccataccgggctgatgtacgtactgctctacggcgccattcagaaattgccgacggcgctgaccggtgccttgtccttcatctatccggtcgcggcgatcctggtggactggctggtcttcgaacatcgcctgagcctggcccagtggcttggcgtggctgccatcctgctcgccgcggcgggcatgcagcagggttggaggaaaaagccccgcgacgaggcggggcttttctacggcgatctcggccgatcagttgccgaagaccttga

SEQ ID NO: 357190 - DNA, 1038 bp, Pseudomonas aeruginosa; identical to SEQ ID NO: 324301

SEQ ID NO: 357191 - DNA, 1119 bp, Pseudomonas aeruginosa
atgcgcaagctgatcttcctgatcctcatcaccctcttcgccgcctacgccggctgggccgaacgccgcccggtaggccactacctgtccgacctgcgcagccaggtcagcgtggtccagggccagcccggcgagcgcggcaatctgctggcggtccagccggaactgttcacgccggactaccagagcgccgaacggttgcaactgaaattccacgcctacctggaaaatgcccgccgccagggcctgctcaacgagcgcacggtggtggtgttccccgagcatgtcggcacctggctggtggccagcggcgagaagcccgaggtctacgccgctgccgactggcccacggcgatggactggatggccgcgagcaacccactgaaggtggcgcgcggctggatcaccgcgcgcggcgatcagcgtctcaccgacaccctgttccggatgaaggcggtggacatggcccacgactaccagaccctgttcggcgggctcgcccatgatttcaaggtgacggtggtcgccggctccatcgtcctgcccgaccccgaggtcgaggacggcgagctgcgtcccggcaccggccagctgtacaacgtcagcctgaccttcggtcccgatggccggccgctcggccagccgcaacgcaaggtgttcccgacccgccacgaactgagctacctcaacaacggtcgcggcgagcgcctgcaggtgctggatacgccggcaggacgcctgggcgtgctgatcggcaccgacagctggtacccggacacctacgccaccctggtcgaacagcgcgtcgaactgctggcgatccccgccgccctgaaccagagcggtcgctggcagcagccctggcccggcttcgatgcggagctggttcccggcgacgtacgcctggcgccgaacagcctgagcaacgccgaggcctggcagcgcctggcggtcggcgagcgcctgctggccagcggtgcgcgcggcgccgccgtggccttcgcccatagccgcctgtggaacgtcaccgaagacggccaaagcctgctcggttcgtcgcagggcatgcgccaggccaatcccggcggcggtgcgcaactggtcaatctctggctatga

SEQ ID NO: 357192 - DNA, 825 bp, Pseudomonas aeruginosa; identical to SEQ ID NO: 327611

SEQ ID NO: 357193 - DNA, 561 bp, Pseudomonas aeruginosa; identical to SEQ ID NO: 241798

SEQ ID NO: 357194 - DNA, 1887 bp, Pseudomonas aeruginosa
gtgccgcacccgccccggctcggcatcggccgcttccaggctgtaggcgaacgggaagcgtccggcgaggtactggttgaagtagtcggcgaggtccttccaggcctgcgccgcctgctgctgttgcaacgactggcagcgcccgagcgcgccctggcgcaggtccaccaggcgcgtcgccaggtcgctgcggctggacggcaggagcacgccgttgagaatgtcggcgcaactgccgatgtccatctggttgaaatcgttacccaccagcttcgccaactgcgccgcggtgctcgccgggttgtcggccttgaatttctgcagttcggcgttgagcgcgctgaagcgcacgaacgcgttgtagtcggcggtggccaggctggattgctgcgcctgcaaccactccagcgccggggcgtggcgttcggcgacggccgccatggcattgaactggctgttcaggctttgcttcagctcggcactgtcctgggcgcggaacatctgcaggccgaaattcggcgcgcccgaccagcggctgaaatcgaccggctcgcgcagcaccgcctgctcgtcgatgtcgcgcagggcctggccgatatcggccacggccagcgcgttgaggctgagcagcaggcgcgcgccggcctgcaggtcctgcaactccagcagcgccgcctgcaacacctggacctgcttgacctgcacgtcgaaacgcgaggcattgcgactggccaggctacgactgcgcggcccgaggctttgccacatggcctcggtcgccgcgctggcggcggcgtgcaggaccgaatagcgatagcgcgggttgagcgatggcagggtgctctcgtagtagccggtgaagtcgttgaagaagctcaacgcctgagtcacgccgatatcgtcgatgctcagcaaggagtggtccgccagtgtcttgtccgccagggccacggagacgaagtccttggtcttcaggtcatcgatggcgcgtttcagaccgagcaggtcatcggccagcttgagcgtcgccccctgtttcaccagcaggccgtcgccggcagcctccggaggcgcgatccattcgctgcgaaactgctgctgcaactgcacggtgaggttctgcagttcctccacgcggtttcccagcaagctgctttgctgggcgctcttgagcaggttctggtagccagggacgagatcctggccgacgccattgccccagatcaggttgatgcggttgacctgttgctgcaggtggttgatcaattcgccgatccccagcaactgggccgccgtggcgtctcgttcctggccgagctgcgcgagttcctgggtcagggcattgccggtgcgttccaggctgtcggtgaggaagtaggcgttcagccagcgtgccatcaggtcatggaagttatccgccgccgtggcggcgacccggcccaggtcgagggcggcgagatcggccggacgctcggcgaacagcgtgcggttgtaataggccaggcgcgccaggctgccggcgttgtagctgctgcccaaggcatcgttactcagttgcagaaggtcgtcgagcggcgtcctgcggttgtcgatggcctgggcgaacaagcgattgtggcgctccagcgtagtggcgcgggcgaccaggtccttcgccgccaggtagtccttccactggctggggtcgtcgccctccttcaggccgggttggccatcgctgcggatcgcccgcaggtcgctcgcctcgccttccagcaggctgcgcagcggtcgcaccagcaggcgctcggaaacgcggcgatacgcgttgtcgatacgtgcatccagggaggaaaaccaggaactgggaaacgccagcgaagtgaagcgccagcgcggcgcctgtga

SEQ ID NO: 357195 - DNA, 768 bp, Pseudomonas aeruginosa
atgcggagcaggcgccatgagcggcgcgacgctgttcatgctggttctcctcctggtgctgctggcgctgctgctgggggcgctgggctggtggtggcggacccggggcggtacggagatccgcagcttctacgcggcggtccggcagatggagcgcgagcagggctggcagggccgctacgaagcgccctggctgctgatgctcggcaacgagaccgagggcgagcagttgtgcgccacctggcgcctgctgccggtggcgcgtccggcctggttcggccgctggtggtcggacggcgagggggcgatcctgctggtgcccgagtcggtgttcctgcccgacgagggcctgcgccggcaaagcggcgcctggctgcgcctgttgcgtctgttcctgcgcctgcgcggcaggcgcgcgctggacggggtggtctggaacattccgctggcgcggttgcaggatggcgagcaggcggccaacctcggcctcgccgcgcgccgtcgctacgtggaactgacccagcgccttggcctgagcctgccggtttacgtggtgatcactggcctggaagacctgccgggtttccaggaacttctcgcggcgctgcccgaggaggcgcgcgagcgcgccctcggctggtcctcgccgttcgccgccgaagcggcctggcagtcgcgctggtgcgagcaggcgctggaggaaatcaccgccaccctgaccgagtcgatcgtcgaactcggtaccttgcgcggccaggtggacaatga

SEQ ID NO: 357196 - DNA, 1332 bp, Pseudomonas aeruginosa
atgagtgttctgcctgacgcggtgtgctggcacgaagggatgcaactgcttccccagcatttccagttgcagggattgcgtgccgaggcgctggcggcgcgcatcggacaggcctgcaacccttggttctggggagtgaccgccctggaactggacccctctgcgttgtgcgccggccaagtgcgggtcctgcacctcgaagcgatcctgcccgacggcctgccggtgagcgtgcaggctggtgtcgacgcgccgctggagttcgatctggagacagcgctggcggccgccgaagggccgctgctgaacgtccacctggcggtcagtccgctgtggcgggcgggtcagttgctgccgctgaagggccgtctgcaatcgcgggtcggcgcgccgctgccggacctggccagcggcgagcaccccgagccgatcaccgtctggcgagcgtcgctgcggctggtcggcgacgacggcaaggccgactccgtgtgcctgccgttgctgcgcgtggcgaaggagggcggcgcctacgtcagcctgccctacgttccgccgacgccactgatcctgccggagtcgcccctgggcagacgcgtgcagtcgctctgcgcgcgggcccgggagaaggcgctgttcctcggcgggcgcctgcgcctggcgcagcaggcgggcaaccaggacgacgcggtggaaatccgtcgccagcttgccgcgctctggacccgcctgccggaggtcgaaggcctgctggcaagccgtgcggcctcgccgctggccctgcacggcagcctgctgggcctggccggtgcctgggcggcgctcgatccgctggccggcgtgccggccttcgaagcgctcgacttcctcgacctgcggcgtggctacgagccgctgctggactggttggagcgcgccatcgagtcgatccgcgcgggctaccgctgcctgccgttcgagcaggaggaacaggtattttccgtgcgcctgcccgatccggcgccgcgtcagcgcctggtggtcggcctgcggatgcccgccggcgccggcgaacaggcggcggctgactggctggagcgcgccatcgtcgcctccgacccgcacctgccgttgctcgcccggcaacgcatgagcggactggcgcggcagccgatgaatcgccaggaacaggtggcctacagcgttggcgacgacacccgtttgttcgtcgtgcagggtgccggcgactggttcgatgccggccagccgctgcgcatcgtcgcgccggtcagcgggggcgccagcagtccctggcagatcgtgctgttcgtcgccgacggcagcgacaacacctag

SEQ ID NO: 357197 - DNA, 237 bp, Pseudomonas aeruginosa
gtggtggcgcacgtcggcgaggatgcctggcgcggctggcgcaatggcctggaaatccgcctgcgactcgatccgcaacacttcgtcggcgccagcggcgtgctgttctccgccgtgctggcgcagttcttctcgctgtatgccaccgccaaccgcttcgtgcgcacggtcctggtggaagccgacaaggaggtgaagacatggcaaccccaggccggctcgccgctctccctctga

SEQ ID NO: 357198 - DNA, 690 bp, Pseudomonas aeruginosa; identical to SEQ ID NO: 241781

SEQ ID NO: 357199 - DNA, 375 bp, Pseudomonas aeruginosa
atgaacgcccaccacaccggcaccttcgccgactggttgttgatggtgctgaaagattgcgaccagccggtattcgagggctgcggcacactgacctggcattgcgccgagcgcgagctgtcgtactggatggtgttgaggtccacgtcgatgaacgggatgcccgcgaacatcaccaccacgatggcgacgaagacccggttctcgatgcgggcggcgctcagcacgcctttattgccctcgtcggcgccttctgcacgggccttcaaccactcctgcacgatgatcgccacgaaaggcagcgcgaagacgccgctggataccagcacggcccagatgccgttgttgacgatccaggacaccagcgtaaggtaa

SEQ ID NO: 357200 - DNA, 897 bp, Pseudomonas aeruginosa
atggttgccgccacgcagggtcaggctgccgagcggatccccggcgcgatccagttcgatgaccacccgcgactcgtcggaaagcaccagcaggtgatcgctggccttgtcgtagtagaggctcgacagatcggtgaggaacaacccgcgatcgcgctgcgggtcgccgccgacgctcaggtcgagcgcctcgccgcggtcgttgaagaagccgtttacctcgatgatgcccaccggcgccttttcccgggccacgaacaggcgctcgcgcagcgggtcgtaggccaacccctcgaagcccttgttgcgcttgtttgcactgcccagggagaacttccgggcgttgcgcggatcgtcgatgtcgatcacccgggtgtcggcgtcaacatggatctccaccaggcgttggcgacgctcctcggcgaccacgtagacgccgggccggatgtactcgatagcctccggatcctggaaaccgcgcagggggatgcgtcgcagcaattcgccgtccagcgacagctcgaggaaatgcgggtcctggttggtcacgctgaccaggctgcgccggctggggtcgaaggacagcgccgacacgttggactccgcgcccagcacgcgggcttcgatatcgactcgatagtcggccaggcgcagggcgttctcgcgcgcaacatcgccgccgtagcgctgctccagcttgaaccagattcgctcgaacgcgcgctgctgctggcccgccaccagcagcgcaagcaacgcggcgagcaggcaagccagcagcgtcctgtaggtcatcagccgactcatcgttacgactcctccgagaaacacagtgttcggcgaagcagaacagagccatccgcgccctttcatgaggcgccgattaaatctttctga

SEQ ID NO: 357201 - DNA, 1533 bp, Pseudomonas aeruginosa
atgagcgagccatcgatcgttctcatcggtatcgtcggtaccggtgccatgggccagggcatcgcccagctcgctgcctgtgccgggctgtcggtgctgctctacgacagccgccagggggcggcgctgcaagcgcgcgagcagatcgccacggtccttgcccggcaggtggagcggggccggctggaggcggaggctgtcgagcgcgcgatgggcaatctgcgggtggtcgaggacttgcggatcctgcgcggctgccagttggtgatcgaggcgatcgtcgagaacctggaggccaagcaggcgttgttccgccaattggaagaggtggtcggcgacgaagcgatcctcgccagcaatacctcctcgctgtcggttaccgcgatcgcctcggcctgtcgcgatcctggccgggtcgccggtctgcacttcttcaatccggtgccgctgatgcgtctggtggaggtgatcgagggtctcgccacccgcaccggcatcgccgagcgactgtgcgccctggtggcgaccttcggccaccaggcggtgcgtaccacggacagccccggcttcatcgtcaaccatgccggacgggccttcggcaccgaggcgctgcgtatcctcggcgagggcgtggcgccggtggcggcgatcgacgaagtcctgcgcgagggcgccggcttccgcatgggcccgttcgagctgttcgacctggtcgggttggacgtcagcctgccggtgatggagtcgatctaccggcagtactacgaggagccgcgttatcgtccgcatcccttgctgcgccagatgctcgccgccggccgcctggggcgcaagagcggccagggcttctaccgctacgacggcgctgggcaggtgcccgtcgccgccccggcggttgcgccaggcgcggcgttgccgccggtgtggctgggcgtcgacgacgaacatgaccgcgcgccattgctgacgttgctacaacgtctgggcgccgaggtggagagcggcgagcgtccttccggggcggcgttgtgcctgcttgcgccgctgggcgccgacgtcagcgccgcagcgcggcggttcgccgtcgatccgacgcgcagcctggccatcgacgtgctgtcggacctggagcgacaccgctgcctgatggcctgcccggcgacccgagcggagctgcagcaggcggctcgcaccctgttcgcacgggacggcgtgggcgtcacgctgattcgcgacagcgccgggttcatcgtccagcgcaccctcgcctcgatcgtcaatctcgcctgcgacatcgcccagcagggtatcgcttcggtggagcacatcgacctggcggtgcgcctcggtctcggctatccgctggggccgctggagtggggcgaccgaatgggtgccgggcgcgtgctgcgcatcctcgaacgcctgcatgcgctcagcggcgacccgcgctatcgccccagcccctggctgcgccggcgcgcccaactgggcctttccctgcgccagccggacagcccgttggcctcctga

SEQ ID NO: 357202 - DNA, 303 bp, Pseudomonas aeruginosa
atgctgtttaccggttgcacggtaagggcgctggaggccctggccatagggttggtcagcgaggtggcggcggatggccaggcattggatcgcgccctcgaactggctcgccagatcgccggcctgccgccgctggcgctggcgcagatcaaggaagtggtcctggccggcgccgacctgccgctggaccaggccctggcgctggagcgcaaggccttccagttgctgttcgacagccacgaccagaaggagggcatgcgtgccttcctggaaaaacgcacagcggagtacctgggaaaatga

SEQ ID NO: 357203 - DNA, 327 bp, Pseudomonas aeruginosa
atgctgctgggcggaaaccgccagggcgcggacctcgcggccgtccaccgcggcttcttccagggccatgcgtaccgcgctggccatggcttccagccagtccgccgggtcctgctcgcggcgtccgtcgcggccttccggcgggcgctgcgcggcgctgcccaggcccagcgtgcggccgctgccggcgtcgagcagcagcgccttgctaccctgggtgccgcaatcgatgccgaggaacaatccgtgcatgcggccctccggagtcattcgccgagtacctggcgcagggtttcgctgacgccgtgtcggcgcaggctgtcgtag

SEQ ID NO: 357204 - DNA, 630 bp, Pseudomonas aeruginosa; identical to SEQ ID NO: 335262

SEQ ID NO: 357205 - DNA, 840 bp, Pseudomonas aeruginosa
atgaactggatcagcgccctggccgagttgcagcgtagcggcgaaccttgcgtcctggtgaccatcatcgaggaacgcggctcgaccccgcgcaacgccggctcgaagatggtggtcagcgccgagcggctctacgacaccatcggcggcggccacctggaatacagggcccaggccattgcccgggaaatgctcgccgcgcggacccaggacacccgcctggagcgcttcagcctgggcgccagtctcggccagtgctgcggcggcgccacggtgctgctgttcgagccgatgggccagccgcaggcacacatcgccgtgttcggcgcgggccacgtcggtcgcgccctggtacccttgctcgccagcctgccctgccgggtgcgctggatcgattcgcgggaacacgaatttcccgcgctcctgcccgacggcgtggagaaagtggtgaacgacgaagtgctcgacgaggtcgagcggatgccgcccggcagccacttcatcgtcatgacccacaatcacccgctggacctggagcttaccgcggcgatcctggcgcgcaacgacttcgcctacttcggcctgatcggctcgaagaccaagcgcgtcaagttcgagcaccgcctgcgcgaacgtggcgtcgacgccgaacgcctgcaacggatgcgctgcccgatgggcctggagcaggtgaaaggcaagctgccggcggagatcgccatctccatcgccggcgaggtgatcgccacctacaacgccgccttcggcctggaacgcaagcaggggccgtcgagcgtcacccggctgaccccggagtcgcgccgcgcccacgaatcctga

SEQ ID NO: 357206 - DNA, 567 bp, Pseudomonas aeruginosa
  misc_feature (505)..(514): n is a, c, g, or t
atgaaagctcgtctgcatcacattgctataaccaacttcaaggctttccgcgatttccaactcagtctggaaggccgtcacctgttggtctatggtgccaatggtgcgggtaagtcttcactgtattgggcgctttacacctttcttcaaagcgctaaaaagccaaggaatggaatcgccaagtacttcgatcctggaacacaggaaaacttgctcaatatccatgagcaaaaagaagaacagccaaaatccggcgagattgcactaaccctgcgcgaggaggcaacccgcaacgacaccacttacagaatcagccagagcaatcatggcaccttcaatcagcccactatcctaaagggtgatctggcgagtgacttcatcacttaccgtttcttctttggcttctcgcactttcgtaattcacaggccttcgacctttggccgctgttcgagaaagaaattttaccgttctgtgtttctaccagtggcggtaaccctttgcagnnnnnnnnnngcaatgccaaaccctcgtggattgagtggtgttgcagggacaagtgcctatga

SEQ ID NO: 357207 - DNA, 1932 bp, Pseudomonas aeruginosa
atgcctgccagttccatgagccgccacgcgcggcaagtgctgaccgtcgcccagggcaagatcccgccgggcggccctgcgaccgatccgtccatcgcccgctcctggctgcgctgcctggaacagcaccatctcgatcccggccagccgatggcgccgatggtgctggagcacgcgcgcatgctcgaacgccgcgagcgcctgcaacaggtgctggagatcgccgatggcgagatgcacagcctctaccagcagctttccggcaacgaccacgcggtactgctcaccgatgcccgcggggtgatcctcaattgcgtcaacgccgacgcccagcgccagaccttcgaacacgccggcctctggctcggcgccgactggagcgagccctgcgaaggcaccaacggcatcggcacctgcgtggtcgagcggcaggccctgaccatccagcaggaagagcacttccgtagccgccataccggcctgacctgctcggcgagcccggtgttcgatccgcagggcgagctgatggcggtgctcgacgtgtcttcggcgcgccaggaagtctcgcggcagagccagttccacaccatggcgctggtcaacctgtcggcgaagatcatcgagggctgctatttcctccgtcgcttcgagggctcctggctactgcgcttccatgtccagggcgactatgtcggcctgttcagcgaagggctgctggccttcgaggaagacgggcggatccgcgcggtgaaccagagcgcgctgaacctgctcggttgtccgcgccagcgcctgctcggccagccggtggagaccttcttcgattgccgtctcgacgacctgctcggtcgcgcctcgccgcaacccagcgccagctggccgctgcgcacccgcgagggacggaccctgtacgccatgctgcgcggcgcgccgcgggcgataccccaggccctggcggtgcccacggcagcgaagccggcgcctgccgcgcccggcctgtgcctgggcgacgccgagctggccgccgatttccgccgggcgctgaaggtctacgcgcgcgacgtgccgctgctgctcaacggcgagaccggttccggcaaggaggccttcgccaaggccgtgcacctggccggcccgcgcgcggaacaggcgttcgtcgcgctgaactgcgcggcgatcccggaaaccctgatcgagagcgaactgttcggttatcgcggcggcagcttcaccggcgcgcgcaaggagggcatgcgcggcaagttgcagcaggccgacggcggcaccctgttcctcgacgagatcggcgacatgccgctggccttgcagacccgcctgctgcgggtgctggaagagcgccgggtagtaccgctgggcggcgagccggaggatgtcgacgtgcgcctgatcagcgctacccaccgcgacctggccgggctggtcgccgatggacgcttccgcgaggatctctactaccgcctcaatggcatggtcgtgagcctgccgccgctgcgcgagcgcagcgaccgcgaggagttgctggactacctgctggccgaggaagccaggggccagcgcatccagctcgacggcgaggttcgccagggcctgctggcctaccgctggccgggcaacgtccggcagatgcgcacggtgctgcggaccctggtggcactctgcgaggacggccgggtcggcctgcgcgacctgcccgcggatatccgccaggccctggcggcgctgccgcccgccgcagcggcgcccgccccggccgcgggcaacagcctggacgacgccgagcgagccgcgttgctggcggcgctggacggccagcgctggcacgtgagccgggtggccgagcaactggggatcagccgcaacaccctgtatcgcaagctgcgccggcacggcctggtgcgcggccaggcctga

SEQ ID NO: 357208 - DNA, 807 bp, Pseudomonas aeruginosa
gtgcgattcgagaatgtcctggggcgtcgccaccatggtcagacacatcgtcgtgtcctcgggcatctgatcgaacagcgtgttgatcgcatcgcccttgcgggtttcgccagtcaggtgtcccgttccgggcggcatgcgcagccggtcagtgaccaacacacggtgcggtatgccgtcgaagtgccaggtgccatgctccacgtccgagcgtggctggctgaagaaaagccgctggctaaaatcccgcccgctcgccagttcgatctcgccagcctcggtgtcggcggggtagcgcgcgaacgcatagaagcgctcccggtcctcgaccccaggcccgagcagcgtcggacgcgggttgaaccagcgcagcagccagtcatggacgtctgccgcacccaggcggcgagcctggatgccggcgttcgccagcccgccgcacaggcggtcgcagacgatgttcagcatctgctcgggtgtctggccccggcggtttgcctggccctgtccttgtccggtcacgcggcgatagacgaccatgcgcacacgcctcgtctggccgcgccagcgcaagcgtgtgaccaccgtgtcctggaacaagccaccgggcttggccaccgcgcgcagatggtgggcaaagaaccgcaggtagaactccgtgaacaccgtgccacgggcgcgcggctgcacgtagtcgcgcaacgtctgcatgtactggtcgaagctcggttcgtcctgggcgtagagctgcaacacccaggggttctcgtccagttcatcgaagctgtcctggagcgcgttttctaa

SEQ ID NO: 357209 - DNA, 729 bp, Pseudomonas aeruginosa
atgctccagcgcggcttccagataacgccgaccgagcttcttcatgttggcgaagacttcaatcagttcgtcgctggtcaggttgaagctgctgatatcgccggacgtcaccggagcaaagcccacctcggcgaatcccagctcgttgaacaggtgatcccagatggtttcgacgtcggtaacgccggttgtcaacgtcacccgcgccccgaccggacgactgttgtaacgcgacagcagcatttcggccttgcgccgcaccacgtcataggtgccctgcccgcccacagtgatgcggttgcggtcatgcacggttttgggtccgtcgatactgaccgagagcccgaaacggtgggcattcagatagtccacggtctcttcggtgagcagcgtggcgttggtggtcatgacgaattcgacgaacttgccggcctcgcggaaacgcttctcgcagtaatcgaccatgtactcgatcagcttgcggttgctcaacggttcgccaccaaaaaacaccacggtaaaacgctcttcatccggcgattcacgcaggagcatttccaccgaggcgatcgcggtttcgacgtccatcttcttgccggcggacggcttgtcgaggtcttccttgtagcagtaggtgcagctcaggttgcagccggtgttgacgttgagtaccacggtgttgatcgccgtgcgctcgacccgtttgatcgcgatgtccggcgtcaatga

SEQ ID NO: 357210 - DNA, 1200 bp, Pseudomonas aeruginosa; identical to SEQ ID NO: 324715

SEQ ID NO: 357211 - DNA, 1074 bp, Pseudomonas aeruginosa; identical to SEQ ID NO: 324716

SEQ ID NO: 357212 - DNA, 438 bp, Pseudomonas aeruginosa
gtggcgcgtgactggatgtgcaccctgaacaggcccggcgcgcgcttcggccggttggcgggggtcaaggcgatgaccgacgtcaccggtttcggcctgctcggccacctggtggaaatggccgacggcagcaagctcaccgcacgcgtggagtacgccgcggtaccgcgcctggccagtgccgaatattatctggagcagggctgcgtgcctggcggcaccctgcgcaacttcgacagctatggcgagcgcatcgcgccactgccggaagtgcagaagctgttgctttgcgatccgcagaccagcggcggcctgctggtggcggtggctccggaaggcgaggcggagttcctcgccgtggcggcggaactcggcctgcaactggcgccgatcggcgagctggtcgagcgacagagtctcgcggtacaggtgctgtaa

SEQ ID NO: 357213 - DNA, 129 bp, Pseudomonas aeruginosa
atgcaccaggaacaccggttcgagcggcacctcaacgccctcggcccgatcacccatgtacgcctgaacatctttcccgacggcggcgtcagccgcctgcgcctgttcggcaggccacaattaccgtga

SEQ ID NO: 357214 - DNA, 846 bp, Pseudomonas aeruginosa
gtggccgccctggagcgccagtacggcttcgacaagccgccgctgcaacggctctggctgatgctgtcgagctacgcccggctggatttcggcgagagcttctaccgcgacgcgcgggtcatcgacctgatcgccgagaagctgccggtctcgctgtccctgggcttgtgggcgacactgatcacctacctggtgtcgattcccctgggggtggccaaggcggtgcgccacggcagcgccttcgacctgtggagcagcgcgctggtggtgatcggctatgcggtgcccggcttcctcttcgccatcgtcctgatcgtgctgttcgccggcggcagctacctggactggttccccctgcgcggcctggcttccgagggcgccgagcgcctcggcccgctggcgcgcttcgccgattacctctggcacctggcgctgccggtgggttcgctggtggtcggcggtttcgccagcctgaccctgctgaccaagaacagcttcctcgacgagatatccaggcagtacgtcgccaccgctcgcgccaaagggctcagcgagcgccgggtgctctacggccatgtgttccgcaacgccatgttgctggtggtggccgggctgccggcggcgctggtctcggtgttcttcaccgggtcgctgctgatcgaggtgctgttctccctcgacggcctcggcctgatgggctacgaagcggcgctcggccgcgactacccggtggtgttcggcagcctgttcatcttcaccctgctcgggttgctggtgaagctggccggcgacctggcctacagcctggtcgacccgcgcatcgacttcgccgcgaggaaacagtga

SEQ ID NO: 357215 - DNA, 639 bp, Pseudomonas aeruginosa
atgatcgttgctctgctcaaccagaaagggggcgtcggcaagaccacgctcgccacccacatcgccggcgaactggcaatgcgtggccagcacgtcgtgctgctggacgccgacccgcagggttcatcgctggactggacgcagcgtagaagccagcaaggcttgccacggctgttcagtgccgtgggcctcgcacgcgaaacgctgcatcaggaagcgccagagcttgccaggcgggccgatcacgtcgtcatcgacggcccgccgcgcatcgccgccttggcgcgctccgcgctgctggcggccgagcgcgtgctgatcccggtgcagcccagtccctacgacttatgggccagcgccgagatggtggcgctgatccgcgaggcgcaggtgttccggcctgcgctgcgcgcggccttcgtcatcaaccggcgcatcagtaccaccgtgatcgggcgcgaagcgcgccaggcgctggccgaccagccgcttcctgcgctgcgcgcggaagtgcatcagcgcatcgtgttcgccgacagcgtggccgctggccggcttgcacgcgagacggcaccggtcagcgccgccgcgcgcgaaatcaccgccctggtggacgaactgctgcggtggacgacatga

SEQ ID NO: 357216 - DNA, 435 bp, Pseudomonas aeruginosa
atgagcgtcgagaaggtcccctcgaagaacaaggtgatcatcggccagatccacagcaagtcgccacagaccgacgacggcgaacctctggtgaagctgcagtactactacaagcccgaggaaggcctcggccgggtcgaggcactggtacgcaaccacccggacgattcctatagccgcaacgtgtcgatcctcgagcaggtacgcctgggcgagcgcttcaactacagcctgcgcgtcacctccagcggcgagttggcggtgcgcgcgcgcagccaggacggcgaagaggacgcttactaccagaccctcggcagcgcctggaacgaccagttgctctatttcaaggccggcgcctacgtgaacgacaacgccggcgacagcggcgaaggcagccgcgtgaccatctaccacctgaacaccgcccatcgctga

SEQ ID NO: 357217 - DNA, 1236 bp, Pseudomonas aeruginosa
atgaccgacgaaaccgcacccaaggatcttcgtgaccaggcgccccggctactcccggcacgcctcatcgagaacgacgcccaggcgttgcaggccgcccacgaggtagccggactggcccgtcgcgaagcggcgctacgcgaccgcgaacgacgcctgccctggcaggaactggaactcttcacccgcctcggcctgggcggcatcggcattccccgcgcccatggcggcgcgcaggtttcccatgtgaccctggccgaggtgttccgtgtcatctgtgccgccgacccggccctcggacagattccgcagaaccagttcggcctgctcagcgtgatcgacaacgtcgccagcccggcgcagaaacgcaagctgttccgtggcatcctcgacggccgccggctggccaacgccggcccggagcgcaatacccgccacaccctggagctgaaggcgcgggtccgtcgcgacggcgacggctaccgggtcagcggcgagaagttctactccaccggagccttgttcgcccactgggtggcggtcaaggccatcgacgaggaagaacgcgcggtgatgctcttcgtcgagcgcggcgctcccggcctgcgcatcgtcgacgactggtccggcttcggccagcgcaccaccgccagcggcacggtactgctggacgaggttccggtagccggcgacatgctgatccacaacggcctgctggccgagatcccgagcctccagggcgccgtctcgcaactgatccaggccgccatcgacgccggcatcgcccaggcggcgctggacgacgcccaggctttcgtccgcgaacgcagccggccctggatcgacgcccaggtcgaacgcgccagcgatgagctctacagcatcgccgaggtcggccgcctgcaaatcgagctgcacgccgccaacgccctgctggagaaggccggccaggtcctcgacgaagtggccgcgcggccggtggacgccgagtcggcggcacgcgcctcgatcgccgtggccgaggccaaggtgctgagcaccgagatcagcctggccgccagcgagaagctcttcgagctggccggcagccgtgccacgctcgccgagttcaacctcgaccggcactggcgcaacgcccgcacccataccctgcacgacccggtgcgctggaaagtccacgcggtcggcgactactacctgaacggcgcccgtccggcgcgtcactcatggatctga

SEQ ID NO: 357218 - DNA, 711 bp, Pseudomonas aeruginosa
  misc_feature (102)..(111): n is a, c, g, or t
atgctcaggattaaatctttagattcttcaagaaatatctcatcactactaaatattggtagcaccagctgtctatctgagtgctcttctaatgccagctcnnnnnnnnnncgaaggcgagtagatatctcgctatctgctttgaatgctgcctctatccgtagcgatgctcctagtgcgtcaacatatttcttcaaagaagaaatctgcacatcacctcgggcttcaattttggaaatagctgcctggcctacgccaagctttcgagccatctgtagctgggtcaatccgactgcttcacgaaggcttttgagtgaccgtccgacgacccttccggcgtcgtggtcttcgtcatacacggctgcgatcacttgtgctgttttaggcatttcatcctccatgcgcgcgcggacactaccaacagtggacattcccttcaaggaatatttccctgtctcgacatgcttgtcgatgccttcccttccctttgtgggttctcacgctatccctgaccccctattccttcgggcgtaccagcgcctagctacttcctgggtaatcgctatcccgcgtttggactggccaagtttcgatttgcctcgtcatagtctgggctggtctgcccgctttcaggggcgatgttgcccgtcaccagccaaagcgcgtactgcggaaaaatctgtatcaccgcctcgatctcggcgtcggtga

SEQ ID NO: 357219 - DNA, 1212 bp, Pseudomonas aeruginosa
atgctccttgaggctgcggttgcgcccgccgcgcacatagaaatgcacgatcaccgagagattgacgaaggtgaaggccaccagggcgccgaaattgatcagcgcggtcgccgtcaccaggtcgaaggagatcgccgagagcgccaccatgcccacgatgagcacgttgatcgacggcgtacgccatttcggatggacgaagccgaagatccgctccggcagcacgttgtcccgccccatcacgtacagcaggcgcgacacgctggcctgggaggccaggcccgacgccagggtattgatgaaggtggcgcagaggaagatcgactggaacagcttgccgccgacgtacagggcgatttccggcagcgccgcgtcgggttccttgaagcgtacgttggtcgggaaataggactgcaggaaatacgacacggtgatgaagatcaccccgccgtacagcgcggtgaggaagatcgcccgcgggatcaccctgccggcgtcgcgggtttcctcggacagcgtagtcaccgcgtcgaaaccgaggaaggaaaagcagaggatcgtcgcccccgccaccatcgccgagagatgcgcgtgctcggagaagaacggctgggtactgagcaccgtggcggtcccctccccgttgttcaggccgtgaatcaccaggccgatgaagaccacgatgatcgccagctggaccagcacgaagacggtgttgaaattggcgaccaggttcacgctcttgatgttgatgagggtcatgatcagcacgaacatcaccacccagatccacggggcgacctcggggaacaatgcggtcaggtagatcttcgccagcagtgcgttgatcatcggcaggaacaggtagtccagcagcgacgaccagccgaccatgaagccgacatggggattgatcgctcgttgcgcgtaggtataggccgagcctgcggtggggaactggcggaccagcttgccgtagctgatcgcggtgaacagcacgccggcgagggccagcaggtaggcggtgggcacgtgtccctgggaaatcccggatacgatgccgaaggtgtcgaagacggtcatcggggtcaggtaggccaacccgatcatgacgatctgccacagcttgagggacttgcgaagctgggttcgttctgcggtggggggaggattcgacatgggtatgcttgcctcgatttcttctttttctaa

SEQ ID NO: 357220 - DNA, 1008 bp, Pseudomonas aeruginosa
atgacggtcttattgctgattactgcggccagatctggaattaacactacgccgcttctggaaatgtctagagatgcactccagccgcatccattcatccccaatcttcggctcttgaacaccgtaaaaagacgcggcaagggtgctcagagcaaaaccattcgacaaactgaactgcatgacggatataacccaattcctttagatggggtggctgttgtaaataaggctttggcaatttctgagccactggttgggtttgcgcctgaaaagcttaagtcgcatgtttggctttaccgcgccggacagaatgggcatggtcatagggtagtcgcgctggcttccagtacgctatttcaatcaacaaagagtatctgtgcgcggcatgctttgaaggacgatcagggccaaccgctgatcgttaatctcagtcgtcttcgaaagactatggaaagtaggctttggaagctcagcggcggcgacctactggaggtgtccgctgtgatgggccattcccctagcgttgctgataaccactatttgaagataaatgacgagatcaaggttgagggtgccaccttcgtaggggaagcattcaccgatcagctgcgtggcatcaacgtcacaccgacacccccaggaggttgcaaagatagcctctatggaagcctggcacccaaagatggcgttacccattgttccgagttcattcattgcttgacatgtcctagttacgcaattgtagggactctcggagacttgtatcgactgttcagctatcagcagtttttgcacgctgagatggagtattttttaacagatgagtgggcggcatggcggaaacgccagggcgatttcatcaggcttattgacgagtttacgtctcgaaaattcaagattgaactgatcgaagcggctaaagccaaagcgaaagcgtcccctcatccgttctggggatgcaagattgagtttatgaggaaagttcgaggtgacgctcttgtcggctaa

SEQ ID NO: 357221 - DNA, 270 bp, Pseudomonas aeruginosa
atgtgtataagagacagattcgaagtcgagcgtcgtcccttcatccagctcatgacggagctcaccaacttcaccatggcagacgaaagtcgcgtgaagctggccctggatgtcgcggtggccaacggcgatatccaggcagtggacaaggaaggcaagagcaggcggcgcaaaggcacgagcatcaagtccaccgatatcctgatcgcgccgccgcagaagacgtttttcttctttccccaacagaagaagacgtccagggacacatga

SEQ ID NO: 357222 - DNA, 744 bp, Pseudomonas aeruginosa
gtggagaaggggtatactttctacgccgatcctttctttagtgcggacggtaagctgatacgtctcgaagccttgaatgctagcaacggtctgggtgaaatcattgaattgaaggcccagagtcttgacttttcacgtgtgatcttgaaggggaatcatttttcctatccctattcgttcgaggcgtctggtgtcgaatatctgataccggaagtcgcctctcattccgctccctgtcttctgcctcctcctttcgctctggagagcaagaagctattccagggaatggagggtgagcggattctggatggcacgcttttcgaacacgggggcaggtactacctgttctgcggccaggcggtatcaggttcggacaacctttatctttatgtcggcgagagcctggaaggaccctacacttcccatccctgtaaccctgtggtgatgaatcccggctccgcacgaatgggcgggcgtatcttcaaggagggaggaaagctttaccggttcggtcagaacaactcctatggttatggaagcagtctggccgtaaacgaaatcgaggtgctcgatccagagcattattcggagaagcgtgtagcaaacctggcgttccaggacgcacgcggtccgcataccatcgacattcatgggcaaaccatgatcctcgatttctaccaggacagattttcgcttctggcggggtatcgccgtttggtggccaggctgctcagcaagggctga

SEQ ID NO: 357223 - DNA, 528 bp, Pseudomonas aeruginosa
atggatggaattgacctggaactcgctcggcaagccgataccggcgagcactccgcccggctgcacatgcatggcatggcgcggcgcgtactgaacctcgagcggctggtcggccggctcgcggtggtccatgaaggttccgacctcgtgcaccttctggtgcaggctgccgccgaaagccacgttcatttcctggaaaccgcggcagatgccgaggaccggaatgccggcgtcgatggcggcgcggaccagcggcagcgtggtggcgtcgcggtcggagtcgtggagggtgccgggctcgctcgccggtccactataatgacggggctcgacgttcgacggcgagccagtgaagagcaagccgtcgacgctgtccagcagggctgcctggtcgatcgaatcgcccagcgcaggaatgatcagcgggagaccgccagcgccgttgacgacggcacgcagatatttgtcgccggcaatgtggtagggatgaagaccgatctgcttggtgcaggcggtgacgccgattaa

SEQ ID NO: 357224 - DNA, 144 bp, Pseudomonas aeruginosa
atggtcgccttcatcggtctggtgatctgggcctacagcggcaaacgcaagaagagcttcgacgaagcgacgatgctgcccttcgcagacgatcccgaagccaaaaagcacgtcgagcaagcttctaggagtaacaaagaatga

SEQ ID NO: 357225 - DNA, 693 bp, Pseudomonas aeruginosa
atgagtcgcttcaagaacgagatcgcccacctgcaggcgcacatcaagaccttgcgcctgggcgcgggcgcgctggtcattgtcgccctggtcatgggcggcggctggtggagcgcgccgcgcgacctgaccatccacgtcccgcccgacctgcgctctggcagtacccgcaagtggtgggaagtgccgcccgaatcggtctatgcgttcacgttctacgtgttccagacgctgaaccgctggccgaccaatggcgaagaagactactcgcgcaacctccacacgctctcgccgtacctcaccccgtcctgccaggccttccttcgcgcggactacgactaccgccgctccaccggcgagctacgccagcgcgtgcgcggcatctacgagattcccggccgcggctatggcgacgaccccacggcgcgcgtgcgcaccgtgtccgatcgcgactgggtggtgacgctggacatcacggcggacgagtactacggcgccgagcaggtcaagcgcgccctggtgcgttatccgatcaaggtcacgcgggtggacgtcgatcccgcccgcaacccgttcggcctggcgctggactgctacgaaggcgcgccccagcgcatcagtgcaccggagccggcgcgcccggcgtcgagtggcctgtctccgcaagcgcctcaaggaggaaacaccccatga

SEQ ID NO: 357226 - DNA, 639 bp, Pseudomonas aeruginosa
atggtcgacacgacgagcaatcgaattcgcggcgatccccctacgatgcagccatattgcatcatcgacatccagaattctgggcgccttggtaagaaactcaagagttggaattgtcgagagaagctctcgttgaaggatcacaacgtcacttccgtaagagccgattacctgaggaaggcggtgaagcagttctctcagcaaccaaagcgggcgatccagtcgacgaggcggaggataggcagagaccagcgcttccgacatatgcatgtcgatacctcgcgtgccaagcccttcgagcagagccttcacgcgaaatctcgaactgggaacggatctaccttgggtaaaagcccgaacccgcactgctgggagctccgctatcatgatttacccctccttgattcctggacacgcctgtccaacgggagatcgcagtgctctgggcactccccaccaaaccgggacccatcccctccaaacagaaagcaagtcggcatactgcttatcatcgaattagcttgctcttcaggaaagtacgcatgccagatacatcaagagcaatcattgccgccaaatagacccctccccccaagacaactttcacaaccaggccaaaaaaagcactctccaaactga

SEQ ID NO: 357227 - DNA, 180 bp, Pseudomonas aeruginosa
gtggtcgatctgccggcgagcggcgagggcgtcacgcgcttccggctggaggaggtccgcggtgcgcggggcgtgcttcttcccgagcgtctgcgcctgagctggcgcggcgcgccgccgctgatgggcggcgaacgctggcgcctggcggtgaccctgaaacgccccgcggcctggtga

SEQ ID NO: 357228 - DNA, 354 bp, Pseudomonas aeruginosa
atgccagtgggacaaggcacgcgccggtggacgcagcgactgctgcgcggcccccaggtgcgtgtcctgcgacggccagaggccttgcagccggccgacttcatcggcgaactgctctggctccatcgtcacgcggaagaaatgctccggctcggccggactggcggggacgatgtacggcaggaacggccattcgctcggcagttcctcggcttcgacttcaccaagcccgatctgcagcagcagattgcgcacggccttgagaccatcgggtgccagctcgcgctggcgcaccctgcggccgaagatcaccacctgcttgaactgcgtttccaccgctcggtagatgcgtag

SEQ ID NO: 357229 - DNA, 360 bp, Pseudomonas aeruginosa; identical to SEQ ID NO: 335749

SEQ ID NO: 357230 - DNA, 531 bp, Pseudomonas aeruginosa
gtggcccgcgaaggcctgggcggcccccgcgccgacggcaaggccctggccgcaggcgacagcctcggctggctggccgatggcgcgcgaccgcgcgcgctgcccctgcccagcgaacggatcatggactgcaccggcgaagcgcgcctggagctgatcctcggcgcgcagatcggcgacttcccggccatgagcctgttcgatgcgttcaacggcgactggcaggtggatacccgcgccgaccgcatgggcgtacgtctgctcggcccgcgcctggaatgccggcagcagtcgatgatttccgaaggcatcgccctcggcgcggtgcaggtgccgccggacggtcagccgatcgtcctgctcaacgaccgccagaccatcggcggctacccccgtctcggcgccctcgccccgctggcgctggcgcgcctggcgcaatgcctgccaggccagcgggtgcggctgctgccgacggtgcaggaggcggcgcaccgcgagcatcgacgcgtgctggcggcctgggacgcatag

SEQ ID NO: 357231 - DNA, 327 bp, Pseudomonas aeruginosa
atgcgcggcgcgccgcgcatgccggcgccgctgctggaacgcctcgacgcccaggcggaacgcaacgccgagcgcatccgccagtggatcgacgaaggcctgctggcgccgctggatccgtaccacctgctgctcaacctgtgggcgatgaccgagtcctatgcccttggcggctggcaactggcgcgcctcaccggccaggccgggctggacgcaagcgactaccggcaggcggcggaaaacatcgtccgcctggtctgcgccggctgcctggcactccccggcgaggccgcgccgcgtcggcgtttccgcgcgctggccggctga

SEQ ID NO: 357232 - DNA, 261 bp, Pseudomonas aeruginosa
gtgctggatctgcatacccggcgggtgatcggctgggtgttctcggccaagccggatgccgaactggtgatcaaggccctggacatggcctacgaacagcgcggcaagccacagcaggtgctgttccattcagaccagggcagccagtacgccagccgcctgtttcggcaacggctctggcgctatcggatgcagcagagcatgagtcgccggggcattgctgggataactcgccgatggagcgcctgttccgcagtctga

SEQ ID NO: 357233 - DNA, 195 bp, Pseudomonas aeruginosa; identical to SEQ ID NO: 327396

SEQ ID NO: 357234 - DNA, 258 bp, Pseudomonas aeruginosa
atggaaactgtagttggactgactgctatcgccgttgctctgctgattggcctgggtgccctgggtaccgccatcggtttcggtctgctgggtggcaagttcctggaaggcgcagctcgtcagcctgaaatggttccgatgctgcagttgaaaatgttcatcgtcgccggcctgctggacgccgtgaccatgatcggtgtgggtatcgccctgttcttcaccttcgcgaatcccttcgttggtcaaatcgccggctaa

SEQ ID NO: 357235 - DNA, 1047 bp, Pseudomonas aeruginosa
ttgcgaagcgccgttggcgcccatcggatacatcaggtgggcggcgtcgccgagcagggtgatgcgtccccggccccagtgcggcagcggatcgcggtctaccatcgggtactgcaggatcaactggttgcgggtcagcaggtcgcggatgtcgaaccagcccaggtcccagtcggcgaagaacggcagcacgtcctccaggcgcccgtcgcggttccagtcggcctcgttgtcgagctggccgacggcggcgctcggcaccatgcacacccagttcaccagcgacttgccttcggccgcgtgacgcgccgagatcggataggcgaccaggcgcgaccagtgctcgtcgttggcgacgatcatggtcttgccgtcgaggaagcggtcgaactcggtgacgccgcgccacatggtgatcccaccgtgggacagcggcccctggtcgggatgcaggtgcgcgcggaccgccgaatggatgccgtcggcgccgaccagcacatcggcaccgagcgcctggggcttgccgtgtccgtcgcgggcgccgatcagcacgcggccgtcgcgctcctcgatacgctccacgccgagaccggtgcgtaccgcctgttggccgaggcgctcgcgcaccgcggcgagcaggatcatctgcagttcgccgcgatggatcgagtactgcggataggcgttgccggcttccaccccgcgcggctcggaccataccgtggcgccgctctggtcgatgtagcgcagctcgtgggtggggatggcggtggccgccagagccgggccgagacccagttcggcgagggcctcgaccgccgccggctggatattgatgccgacgccaagggggcgtatctcgctgctgctttccagcagcgtgaccttgccgatgccggcctggtgcagggccagggcgcaactgaggccgccgatgccggcgccggcgatgaggatatcgatgggttcgctcatgggtgcttccttttctcgagtgttcgaatcgatgggggttcggctgggatggatgaccgtttaccgcgatga

SEQ ID NO: 357236 - DNA, 195 bp, Pseudomonas aeruginosa
atgatgtacggcaatgcctttctcgagcatccctaccagctcaaagtctggactaatctcagactgcaaaaagcgctgaaccagagcaatttcttccgggacttttggaagcgcctccatttcggaggaaagctttcttgcaatattccatacatcaggaatcttctgcgctacagcgatactagttcctcttga

SEQ ID NO: 357237 - DNA, 528 bp, Pseudomonas aeruginosa
atgggagtccccgatctcaccttcaatttcagctttcggaacaagagcagctacggagtcgacgacaataacgttgaccgcacccgaacgagtcagaatgtctacgatctcaagtgcctgttcgccagtgtcaggctgcgagcacagaagatcatcgatattcacaccaagtttggcggcatagattggatcaagggcgtgctcagcatcgacgaatgcacaggtcaaaccttgacgctgagcttcagcaatgacggaaagagtcagggtagttttaccggaagactctgggccgtagatttcaacaatacgaccacgcggcagaccgcccacgcccagagcgatgtcaaggcccagagaaccggtcgagacaacatcgatatccattgtgcggtcggagccgagccgcatgatggcacccttaccaaactgcttctcgatctgagaaagagccatttccaacgctttgttttttgcctgatccattctcgtcgaccactcaaattaggattaatcgaatattgctga

SEQ ID NO: 357238 - DNA, 882 bp, Pseudomonas aeruginosa
gtgcggctgaagtacgccttcatcaacaagcactcgacggattacccagtgcgtcgcctttgccaaaccctcaaggtgcatcccagcggctactacgcttggctggccgagcctcaatctgcccgagccaaagaagatcagcgcctgcttggcttgatcaagcaggcctggttagaaagcggcggcgtgtatggctatcgcaagattcacgatgacctgcgagagctaggagagatctgtgggcgaaatcgagtcggtcgcttgatgcaggcagaggggctgcgttcgcaaacgggctatcgtcgtcgtactgggttttatggcggaaaaccaaaagcggcatcgcccaaccatctggccaggcagttcaaggtcagtgagccgaataaggtctgggtgaccgatatcacctacatccgcacctacgaagggtggctgtatctggcggtagtgctggatctgttctctcgccaagtcattggttggtcaatgaagaccaggatgagcagcgacctagccatcgacgccatgctgatggccgtgtggcgacgcaagccacagcagcaagtgatgattcactcagaccaaggcagtcagttcagtagctcagattggcaaagcttcctgaaagccaacaatgtgatcagcagcatgagccgacggggaaactgtcacgacaatgccgtagccgagagctttttccagcttttgaagcgggagcgaatccgacgaaagatctacgcaacgcgtgacgaagcccgaagtgatattttcgattacatcgagatgttctataaccccaagcgtcgacacagcagtgctatgcagctgtctccagtagagtatgagaaacgctattttctgagcttggagagtgtctag

SEQ ID NO: 357239 - DNA, 279 bp, Pseudomonas aeruginosa
atgagtcgtcagcgttaccctgaagaattcaagatcgaagcggtcaagcaagtgaccgagaaaggcaaacctgtcgccgaggtcgcccagcgcctgggcatgtccgtgcacagcctttacgcctggatcaaggtctacagcaagccccaagagcagcgtcagcaagacaatgatcagcaggctgaactgcgcaagctgcgcgctgaactcaagcgggtgacagaagagcgagacatattaaagaaggccgccgcgtactttgccaaggagtgcggctga

SEQ ID NO: 357240 - DNA, 294 bp, Pseudomonas aeruginosa
gtggcggttcccgccagtggccgggctccctcgctggaagatggcttcaagacgctgtacccgctggacgtgctcgcttccgccggattacgcccgcggggtccgctcggcggccaccggcaagccagcctgctgcgcctggacatgggcaggaactaccagtactggtacggcctgccgaacttctacgtgatcacccgctacaaccacagcacccactacgcgatggccgtctgggaactgggcaaggaagtcgaccgggtgcgtcaccgctccgtcgtcaggcaggattag

SEQ ID NO: 357241 - DNA, 1326 bp, Pseudomonas aeruginosa
atggccgagatacgacgcccgctgtccgcggtggaacgctggtactggctcagcgaccagttctccgcgctgaacgtgatttcccgggtgcgggtccatggccggttgtccatcgacgacctgcgccgcggcctcgacgcgctgcaggcgcggcatccgctgctgcgcgcgcggatcgagcacgatgccgggctcgatccgcgctgggtgccctgcgagcggcccatcccgctgcgcgaggtgcgcggcggcggcgaggagcaatggctgcgggaaatcaacgagcgcgaattgccggaacgcatcgatccggacagcgggccactgatccgtaccgtggcgatcgccaccgacgccggcgcccacgacctgctggtcgtggtaccgcacatcatcgccgacggcactacagtgctgaccctcgccgaacaatggctgaccctggccgccgaccccgccgcgcaaccctggaccgccagcgccctgccgccggcggaggatctgcgtccgcgccgcttcaccggcgacgaaggcgcggcgcgcctggccgagcagaccgcccaggacgaagcgctggtcggccgccaccgcccgggccggatcgagccgagcaacccggtgccgctggaagcgcggcgtacccgcctgctgcaccgggagctggacggcgcgcagctggaacagctgcaacgacgcgcccgcgaacacggcaccacggtacacggcgcgctgaccgcggcgctggccatcgccgccgcccacgaccaccagcgccgccctagccacatcgccatcggctcgccgatcgacttccgcgacgaactggagccgccggtgcgccccgacgaagtaggcacctacgtcgccacggtaccggtggtgctggacatcgcccggccgttctgggaggtcgcccgcgcgctcaccgacgacctcggcgaacgccgtcgccagggccatcatttcaacctggtcaccctggtcgccagcgctgcgccgcgctgcatggccgacgcgcggccattcatggccttcatggaagccgaagggccgatcaacctgtgctcctccaacatcggtcgctatccgttccccgagcggatcggcgccttgcgcctctccgacgcgcagttcctcaccggcatctcggtgaacggctacttcgtggccgccatcaactccagccatggccggctgttctggaacttcacctatatcgacgaagcggtccccggcgaacgcgccgaacgcctggccgaagattgcctgggcaccctgctgtcggcgatccacgccccccaacgatccgccctcgaggagcaatga

SEQ ID NO: 357242 - DNA, 507 bp, Pseudomonas aeruginosa
ttgcaggctgccggccaggccctggtcctcggcgacttcgccgctcgtcccggcgacggcggcggcagggccggtaccgcccaggtcgagcgcctggctctgcggcggatagcacaggccggcgtcggcgcagccctgccagcccaggcgcagttgtccggcggcggccgccggcagggtcagttccaggctctggcgatagacctgcgactcgccgaagaactcgtcgctgtggctttcgcccggcggcagctgcggctgcaaggccgggtcgagtccgtcgaagcgcaggcgcttctggtacaggtagtagcccggcgcgatctgccagcgcagttgcacctggccgtcgtcgaggcgctcccaggtgaagcggaaggctttctccaccggcaggaaatccgtctgcgtcgcgccgcgcggcgcgaacaggtcgtcgcccggttgcgcctgggacaggcccggcagcaggagcatcaggagcaggatcaacacacgcatggataa

SEQ ID NO: 357243 - DNA, 279 bp, Pseudomonas aeruginosa
atggcttacgaagacccgaacgcgccgtcgcagccgcagacgcccgcacccgcaacgacaccagtcgctgcacccgaaaagaagtccggctcgtgggactggctgtggccgtccatcgtggcggtgatcatcgtcaagctgttcggtctcgtcggtggactggtcacctttggctgctactactggctcaagccgaagctgggaacatggggagctgtcgctgtttcaggcgtcattggcgtcgttgtcgccattggcctcctggcgatgattcgatga

SEQ ID NO: 357244 - DNA, 627 bp, Pseudomonas aeruginosa
atggcctacgtagatcccaacgcgccgtcgccaacctccggcgactacgcccaagaaccaaacgcacccgtcgatcaaagcaagagtcttcttggcgggcagcatcacccgtggaggcggttgtttgcacgcacggttgacatctgcacggctggattcgcgttgttccttctcttgatattcgcgttcagcgcgacgatgccagagcaggcagtgggcttcgcaaaggcaatcgaaaatcccattatcgccagtgtcgtgctgtatctgatctggctgcccgccgaggctctgcttctctcgctgttcgggacgactccggcgaagtggctgtttggcatcagggtcgcacatccgggcggcgacctgctgaacttttcagaggcgctgaaccgctcatttcttgtctttattcagggtgtcggtctgggcattccgttcgtcgcattgttcacgcaactgtttgcgtatcgccggctcacgaagaccggcacgaccctgtgggatacatccgccaacgcagtggtgctccataaaaagtggggggtgtttcgcgcgcttgtgtgtaccgccgccgtcttcgccgtgctgatcctgatcagcgcattgaacgcggcaggaaagtga

SEQ ID NO: 357245 - DNA, 654 bp, Pseudomonas aeruginosa
atgatgaacaaagcaagaacaatattctccgccctgtgcttctgcttgttggcttcggtcgccttgtcggttgccgcgcagtcagccggttacaccaagctcaacgtcaaaggccgagtccagcttgaggttccgagcgactggacgatcagtgatgcggaacagcgcaggcgcgtcaaggagtttgcggagaaggtcaccggggttgccactgagcatgtggcatcgctttcggcgcagtcctatccagcaccatcgcgggtctttgtccgggtgtcgttcatcccgatggagccgccgcttactcaagcggatgtccggcaggaggttatggccaacaagcagcaggtgctcaaggacttggcggacgtgtggcgcgaggagtccccaacgatgtgggcgggcatggcgaagtacggcatgaaggaagttggacgcccgagctttgccgtcgaaccaattggaggccagaccgccctgatcattcgctacggacgcacatcgtcggccaactcggcagagacgatgcgggtgactcaataccatgtgccgctgggcgctgaaaaagccctgatcacgctttcgtatatcgaaggcgatccgcaggcaatcgcggcccacaaccgactgaagagcagtatcgtgattcgataa

SEQ ID NO: 357246 - DNA, 588 bp, Pseudomonas aeruginosa
gtgctcggccagcagatcgtgttctcaaatccgagtggctactgcacgccaggcaaatcggcgcgcgaagtggagctgatggacttggcacgacgctccctcggagaaggttcccgcctcgtgcatgcggcagtccgctgttccgagctggaggactaccgcgagggccggagggaaatgctggatcactggctgcagatccagctcatcggcccgaaggggaatttccagcgaatcgaaatgccgcgagaggcattcctttccagtctttccaagtcgagtccgcgggtgaactcagccgaactcaatcgacggttgagagcgtcgttcgagaacagcgagatcagcctgtctgatatgaagtttgagccgattgggcaggacgggaacgcggtctatttttccatgcgaatgaacatgagcgttggggaaaccagccgaccggtcacggggatcagcgggatcacgctcctgaactccctcccgctctcgatcagcgtttatgaaggcaccggctcgccgcagagccgtggtcagttgcaatctgtccagcaggagctgctgaacagcctcctcaccgagaactga

SEQ ID NO: 357247 - DNA, 489 bp, Pseudomonas aeruginosa
atgaagaagtcacttctggcgacgctcgccacattgatgagccttcaggcagcgcctgctctggccgagaactacgaggtcaacctgacccgcaagggcagcaacgtctacaagatcgatggcaaggacatcttcatccagacgcgctactgctacgcctacgcctactccgaggaggccatcctcaagacgtcaggctatggcggcgaggtcatcttcttcgacagcaaggacaagtgcgatgtgaaggcggtctttggcctgtcgaagcaggagccggggaaatacgtggtgacggtcagtcacgaggacgatgactggtatgaggtattcgggacgaactcgtacatcaagacatcgagttgcctgtccctcgcgctcggcgaagaggcatacctgacgatttcgccttccggtttcggaaggctgcggtttgaggatggcgacgactgcatggtcgaaggcgtctacaccaagctgcggctatga

SEQ ID NO: 357248 - DNA, 645 bp, Pseudomonas aeruginosa
atgggatttctttccaacctattcggaggcaacaaggaggacaaagcgctgcgcgaggcgttggcccacatccaccgcatcctcgatgacgaggcgtttcaactggaactcgtgcatccggcaatgaaggcgatgctggagtccgctccggcctacgacagagacccgaacggcaccggcccgttcggcttcaccgaaaccaatcccatccccgtcaacgggccaatcggccaactggcgtatctgtccagactcgaaacccagtccggccagcgcatcctcttccaccgcctcggagccatcggcacggtggacgtgttcgaggtcgtgtcgttcaacggagccgagtggttcatcctgttcgtcgacctctaccatccccggcgctcgcgcctcaccccggacggcttccggttcacgaaggaagtcgcccagttctccggcttccacaagttctgcgagaacttcccttacgatttcatcgagaagaaggcgtccgagcgcgagtcgggcctgagcatggcgtacatcgccatcagcaaggtgtcggaccaaatccagaaccgtgtcttcaacaggccgttggcccacaaggccaagctcgacctcatgaagagccgcttgtcgagcgtccaatcccaatag

SEQ ID NO: 357249 - DNA, 2025 bp, Pseudomonas aeruginosa
atgggcatggcaatctgcttcaaatgcggttccgcgaaatccggcgcactggttgcctgccggagctgtaatgctgctccgcgcgcgaacagcgagtacgccgtttcgctcgccctgtccgatcacctgtcgtccaaagaacaacttgcgcagtacagccacgagttgcgcaacggcaagaagttgtccgtgccgcgggaagcaatcgtgcaggcgcttgatgcgctgaaagacccgcagcttctggcgatgctcggtgctcaaccggcagcccctgctctggcaccctcggcacctgcggcgacacggcagcctccgcctgttcctccggcagccccgcagcaggttgttccgccgccaccgccgaccaagtcggaaccccgcctcaccacgaccgcgttgcatcaatcggcattcgcagtcctcggggcaacggcccgcgacgaccgcaggcgcatcgttgagttggcggaagagaagtccctggagctggatcacgacatttgccagaaggcccgttccgacctgaccaatccccgcacccgcttgagcgctgagatcgcttggcttcccggcgtctctccgcgcaaagcgacccagttggtcgagagcctgctcaacaacccgatggcggtgcgggaagaatcgggcctgcccacgctcgcccatctgaatctgctggctgccgcgttcgaagccgtcgatggcgatcacgatgcagacgactttgccggcttcattcaggagatcgcctacctcgccgaagacctgaaccccgaggaggttctgcgggacatcaatgaggatcgcgccgtttcccattttcctgaggtgcgagcgctcgatcagatcgaaaccgaactggcggagcgcaagcggtactaccgtggagccatcaaggatgcgctcgacaggctgccgccgatgacgctcattcaagtgatgaccgagacggtggatggagtgacgtcgggtggtgaggatcacgcacctgggctggtcgacgatctcgttgacagctacgaggtggaaacccacggcatcctgcaaaaggaggccgagaacgtccacaagctcatcaaggcggccagagaccatgccggttccggtgagaccgccgtcaagccctacgtggataagctcgatgcggttgcgcgtaattgggacaagatcgcgcagcccattcaactgagttcgaaggcgcgcggcatcgaccacgaagcgagccgcgacttggcctacgaaattcgcggccttgccatcgacctcttcaacaagcacgacatgctcgcccagtcgcagcgactgaccgggttgattcaggagcttttctctgaagtgccggaaatctcggatcgagccgaggaagacgcggacgcgctcgcggacatcttccagcagcgcaagcaggcagcagcgcgtcacggcgagtgggagcgcgaaatcacctaccgtgccgagattggcgtgatgttcaaggacaccttgagcatctcgccccacggcgtctcgtggaaaggccagaacttcccgctggattcgatcacccgcgttcgttggggtggcgtcagccattccgtcaacggcatccccacggggacgacctacacgattgcattcggcaaccggaactccgaagcggtcgtggaactgaagaagcaggacatctacaccacgttcctcgacaagctctggcgggcagtctgcgtgcgcctgctcaccgagatgctagaagccctgaaggatgggcgtgacttgcacttcggcgatgcgctcctgcacgacgatggcatcacgcttgtgaagcgcaagttcctcggctcgaacgagaaggtgcgctgctcatgggggcaagtccatgtgtggagtgcggatggctcgttctgcatcggggccaaggacgacaagaaggtcaatgccggtatttcctacatccacggggcgaacacccacattctggagcaagcgattcgcatggccttcaagaagccgggaatgcgccgtttgagcgatttgttgcagtga

SEQ ID NO: 357250 - DNA, 1488 bp, Pseudomonas aeruginosa
gtggcgggagaagaagaacagaagaagggagaaggcaaaggcttcgctggtctttcatcgctcgtgtccgatgtggacgcgacgccgccccctgccgccaagaaagagcctcctgccgctgcgccgagcgccgggcgtcctgcttcgcagcctgctcaaccgcagccacagccgagtcagcgtcaaacgtatcaggagcctgcgcagccgtcctctggctcatccggcggcaagtgggtgttgggcatcgccgccgtcatcggcgtgctctggctgatcggccagtccaacaagaacacgacgtccccggctcccgcctacgccccgcccgcgcaaagcaccgcgccgagttattcgccaccagcgcaaccacaagtaccgtcgcgcccgcaggaatcaaagccacctgtcgggcaagacctcgtcttctcgacggcgcagattcgatactgcctggctgaagacatccgcatggacggcgcgaagtctgcggtcgataactacatcgactccgatgtggaccggttcaacgcgatggtggccgactacaacagccgctgcggcagtttccgctatcgcagtggcgcgttggagagtgcgcggcgggatgtggagccgtaccggagtcaacttcagactgagggcaggagcagatttgcccgcagcccctccactggctcgttatccgccccagcgcctgcgcgtcctgccccagatgcgacggtgcaagcgatccagcgcaagctcaacgaactcggttatgaagctggtaccgctgacggcttgatgggaaggggtactcgttcggcaatcatcgccttccagcaggacagaggcttggccgctactggcgtggcggatcaagcgttgctgctccagctacagcgtgctcccgccctcacgtcaactccatcggtagatagccgtcccgccagcacttcagttcagttgtcatccgcagaatcggcttcgttagaggcggcgtgctcaacggacaagtacgtcaacggccctgccgcgtatcgtgcgtgtgtggagcgccaaaaggcagctttggcggcaggtgtgcggaggcccaacctcaatgctttgtcttccgccgagcagcagtccattgaggccgcttgttcgacggacaagtatgtcaatgggccagcagcatacaaccaatgcctatcgcgccaactggcagccatgtcaggacaagggagcaggagacctgatctttcgcgactctccacttctgagcggcaatctatcgaagccgcgtgctcgaccgacaagtatgtaaatggccccgctgcatataacagatgcctcaatactcaacttgccgcgctagatcaacaaggaggcgggccggacttgtcccggctttcgacggcagatagaaggtcaatcgagtctgcctgttcaacggacaaatatgtcaatgggccagcggcatacaacagatgcctgtctcagcagttggcaaggctacggtga

SEQ ID NO: 357251 - DNA, 1440 bp, Pseudomonas aeruginosa
atggccctcgacgcgtggcttcccatcggattcaagctgcctgacggcgcgaaagttcgcgctgcgctgttcgagggcacggattggcagatctacgaaacggtgggtggcgggcgtgcgctggtcgtgttggacacgctggcgcagcattggctggacgcaggactgattgaggacgggacgttcagtgcctctcagttcggcgaccgacagctttgttcgatctcgtgtgggccgagtcagacgctttgcccggtcaacgaggcgaagtctcccgacaacaaggccgaggcgctttccttcgctttggcgctgaaggcgacgcgtgacatcgatgcggactccccgttacaagacgccctctacatcgagaagatcacccggctgctgcccacctacagcatcagttccagaaccggcgatgacgtcgtgctcggctattggctgacgggaggtgccagcattccggttacctctttccgccgcttgcgccagaccatgagctggctcggagcgagccacttgaaagatgtcgtgcaggcggcgggcttcgaggtcagcgaggtcattccgctcgcacgcaagccggaaaagccgtccgaaaagaccgaggcagcacccgccgaagaagagatcgaagcaaaacgcaccgcgccagagccgaacaaggtgttcgagctggccgggcgtcccgaactggcggccttcttcaacgagcacatcgtcgacatcatcctgcaccgcgaccgctacaaggcgctgggcatcgaattcccgtcggcggtgatcctgcacggcccgccgggctgcggcaagaccttcgcggtcgaccggctggtggattttctcggctggccgagttttcagatcgacgcctccagcgtggccagtccctacatccacgagaccagcaagaaggtcgcgcaggtgttcgacaaggcgatggaaaactcgccatccgttctcgtgatcgacgagatggaagcattccttgccgaccgcgagatggggtcgggccatcaccgcgtcgaggaagtggcggagttcctgcgccgcattccggaggcggtgaagaacgatgtgctgatcatcgccatgacgaaccgcatcgagatgatcgacccggccattcagcgccggggacggtttgatcacgtcatcaaggtggacttcgccagcgaagtcgaagtgcaggcgctgctggacaagctgttgtcctccttgccgaaggaatcggacgtggattccaagccgctggcgaaggagctggcgggcagaccgctgtccgacgtttcgttcgtggtgcgcgaaggagcgagactggcggcgcgctccggcaaggatcggctggatcaggccagcctgttggccgcactgcattcgtcaccggcgcgggaacgtgagggcggggaaaccaaacggcgcatcggattcatttaa

SEQ ID NO: 357252 - DNA, 2493 bp, Pseudomonas aeruginosa
atgaaatacgtcggaatcgatctcggcacgaccaacagtgccatctcctctttcgacggagaaaagattcagctcttcaagagtccggagcagcacgacgtcactccatccgccatcttcatcgaccggcgcggaaacaaatacgtcggctcgcgcgcatataacaacgccgcgcgcaatcccgacaacgctgctgtgctgttcaagcgcctcatgggcacgagcacgccagtgaagctgcccgcagtcaacctcaccatgacgccggaggagtgctccgccgaggtgctgcgtaccctgttcggctacttgcctgaagaaatccgtggcgacggcgacaccggcaccgtcatcacggttccagctgcgtttaaccagatgcagaaggactcgacgatgtccgccgccgatgcagcgggcctcgggcgcgtcgccttgatgcaggagccggtcgctgccgtgatgagcgtgatgcggcagcggaagaacgacggtgtgtttgtcgtctatgacctcggtggcggcacgctcgacattgccatcgcagaaagcatcgcgggtcgggtgaacctgctcgctcacggcggcattgccatgtgcggcgggcgcgacttcgaccgcatcctgttcgacaacgtcgtcaaaccgtggctactggagaacttcgatcttcctgaagacttggccgccaacccgcagttcaaatccctgctgcgcatggctacgtgggctgccgagaaggccaagatcgagttgtcgcagaaggaagacgccgtcgtcagccttcctgaaactgagctgggcgtccgcgatcaggctggcgaggagatctacatcgacatcgccattgatcgcaaacgctacgacgcgctgatcgcgccgaaggtggaagagtccatccagtccgcccgtgaaacgctcgaaaaggccggattgagtccgcacgatgtcgagcgcgttgtgtttgtcggtggcccgacccactacaagccgctgcgcgacaaggttgccttcgagcttggcatcgcgccctccaccgacgtgaacccgatgacggcggttgccgaaggagcagcggtgttcgccgagtccatcgattgggcctcgcagagccgtgggcgcaagagcgcccgtggcgcgctcagtgccgggggcgggatcgatctctcattcaactacatcgcgcgcacgccggaaccgagagccaagatcgtcgccaagttcggcggccgcgcgcccgcgggcatcgagtttcagatcgacagcctggacaccggttggtcgtccggccgcgttacgctgaaggatggtgcaagtgtcgaactcagcctgaccaagcccggcgacaacatcttcaaggtgttcgtgttcgactcgaacggcgcgcccgtcgccttgcgcgaggacaagatcgtcatcgcccgcactgccgccagcatagatgcgattccggcatcgcactccatcggcgtcgaggcccgcgacaaggttggtggccgcttggtgctggactacctcgtgcgcgaaggcgaccagctccccaagaagggcaaaaagaccttcaaggcgggcgagtccctcaaatccggaagcgccggttcgatcaagttcaagctgtgggaaggtgaagtatccgatcccatcaatgacaaccgcttcatcggcatgttcgagatcaggggttcggacttcgacgacggcgtcatcgccgctggcgcggagctggtctgtgagtatgaagtgctcgactccggcaacattcagttggaagtctcggtgccgtccatcagcggctcgttcaagagcgggcgcaactactactccagccaggaaggcaagatcgactactccaatcaggccaagaacattcaggagcagtcggagcacacattggagcgtctcgaagagatggcttccaaggtggacgacccgcgattggagcaagcccgcgagaaactggaacaggcaggcaccatcaagtcggacgaggccgatccggaaacagccaaacaggcgatggacaacgtgcaggaggccaagcgcctgctggcgctgactcgcaaggagcacttgaaggacatccgccaactcgaactggacagagcggtcgatttcttcgagaagaccgtgcgccagcatgcccgtcccactgaggctacgtcgttcgacaacttggtgaaaacggcgcagcgcgcgattgaaaacaacagcagcgacttcgagtcgcacttggacgatctgcgcggacgcaacttcatgatcctgtggaggcaggactggttcgtgatcgaacgcttcaagtggctggcgcaggacgtctacctcttccccgatgccagagagcacgcgcagctggtggcgattggggtcgaggcgttgaaggccaacgacatcgacaagttgcgcgcagtggtcgtcaacctcgactcgatccgaatcggctctgtgggcgacgacgacatgatggccggcgccaatatcgtgcggagttga

SEQ ID NO: 357253 - DNA, 372 bp, Pseudomonas aeruginosa
atgactcagcagaccgaaagcaatgagcagatggagcagtcgctgatcgacatcgctgtcgagagttggcgcttctcgcgtctgttcggaaaggtcgtcagcaagctcgatgcgggcgagtcgggccgctatgccaaccagctccgctacttccagaagaaggtcgaggaaagcctcgagtcgaacggcctgaagctggtcaacgtcgaggggcaacctttcgacccaggcatggcggcttccgccttgaacgtgggcgacttcggccctgacgacgtgctcctcgtcgatcagatggtggaaccaatcatcatggggccgaacggcctgcgcaaacaaggcacggtaatgctgaggaaggtgggggcatga

SEQ ID NO: 357254 - DNA, 288 bp, Pseudomonas aeruginosa
gtgaccgccgtgacgtatgtcattgctgccctgaaaattctgcactattctgtcatagttttacctagactggccatcaccatgcctacaagtaccagcgagggcgagatcctcaccctcaagcaggtcgcagagttcctgaaggtcacggagcggacgatctacaggctggccgcggccaagaagatccccgcgttcaaggttggtgggacatggcggttctccaaggcggagatcactgaatggattcagcagcagtcaaagggcgggaaagcagacaagacgtaa

SEQ ID NO: 357255 - DNA, 303 bp, Pseudomonas aeruginosa
atgaccaatgatatggggctggtcaaaaacaagctttctcaagtaatgagtgggtatcacttgagggtgtttcaagcaattttcccttgtgactttccagataataagggcgtgggggtctcggatgtctatcagttcacggaggggaaaacaaaaaaaggtgaaatcttttatagcgcttatacacgctacggcatctgccggtttggagggccaagagttttaatggcaagcgaggctcacgatagtaagagtgtcttgtatgagaggccccgtgagcggcagcgctattatggggggtga

SEQ ID NO: 357256 - DNA, 1047 bp, Pseudomonas aeruginosa
gtgcaagacagctcacccatgaattacaaaaattcagtagctctctcagggaaagatatctacataccaatagagattggtgatgcagaactctggataccaaccccccatctagagacacttctaaatgatgggctgcgcggaatttcactagctggcctcgcactccgcacacgatctaaggttgtaaaggctgcggtttgtgaagcactaggatacccgatcccaagctcatttaaaaaaacacagccacgcttccccggccaacaactcgacatctacacacaaaaatcgctaaacctacaaatatggaatgaagaactttcacccacaaggcgatacgcaataatccagatcacagaagatgactgcattggcaaagtaaaagttctaaatggccaggagcttgctcttttagacactacaggaaccataacaacaaagtatcaagcaagcattaaccccggccatagttctcatcaactgatctccgaccaagatacgccgccacttaagccgcatacccagcacgggttgagatttgatgtaagtgtaagtccggtacaggaaccacagagcggcatgctgctgccagtagccgaggtatttgaccgcttagcgcccttagttggggcttcattcatagacccaggccgtgaccaggagcgaaaccgaggcgccggccttcatagactggtctgtgaatatctaggatacagtcgctatgaggacaatggtcaattccctgatattcggcaccaacttctggaggtgaaactccaaacatcacccaccatcgacctaggattggtacttccaaatagcgaagagcatttggacattcagcaaattggaaatttccatccgcgacactgcgacacccgatatgccatcttctacgcatcaacagatggcacacaagtaactttgacgcatctctttgtcacaaccggggccgaatttttcagcaggttccgtcgctttgaaggaaaagtcacgaacggaaaaatccagatcccattacccagaaacttcttcttggactaa

SEQ ID NO: 357257 - DNA, 1761 bp, Pseudomonas aeruginosa
gtgaaccaagcagaaaatattgtccagcggccaaggtatagcgaggtcacacagcaaaaggcctctggagcaacctacactccccctgaattcgctgcttttgtcgctcgtcaggtggtgcgtgatggtgtactgccaaagcaggggaaaatcagagtgttggatcctgcggtaggcgatggggcgctgctagaagcgataataaagcaactgcctgaggcgctctggagccgactggatgtttttggctatgacacagattcgacggccattgccgcagcatcggtaaggcttaaaaaggaatttcccggagtttccttaactctagtagagaaggattttctcagccatttgttggctcagcatggtgataaagatttattttctgtcgaaggggtggactcaaggctattccattttgtgatcgccaaccctccctatgtaagaactcaagtaatgggtgcccagcaggcacaacaattagctgaggattttgggcttactggaagagttgacctttattacccattcctgttgggtatatcacaggtgcttgaaaaggatggcgttgcaggaataattacatctaatcggttcatgactacaaagtccggtcaaagtgtacgcaagcagctactttctcgctttaatattttgcatgcttgggatctgggcgatacgaaattattttcggctgcggtactgcctgctgtactgatagcccggaagtcagaagaccaacttcatacaagcccttatgaagtccgcttctcaactatctatcagactgaagattccgcacaggtagaggctgtgagcgcaatatctgcgcttgagcatgacgatgatagcgtcgttgcgttgcctgatggccgatgcttcagggtgcgccacggagttctggataacggtcaaaatgacgaaggtgtttggcgaatttcaaccaagtcaactgacaagtggctacaggttgttgagagtaatacctgggataccttcagtcgagttggcaagattagggttggtgtaaaatctaccgcagacaaggtttttatacgtagtgattgggctgagattcctggtgggcgcccggaattattgcgccctttgattactcggcactgtgctcggcagttcaaggcctgtacgccagctaaagcaaagaatctgaaggaaattctgtatccgcatgaagcgactgtgcgcgggcgtagggctgtagaccttagtttgtatcccagagcttctgcctacttggaggcgcatcgcagcactcttgaggcgcgcaagtacgtaatcaaagcaggtcgtgcctggtacgaactgtgggttccgcaggatccgtctgcatggaaagagccgaaaattgtatttccggatatatcggaaaagcctactttttggatggatctagacggtggcgttgttaacggtgagtgctactggcttaagtgcgacagggaaggtgaaagtgaccttctatggctagcgttagcagtcgctaactcaacgttcatagagtcgttttatgatcaccgcttcaataataagctatatgcgggcaggcgacgctttattactcaatatgttcaagagtttcctttgccggatcctgggcggaatgagagtaaggctataattgaactggctcagttaatccactcatccttgccgtcaagcgcagcagatcggcacattgctgacctggatgcgcttgtttggaaggtttttgggttagtccaagaagaagtttctgggtaa

SEQ ID NO: 357258 - DNA, 2283 bp, Pseudomonas aeruginosa
gtgaatgccgctgtccccaacttggtcaatatcagcgtgcgagtcaccagtattcgttctgctaaccgcaagggatgcatcgcatacggtcaccgtatggacatccaaaagggtatcaacgaccgatctagtcctgtggtcataagggttgcggatgccattgccaagctttcagatatttccgtaggcgggatatttgatgtgtatggcgaggccagcactgtcctgaggacacatggcgccttcgcgattaatgagatgaccgttgatgctcaagatattcggcttgttcgtcctagtggatcacagctcatccaatggataggcgacaatgtcaagggcgtgggagaggtcaaggccacgcggctttgggatgctcttggtgagcgtctctatgatgccctggatcatgctgatcacgacgcaatctcgatgatcatccccactgcggacgtgcgagaggggatgttctcgcgctggagtgaggacggcgacgctaagacacttcgcttcgttcaggacaaacgaatccccctggtgctcgccaggaaggccattcggtttcacaagaagaacaccatcgcggccctgatcgcagacccgtatcgccttctcagctttgcaggcgattgggcagtcgtggatggcatcgccagagacagttttggcttggcccttgatgaccctcgcagactcgcagcggcactggaagaggccttgtacagggcctccgagagaggccacacctgtagctcattgccggatctccattccactgtccgccagttgatcaagccctatgctgccgctagtgccgcactcgccaaggccttggtggatggtggcgcggcggggcagtttgtatttaaggatctggcgctgttgggcccgatgctgttcgctccgggttcctggctcatggagcgtcgttgcgccgaattcatccgggatctaatagtcacaccatcactgcaaccacaactgtttcctgtcgatgtcagcgaagtcattgagcagtttgaggaagatgaaagggtgttcctggggctgccgtcgttcggcctgaatcaagctcagcgcgacgccgtgaatacgtcgttttcgaggcgcttcagcgtaatcactggcggtgccggcgtcggcaagacaactgtactcaaggccctgtacagagccctggatacgacaggtcgcccacgcttccagatggcgctttcaggccgagctactgcccggatgattgaggccactgatgaggaagcgacgaccattgccgggtttttgaagagggtgaccgagaaggatatggggccagcgccgatcatcgtcatcgacgaggcatcaatgcttgatctggtcaccttctaccggctggttcagaagctgccacccgagtgccaggtgatcctggtgggtgatccctaccaattgcccccaattggagctgggctgatcctgcacgtactatgcaggcttgctggggtgccgacgaccgaactggttgaggtgaagcgccagtctaaggagtcctcgatccctgttgcagctcgccgcgttcgggaggggttgcgtccgtcgttcagctccgacgagcacgatgatgtggtgttcctgccatgccctgacgaccagatactttcgaccgtcatcaggctatacgagcaagaccctgggagcactcagatcctctcggctactaagtcctgcgcctttgctggtgtggatgcaatcaaccgcgtctgccacggcaagtacgctgatcatgggcagccgctgcttgctgagaacctcgaaacaggcgagatcgaggcgacaggcctctgtgctggtgatttgttgatgtacaccgccaacgactgggggcggaacctccagaacgggtcacttggtcagctcgacgaggtcttcgatagcccccgtgcagtgaacgttgggagtgatgagaaaccgcgcatggctagtgcgcttggtatggccacctttgagggagtgcaacactacatcctggacaccgatgtcgactcgctagagctcgcctactccatcactgtccacaaggctcagggttcccagttcccgcgcgtgatcattcccgtcaggaagtcgcgtcttctggatagaaccttcgtctacacggcggctactagggcccaggtgcaggttatcttcgtaggagatttggaggcggtaggagaggctattgagctgcctcctaaggccttcttaaggcaggttggcttgcatgcattgctagaggcggagctctctagtcaggccgtttag

SEQ ID NO: 357259 - DNA, 441 bp, Pseudomonas aeruginosa
atggccaacggacagcagatcgctgaagagaacctggctgcattccttgcctggtcaacctccaagtcagatggcgacttccttgagtacgttcaccggggcaagctgaagcgctcggagatagctgctgagtgcggattcggcaagagcgcccttacccagaaccctgctattcgccaggcgctagaggcgctggagagcgagctgcgagctgtcggcgttctagctcctctagtggcttcactgcctgtcgggcagaagatcgagccagcactgcgtgacggcaatgccaagcagcggcggcaggatggcctgcggctgaactcattggagcaagagaatgccgccctacgtgctgagctccaggccgcaaagcagatgcttgatcgttacacgcttatgaccgagttcctggaagagaccgggaggatgcctcggtga

SEQ ID NO: 357260 - DNA, 414 bp, Pseudomonas aeruginosa
atggccaagcacctgagtacgaaagacctcgatgtaattgtgaagctgatcgatagctgggaagggaagctggcgtgggaggcgctctgcgatgctgttgagccactgattgggtctcggccaacccggcagacactgaattcgcacgagaggatcaagagcgccttcacccaccaaaaggcccggcttaagtccgggttcgtctccacgaagcgtccaccaagtctcagtattgctgagcagagaattcgccggctggaggctgaaaacttcaggctggagcgtgaaaacgcgcgccttttggagcagttcatccgctggcagtacaacgctcacaagcacaacgtgtctcaggagaagttggatgcgccgctgcctaatgttgaccgcaactcatcggagaataagtcctaa

SEQ ID NO: 357261 - DNA, 2010 bp, Pseudomonas aeruginosa
atgtctaacgtattcctgttcgttcccaaggcccaactgacctgctccgagaacctcaatgagtttgttctcatgtgccgagatcggctcactgtctttggtgaggatcttgattggtacagccatgcttggcctggtgtcggcaacttcaccaagaaaggggcaccttctcgcggctacacagaggcccagctgttgagcgcggacatcatgtctttcgctaaggcctatgtgcgctatcaacagggtcataaccccagcaagctcaagaacgagtttaaggccattcgctgcattgaggaggcgctgttaacggttaagggctgcgccgacatcactcaggctgacctaagcgtattagacgaggctggcagggtcgctgcgacgtatgagtccactagttatcaggcgggcattagcctggtgaaattggttgagttccttaatgagagcggaatcattgcggccccgcttgtttggaagaatccgttcagaaagcctaaggaaatccatagtaccgacgccattgggcagaaaaaacgcgaagagaagatgccccctgagggggctcttgaggccatggcggagatgttttttaacgacctccttgtcccaagggatcgcttcacaacatcgattttcgccctgtgttcctgcgcgccatcgcgaatcacggaggttcaagagctgcctttgaactgcctccatcgagagcctgatcctaagaccgggatgcaaagagttggcctccggttttactccggcaaaggctatgagtcggatatcaagtggattccgactgtcatgattgaggtcgtcgaagaggctgttcggcgtctcacagagctgtcggagccgggccgaaagctggcccagtggctagaggctcatcctgataaattttatcggcatgaggactgccccaacgttgcggagcatcacccattgacgccagaacaggcactggctgctctggggcttttgccggggaactcccctaagagtgttctgaggcaaatgttgaagtcgtatgcgccgttcaaggagttctacgctcaaaacggcttcgttactctggggtttctgaacgggtttgttcacagcatgctgccaaaaggctggccctggttgaacaaagagcgccgcatcaaatacgccgaagctctttgctgctataggcggaacgagctccgagaagacctatccacgagccaggttattgtttgggcccctgggaaaagtacgttcaccaccgatataaactacatcgacggccaagagcgcagcatctgggagcgctacggctacaagaacgtcgacggcacccccatctccatggcttcgcaccagatcaggcatttcctgaacaccatcgctaatcggggtgacatggggcagttggccattgctaagtggtcaggccgcaaaaacattcaccagaacgccacctacaaccacatgagcgacgcagagcacgtcgagatggctagggatgctgggatcggtactgccttggggaaagttaggcagaacctgcctgtcacgctggctgatctcgaaggggttggcgatggcgtggcccatgtcactatctttgggttctgcgtgcatgactactcgatggttccctgccagaagcatcgggactgcttgaactgcaccgagcatgcttgcgtgaagggtgaggccgtcaaactggagaggttgaaggcgcatcgtgatgcaatccgtgatcagcttgctaaggcgcaaagcgccaatgaggacgggatctacggggctgatcggtggagcgcgcatcagatcagaacgctcgaaagggctgagcagctcattagcattctggagtcgaaagacacccctgatgggacgattatccgtctgaggagtgatcaggagttcagcccgctgaagcgtgctattgctgctcgatccgccgccccaagcctgcccgcaccgaaggaaagcgagcccgaaatcgacgagcttcgtgctctgttgggcgggtga

SEQ ID NO: 357262 - DNA, 1536 bp, Pseudomonas aeruginosa
atgaacaccaataacattcatatatctgcctctaactccgctgcgcagtatgtgcgcacagagtttttgtctcgtgatggttatgaggtagtcatagagtctgactactggcgtctcagtaaggatgttgctttcagtttggactggatctccgagttcctgagtgatgatatgaagctcaatttcaaacaggttctggctatctacgctcagacctgctcctcaaggcatgcggagaacatgcatcagagattgaaggagtttttgaagctttcagtcggacaagaggttttcagtccagagtcaatcatctcgtatcgtgcccaactgcatggtgaggagtggaagattggcagtgttcgagccttcattcgcacatggatttcgactggctacaaaggtattccgcctgaaacattgcccatgatggagaaatggcggatcaaagggaatgaaaaaggttttgctgttcaatccatgtgcccggagagcgggccgtttacagatatcgagatggacggaatcctctctggtgttcttgattgtttttcgaatggtctgttaggcctgcgcgatacgtgctatgcgatgattttggcaatgacaggcagaaggccgatccagatcacgtccttaaaaattatggatcttctggctttcgggggtgaatattatattaacttcccgcgtggcaagcagcgccataggaagtggagaagtgactttaaaaaattccaaatccctgaggatctttgggttcttcttcagttccatgctgagcgcgtgaaggagctatttaatgagcgcatccctggcggggtttcagtgcagcttgttcctgatctgccactattccctgccttggaaaagtacgaccctttgaaaagcctggaggaattgctgtctggtgacttcttgcatgcgcctacctcagcagttggttacgcaatgaaggttgtcaaggctgaagtggctttaatcagcgagcggacaggcgctattactcacatgaatcctaaccgcttccgatacaccctcggaaccaatctcgccagagagggcaagggggagtacctaatcgctgaagcgcttgaccactcagatacccaaaatgctggcgtgtatgtaaggaacatcccggagttcgttgagcaaatcgacaaggcagtggccttgcagcttgcgcctctcgctcaagcgttcaggggcgtgcttgtggtcaatgaggccgctgctcggagggggcgggatccctccagtcgcatatgcagttcggggggcaacgtcggaagctgtggcagcttcggtttctgcggtgcgttggcacctgtcgcctgctacacatgcactcacttccagccgtggctggatggccctcatgagcttgtactggatcagttgatcagcgagcgagacagcgtgcttcaggcgacgcgcgatcccaagatcgcgtctgtgaacgaccgactcattctggcggtgagtgatgtcgtaactcgctgcaatgccatgaagagcgaggctgtgtatgtctaa

SEQ ID NO: 357263 - DNA, 1221 bp, Pseudomonas aeruginosa
atgcagctgtcagtgagaaggtttcaggcagagtcgggcgagaggtttctaatcctcgttgatgacgcaggcatgcctctgtactacccggctctttatgtgacagctgttctgcgtggaggaaaccgagctaccaacaccatcagtcacgcgctcaccgccattaagctgttgtacgcatggggcgactactaccaaattgacctggaatcgcgctttaagcgaagcgagctgctcttcgatcacgagatccactcacttcgtgacttctcgcagaggcaccttgtcgataccaagcccaaggagggcaaagtcacttccatcaagcgtcgccagcaacgggtctctacggagagccagttcaatcgaatgtctgtgattgctgactatctggggtttattgcgggtcggctatacccggtgacggcaaccagtgccaaagacatcagcgccatggtggcggtgatcaaagccaatcgtcctcggatcaatgggctcacggagaaagaccggtctgacattcacctcaatgatgggctcttggatgctcttgaagaggcgatcaggcctgggggcgaatccaacccgatagctgatcttggtatccaggttcggaacgccctcatgttcactatccttcggttgacgggaatgcgacgaggcgagttgctaaatctcaagaccgaagatttcgacttcagtacagatgttgtgcgggtggtgcgtcgaccggactccgctggagaccccaggcagtaccagccattggcgaaaaccagggagcgaaccatcccattgaccccggagctgatggcaagagtccacgaatacatcaacaagtaccgtagtaaagttcctggtgcacgaaagcacgggtatctgttcattactcataagccaggcccaagccaggggtggccgatatcgaattctggattcggtaagttcatctccggtttaacggaaatagcctcgactttcgaaggttttcactcgcatgctcttcgccaccactggaactatgtgttttcacggatagttagtgagaagggcataacacctgagcgcgaagaaaagttgcggtcatatctgatggggtggagtgaaacatcaggcaccgcgagaacgtataacaaacgccatatcagggaagaggccggtagggccgtcatggatttgcagactaagcgcttgaggaagttgaatgatgaacaccaataa

SEQ ID NO: 357264 - DNA, 291 bp, Pseudomonas aeruginosa
gtggaatgccaggagcagcagggcggcgaaggcaagggcacgcaggaagttgcccgcgctgaccgccagcggatcgccgccgccgcggccgagcagggtatagaggccccaggcgaggccggacaggagcatcagcagggcaccgcccagcggcggcgcgctggctccggggagcaacaggaacagcaggccgcccagggccagcaggaaaccgagcagcgcctgtccgcccagccgttcgccgcgcagcaggccggccagcagcagggtgacctgtaccgcgccgaatag

SEQ ID NO: 357265 - DNA, 246 bp, Pseudomonas aeruginosa
atgaccattgagatccagatcctagaagacaagatcctcgaaatctttcgctcagttacacaagtaccctcactgactgccaacgatgatttcttcaactccggaggtgactctttgttggcggtggaagctggattccaaatctcccaagccattgaccaagaggtcgacccaatggtgattttcgtttttacaaccgcatccacctgcgcggttgctgtgttggagcagtatctgacagcctaa

SEQ ID NO: 357266 - DNA, 1020 bp, Pseudomonas aeruginosa
atgcaactcagcctgttttactttgcggatgcggcaaccggtaaaaaatccaccagcaacacctatcaattgttactggatggggctcgccacgctgacgccaatggcttcgccgccgtgtggatcccggaacggcactttcaccccgtgggcgggctttacccgaacccggcggtactcggtgcggcggtagccatggtgactgaacgggtacatattcgcgccgggagtgtcgtcgtgcctttgcatcaccccttgcgcctggtcgaggaatggtccgtcgtcgacaatctgtcgaacggcagaataggtatttcactggcatcgggctggaatcctcgcgacttcgtgctggctcccggagcctatgaacataggcgcgactcaacatttgaggcggtgcaaacactcagaagtctatgggctggcgaatcctttggggagggtgcttctaaggtctcgacgtttccgcctcctgtcgcacctcttcaactgtggatctcctcttctggcacgctggacacctttgaagaagccggtcgtgctcaggcaagcgtcttgacccacctggtcaaacaggacatccccgagctaacaaaaaaaatcactgcctatcgcacggcactggcgcaaaccggcagttcctggcgtggacacgtcacgctgatgctacatacctatttggcacccagccgcgagaaggcgctgcgggacgctcaaacgccactggaagactatctgatcggctccttgacgccttatcgggcaggtactagtcaacgggtgcatcctgaaacccatgaaacggtacgtgcccaaataaagggcagtacgcaacgatacctaaatgaggcggggctgatcggtgacttaaactacgcaaaacaagtgattgatctttgccatacggctggtgtcgacgagatcgcctgtcttatagactttggcctccaccacgaaagagtcatggatggtcttgaccaactgagcgccttgcgcaagcacatgtccgagttatag

SEQ ID NO: 357267 - DNA, 5463 bp, Pseudomonas aeruginosa
atgtggttcctgcaccagatggatccgaacagtgcggcctacaatattttcagcatcgccaaattgcatggccacgttaacttggatgcattacgccaggcatttcaagcgctgatcaaaaagcaccccagcttgcgcacttcttttcaggccaacgacaacggccagcctgagtcggtagtccatggcgccgtcgacgctgacgtgttcgtcatcgataatcccgaatcgacagagcaatgtctggatagttttatctggcagccatttgacctgggccgcgcgcccctactcaaggctgttgtcatccgcactgacgatgaaacctgccttatggccctggtgattcaccacatcgtcgccgatggctggtcgctgggtatcctgcacgaagacctgcaacgcttttatgccgccgcacttgcctcgcaagcgttacctgccaccggcaatatcgatttcagtaccttcgtcgcggccgaaaaagcctgggtcgccagcgatgcgggtatccgcagccggcaattctggaagacccagctccacgacctagcacaaattgaattgccaatggcaaacccccggccggccattgccaacttccggggcaaacatattgacctgacacttccacaggggttggtgcaatcactggaagccctggccaagcagtatgacagctcgctctacatggtcctgggcgccgcactcaaggtgctgttgcatcggtattcaggccagactgacattgtattcggtacccctgtcgccaaccgaccagtcgaggagctggagaatgtcctggggttattcgtgaatacggtcgtgctgcgcacccgcattcttccgcaggccagcttcactaacgtcctcaaggcattcagagacacaacgttgctcgcgctggagcatcaacgaacaccatttgaacaggtggtggaagacctcaacccggagcgctcgctcagtcataacccgttgttccaggtgcttttcactttgcagaacgtcgaggccggcaaaatcgagttgcaaggtacacgaaccgagctactgaaggtcgatctggacgttgcccgggtcgacctagaatggacgttgtggcggcgcccgaccgatgcgcgcctgcggatcaattatgcgctggatctgttcgacgagcaggtgatccgggaaatggccaaccattacgaatgcttactcaattgcatcgtgcagacaccgcaacaggatatctcccaactcccccttttccacaagctatcctccaagaaaggcacgccagacgaacaggtctggccaggccgcgggctgcatggattgtttcttaaagcggcgcaaatctcaccaaactccggtgcggtctctgacaagcacgggatattgacctttgaccaactcagccgccagtcagccgcactggccgtgcagttactgcaaagtggcgtgtgccaaaacgacaccgtggcaatatgtgtcgagcgcagcgtcgatattgccgtagccacactggccgtcctgcgagcaggtgcggtatttgtcccgatcaatccggcggaccccgacgatcgacgtgcctttattacctcggacgccaatgctcgggcgatcattgtgtcttgcgcagacaaaggctgcgatacgatccccagtatcgtcatcggtaaatcccgggaccagccgacgccagaacaactgcgcgcgattgacgcggcggttgtgcccgaatcgccttgctacatcctttatacctccggtacgaccggcaggcccaaaggcgtcatggtttcccacggcaatatcgtcaatacgatgcgcgcctgtcagttgctgcatgaatgctcgccttcggatgtcggactggtactcgcggcaagcacgtttgatgttttctacttcgagctgtttattgccatgctggccggcggacagagccgaattgtgacccaggaggaaatcttctcgccgcaggcgattgacgagctgctgaagaccgcgacgatctttcaggccgttcccggattgatggaaaacctgttgacgtccatgtcgcaatccgcctcacacagtcatgaatcgcttcgagtggtgatcaccggtggcgacatcgtacctgccgacctgctggccaccttgtcccacgccttccccaaggccagagtcttcgtcgcgtatggccccaccgaagcgaccattttttccacgttgtatctgtacgacaaacaacgcccggtcaccggttatccgatagggcaaccgctggacggcgttgaagtcgtcatcgccgatgagcacggcaatgtgctgcccgatgacgtcactggcgaaatctggattggcggtcgaggcgtggccaccggctacatcaatcgtgaggcagaaacccgcgccagcttcatcgaattgagtggacgcaagtattaccgcagcggtgatcggggccgctggaacagggcgctgcgaaccttcgagttccgcgggcgcctggacagccaagtgaaagtccgcggttttcgcattgagccaggagaaatcgaggcagtgctgaccagcctgcccggcgtccacaatgccgtggtgctggcagtcggcgatcccgggagcaattgccggctcgtggcctgtgtgacagcacaggatgcacctctcgaacaggaccgaaatacgctcgacgccgatgttgtcgcgcattggcgcacccttttcgaccagacacacgaaatttctgcgcccgggacgagggattttaccggctggaactccagctacgatcaacaacccattgcgccatcggtcatggacgaatggctggagggaaccgttgagaacatcctgcgttgtcttccagagcagcgctcaacgccacccaatattcttgaaatcggggtcggtacgggattgctcgctcaagaactcgcaccgcactgtgggcgctatgtaggcacagatttctccacctcggtcattctcaagctacgccagaaactccggctgtccagactgacgaacatcgagttgtcagtggccgaagccaggaacctgcccgagttcgagaccctgttcgatgtcatcgtggtcaactcggtaagccagtactttcccgacatggcctatttgaccgaggtgctggacgccttgcgaggccggctcgccccggacggtatgatctacctgggagatgtccggaattactgtctgctggaaatgttccacgcctcggtacagtctgctcgggcgccgcaactgacgaacgatgagttgctgcccagaattgcaaaggctgtccaggatgagccggaactgaacgtcaacccgtgcttcttccacaactacgcgaaaaaaaccgggctgatgctgcgcatcgaaccccgtcgcggacggcacgccacggaaatgaacaagtatagatatgacgtcacgctcagtcgaccctcggccgcttgcaacgatgacttgcctgcgttgaactggcaggaatggcgtgctggaaactggacgtttgagacgctggccgaacatctacgtttggggacaagcgctgctttcgcattcaccggtgtacctcacggcctgttgattgacgatctgcgcaggcgcgatgaactctactcaaacgatactccctcgacgttgcctgacagtgtcatccctgaagcgcttcgtgaactcgctgcagagtgtggctataccgtttcgttcaactgctcggatcatccggacggatactacgacatggtcttgtcgacagcggcgcatccgaccaatctgttcgccacgcttgccggacgcagcttccggtcagagccgtcggccgacggcaacaatccgggggcacggctggagaaggttcagctgtccaacctcatcaaggaggcgctctccaaacgcctgcccagctacatgattccttcggtgataaccgtcctggacgccttgccgatcaccgccaacgggaaaatagacagaaaaagaataccaacggtcttcagtaccaccactgacagtcgcccccccaaaagcccttcggagctgttgatcgcacgaatctggcaggacgtactggcatataaagtggagtcggtctctgatgatttcttcgaggtcggcggaacctcgttactagcgatctctattaccgttcacttgcggcaggccggcttcagtttgatgcctcaggtggtctttgaacacagaaccgtggagctgctggcccgctggatcgacaccgtacctcaccacgagcaaccgaaggccatcccccatgtggagcccactgccaccgagcccgaaatagacttcacacgcattaatgttggcctcgacacttggcgtcattgcaggcaagtgctgttaactggggccaccggcatgctcggcatccatattctgcatgagcttctttgcagctatccgcagctggaaattgtttgcttggtgcgtgcccagaatgaccaggccgcccaggatcggctcgccagtcaatatgcttggtacttcccgcagtccgagatcaatgcgtcggtattctcccgacgagtagcgtgcatcaggggggacttgcgagaaaaaaacctgggccttggcgacgaggcacgctcggcactgacagcaacgtgcgacagagtgatacacgcagcggcggacgtgcgtcatgttggctcggagcgcgacttctttgccgtcaacaccgatggcacagagcgcgtgatcgagctgtgctcacagctcgcgaagcccagcctgtgccacatttcgactatcggcgtggcgggacgaagcctggatggcgtggcgagatccatcaacgaatatcagcttgaggtcgggcaaacaccgaccgaagcctattcggccagcaaaattttcgcggagcatttgatcgccgacttcaataaattaggcgactacgcgaccgtcttcagagtgggcacggtttcgcctaactccctgagcggcaaattccagcgaaatatcgatgcgcactttttcagccgctacgtacgcgccgtcatgggcctgggcgttgccgccgactggacggagcggcgtattcaactcataccggccgacaccatggcccaagcggttctgctgctcggcggccagcctctggcagcaggtcgcacattccatatccagacccccaacgcactggcctatggtgagttcatccagaccctcaatgacctggggtacggcatcgatctcatatcgccccaggaattcgaagagacgctgccgatattggggcgcgacaaggcacgggttgaagacgtcggccggattctgccgatgacctaccgaggcgctggtcgcccggtcacgctcaagcatgccgtgactgacgcctggctcgacaaattgggcttccaatacttcaagccgacgaagtcatggattgcagacttcgtggcccatggggtggagcagggatttttcccgcccgccggtggcgctcgctga

SEQ ID NO: 357268 - DNA, 1218 bp, Pseudomonas aeruginosa
atgtgcctttgggtggggcagtccgtcagcgagatgggctcgtctatcaccaatattattcttccgctgctcgccattaccgcgttgagtgcaactccgggtgagattggcttgcttcgcgccatggcatcaattgctgtattgcttgcgtcaataccgtcgggtgtctacattgacaggctgaataagcgaagtttgatgatcgtgtgcgacctcttgcgagcggcgatattggttacagtcccgctatttgcattttacgatcagctttcgatgtactggctgtatgtcgtgtcctttttgtgctccgtgttctcggtcgccttcggaattgcctaccactcctactatccgatttttgtgtcgcgcaaggatttgcccgaggcgaacagcaagatcgaagcaactgaatcagctgcgagggtcggtggcccgggggtcggcacgttcatggcgggctggatcggagccccgctcacgctgttattcgatgtcgtttcctatattgccagcgctattcttctgagttttaccaaggctgacgagtcgagcaaggtgaaggtaaccaagaggccgcccttgctgcaggaaattggtgaaggattcaggctgctatatgccaattcggtattggcgcgaactgcggtgactaccattggctcaatgttctgcctggccatgatgaatgcggtctttttatattacttgattaccgatttaaagctttcaccgcaaatggttggtgttgtgttttttatcggtgaaggcggggggttgttggcagctatcttcgcaagtgctttgatgcgttcggttggcagtgcaaaaataatgtggtgggtagtctttcttagtccggccggcttcctcctggggggtgcgcaaagtcatccactgttgctatcgacactatatctatttctgacgtccgtccgctttgtattgtttgacattgcccagtattcctatcgacagtcttcttgtccgctggaaagcctcggcaaggtgacagcaagtatcagaacctgtatcggtattggggcggcaagcggggcaattgtcggtggatggctcggcagtgttgtgagtcccgtcgcgagtatattcatcgcgacggtattgatgtgtgtttcatcccttcctgtattattttcggcgttacggcataccagagatattgaagaccttcctgcgctgacccatgtagatcgctgctag

SEQ ID NO: 357269 - DNA, 222 bp, Pseudomonas aeruginosa
atggatagcaaaagcttgtatgacgttgtcatcaatcagcaagaacaatattccctgtggagcaacgaccggccggtgccgggtggatggaccgccattggtgtgaccggctctcaggatttttgtttgaactggattcaaaacaattggctggatcagcgccccggtttcctgcgcgacaacattgcgccgacaaagtcgctgtcggtcgaggagctgtaa

SEQ ID NO: 357270 - DNA, 6516 bp, Pseudomonas aeruginosa
atgaacagcacctttgaaataactaaccgtgcgctcgatctcttgtcccgttgtcttgagaatggtgtttgcctgcaccttgccgacgacagattcgggctgcagtcccttgagacgtcggcctcgcagcccctggaagcactgacaccggaacttcaaacgcacttgcagagcctgctgcaggaggaaatcggcaggcctttgcagggcggcacgctattgccgttgtcctggattcagcgccggcattacttcgtcacccggcacgaaggcgccgaagtttcatcaacagtgcctcatgcgttgcgcttcagcggcaagttggatcgagaggcactgcgcgacgctttgctccaccttcagcgagttcacccgatgctccgggcatccgtgcatgaaatgtacggagtgctctttcaatggatcgcgccaacggctcaactgaccattgaattcgaggacctttcgcacacgccggtcagttcccgagaagcacaattggcagcgttttcacttggggtcatgcgtcgaccttttcaactcgaccgcggcgtgctgatgcgcccggtactggtcaggctcagtgacgaagagcatgttctgctgctgccgttgcatcatctgattgctgacggcttgtctctgcgcgtgatcaacgacagcctgttatcggcctatgagtgttatcgaacttctggtcacgcggacctgccggcgccgagttcaacctatgctgacttcatctgctttcaacattccgagcggtcccggacggagaacgagcggcacctggactactggatcaaacgcatggccggcaaacctgtcatgctcagcttgcccaccgacaaggcgcggcctgcgacgccttcctacaaatgccgttacgttgaacgtgtgcttgatgaggctctgaccaacgcactcagtgactttgcaaagaagcaacatgtgacgccgttcatgctctacagcgcggcgtttcatgtcctgctggcgcggtattcgggtcagagtgaagtgaccttgggctaccctttcggcaatcgtattcggcgagaggacaccgatgtcgtcgggctgtttgtcaacacgctgctgcaacgcgttgacgtcagtgatgatcccgttacgagtgtgttcctgactcgagtaaagcgcgagatactgctggggacggggcatcatcgattgcaattcgacaagctgctggatgcattggatgtagagcgcagcaccagttatcacccgctgtttcaggcgttcatcggttattacggccaacaggcgaacggggtaaaacccaccagcgttgcggtcaaaccctacattgttgacaccggagcagcgcgtttcgacctggagttgtttcttcgcccgcaagatggcgaaaccgtcatgatgctctgggcgcaagatgatctgtttcgaccggaaacatccgccaggatgctcgcccacctggaaaatatcctgaagggcatgctcgcggctcccgaagaaaagatttcctctttgtcgctgctttccgaacaggaatccggggatctgttgaggctggcgaggggaggcgacccgctcctgccgggcaccacgattctgggacagatcgccgatacgtgccgcgcttttccagaccgggctgccgtgcgatttgagagacagtcgatctcttatcgcgagctggacgcggcttcgtggtatgtggcgcgatccctggccgatcgtggggtaaaggcgggcgatgttgtcgcggtccagttgcaacgctcaagggagttgccgatctgcctgctcgggattctcaaggcgggcgccgcatacatgccgctggatccccaggcgccgcagagtcgagtgatggagatgctcgatgattgttccccacgtgtcttgattgtcgaagaccgcgctatggcgcctcccggggagctgccttgggtcaccctttcttccttgttcacccaggagcaggctggtccgggcgatacggccattgcgcaggggccggcgagcaaggacctggcctacgtgatcttcacctcgggctccacgggacggcccaaaggggtgatgaatacccatgaggcgttgctgaaccgtctggcctggatgcaaaaggctttccctctgcaaaccagcgatgtcgttgtgcaaaagacaccgctgacgttcgacgtctctgtgtgggaagtgttctggccgctcatgtatggcgccacgttgttgatggccaaacccgaagggcacaaggaccccgagtacctgggggcactgttctcaagggagcaagtgagcgtcgctcattttgtcccttccatgctgagtgcgttcgtggctgccgaagtgttgccgtcctgcactcatctcagacaggtgttttgcagcggtgaagcactgccgttgcgcttggccaacgccgtcaagcaaaccagtgcagccgaattgcacaacctttatgggcctaccgaggcggccattgacgtcacttggtacacggtgaccgaaaacagcttgaaggccggcagcgtaccgatcgggtgtgccattgatgggctcgagatattcatcctagataaaaacctcaagctggtcccccccggcgttgttggagaaatccatatcggcggcatcgggctggcacgtggctacatcaaccaaccggcactgactgcacagaaattcattccctcacccttcagtgaacagggcgcgcggttgtaccggaccggtgatctgggcaaacaccgctgggatggccagatcgagtatctgggccggaacgacaatcaggtcaaactgcggggctttcgcatcgagttgggtgatatcgaaacggccctgatgcgcgtgccggccattcgcgaagcggtagtgacactcaataaggacatccatggccacgcgacgctagcggcattcctggcgagcgatgacgtcagcgcgcaactgatacgccgtgctcgcgaggcgctttcatcctccttgccggagtacatgattccctccctgtggtcggtcgttgacgagttctcgagattgcagtcaggcaaggtcgaccggtccgctttgccaatacctgtcgcgtatgccgacgcagttggcgctgcggggccgctcgagcaagcgacgttgagtggcgtggagcaaacattggcagccgcctgggcgcgcgtgctgggcagagtggtcacccaccgtgacgaagacttctttcatttgggcggagattcaattcgcagtattgaactggtcgtggcagcccggcgagtaggcttgcaactgagtgtggagaagattttccagaactccacgctgagcaggatggccctggttgccacgccgctgagtgcccccgtgttgatggccattgcgccattcggactgatttcagcggccgtccaggaacgcctttcccaggacatcgaagacgcctttcccttgtcccggctgatgaccggactttactacgagtcggaggccagcccggattaccacatctatacaacggcagtggagttggagggggcgtttgtcgagcctgtgttcaagcgtgctgtcgcgctgttgatgaaacgccatccctttttgagaagctccattgatgtgtcttcttaccaacaacctctgcaattgattcatcgcgacgtcgaggtgccgttggcggttgtcgatatcagcgacatcgatccggcagcccaggccgcttcgttcaaggcatggttcgatgagcagcggaccgtcaggttccaatggaacaaggcgccgttgtttgccatgacagtgcatcgttacagcgcctcgcggttcaacctgacactcgccgaaccctatcttgatgggtggagtgtcacgctggtcatcagtgagttgcttgagttgtatcagcagctcctggggcactctgtccccgtcgtcgagcccgtgcgcgcacagggcgagttcttgctcagggaggccgatgcgctggatgatccggaccacaaggcgttctgggcccgacagttcgcgtcgcctcatcaggggcaattgccgcttgccaaaggcagcaattaccgcacgctcaatgtgccggtctccagcgcgacgtccgataacctcaagtgtcttgcgcaatcattgggcgtgtcgatcaaggcggttctgctcagcgcccatttgcaagtcattgctttcatcagtggccgtactgaagtcatcacaggcctgatgtccaacagtcgtccggaaacgaaagcaggcacgtcggcagtcggcatgttcttgaatacgttgccgttgcacatcaacgtcgcgggcctgacgcgccgccagctaattcaagccgtgcacgctttcgaggcgcaggcgctgccattcaggaactacccgtttgcgcagatgttgagtgatgccggtatcgataacgtcatcgattccacgttcaactacacccatttcagaccttacgagcaattcgcgaacaatcaggggctgaagctgaagtccatcagggccactgaccagacttatcactcgttgaccgctcaattcagactcgatgtgttaacccagggcgtcggtctgttcgttgagttctccaacacggcgctatcggaagccgcgatggagcgaatcgcttcgtactatgaagcggcgttgttacagctggcgaccgaccctgagtccagggtctgtcctctggacagactcgcaggcagcaatgatcattcacttctggtgtcgccaccggtggaactggaagtctcccgtctgatcgccgcctttgatcagcaatgccaggcttcaccgcagtcattggcattgctctgtgaggggctgtcgatcagctatgcgagactgtctcagtgggtcgacaggttcgccgaaacgctgcgtgaagagcaggtggtaccaggttccgtcgtcggcatttgcgtcgagcgttctgccgagtatgtcgtcgcagtactggcatcgttgcgcctcgctgcaacctacatgcctctggatcatgcctgcccgaccgaacggctggggatgatcctgcatcaatcacaagcccggctgctgatcgtgtctgagtcgacccggggcaaggtacccggtgagattcatgccgtggcggttgatgcaatgccggtcgatgagcggcgttccaccgctagctggccactgaatgtgcggcatccggcggtcttgatgtacacctccggtagtacgggaacccctaaaggcgtcctgttgcacgatgaggccattctcacgcgcctgcagtggtcgagacgccaggaacccagcaaaccctcggacgttttcgtgctgagaacgccagtcggctttgtcgacggcatcgccgaaatgttcgatggactgctcagaggcgtgcctacagtgatcttgccggaccgcatcaaagacccggtggagctgatgaacttcatccagacccaccgaattaccaagttgacctgcgtgcccgccctggcaaacgagatgctcaagtcgggtgccgaggcgcgcgccaagttggccacgctcgattgcctgcacttgagcggtgaattgctcaaaggggagttggtggaaaagatccggcaacacctgccgggcgtcaatctcatcaatttgtatggttcgacagaggtttgcgcggatgccacggtgttcaaggtccaggaggctgcggcgctgctgactccggtcggtctgccgattcccggcgctcaagtgatggtggagcatgcggggggcggttacgcaccgatcgggacgcccggcgaactgctggtgggcggtcagatgctcgccctggggtacttcggcgatgcgaggcagacggcgcagcgattcacgccctctttgctcaatgatggtggacgcgtctatcgcacgggtgatattgccgtgctgagtgacagcggcgatctgaatgtattgggccgcgccgaccggcagataaagattcgaggcatccgcatcgagcccgcagaaatcgaagcggcgctgaaaacccacgcgcaggttgccgaagcattgaccgtacagcgtgtgctggaagggcgaaaagtgctggtggcctatgtccgcccggctgcgcgggctgatacggcggcaactgattcgttgatcgagcatttgtcgtcgcgtgtcctggtggcggctatcccggacgtgttcatcaccgttgaaagctggccgttgctgccgtccggaaaggtcgatatcaacgcgctgccggtgtatggaccgcaaagggccgagggccgccagcccgatgggcttatcgaactggagttagccgcgctctgggagcagcggctcaagacagcgctggtcagtgtcgaggatgacttctttcaacttggcggcaattcgttgtccgccattattctggccggcatgatcgggcgccgattcggtgtctccgtgaatgtgtcagatattttcgaccacagaaccctggcgaaacaggcgcatctgcttgaggtgaagctgctcgagaccgaagcagcagagctagcggatgaacagtga

SEQ ID NO: 357271 - DNA, 2178 bp, Pseudomonas aeruginosa
atgggaagtgcgcctttttccgaagctgacttaagcgactaccgcgcgtcatttgcaaaggtgtctgtcgagctttcccgggagctgcaagacattgcccggcaggacgactttctgcgagccgtctcctggcagaaccatcgtctgctggacggtgccgtgcgtccgttttgcgagtgggatccggccactcagacaaggcattccaagcatcgccagcgtgaagagctgatagccaactattggcaacgttactgtgtgaagaatgacaccatcggtttttttggtccgtcgggatggggcaccttcagcaacgagtcgaccacccgctacacaccgggtgaaacgttgatcgagcgccgagaagtgttctttgaatcctgggcgatcgattgcctggcggaatcattcgaagcgcttcctgcaattcgcgaatggttgaagccgcgccggctgacatttgtaaagatcgagggcgatatcaacttcaacggccccggcctgaaggtcaaactgccggctctggaaacggccgtgctgtcgatgtgtgacggcaagacgtccgttcacgatatcgagcgcgagttgtcaggcagttattccgtctcgttgatggatattcttggcattctcgatacgctcaaggccaagcgctggatcgtgttgaagatcgagttgccagccggggcccacccggaaatatgcctgcgccagttcttgctgggcattggcgatacgcagttgcaatcttcgttgctggctaggctcgatgccatggaagccgcgcgcgacaagatcgaatcgagcggtgacgctaccgagctgacccaggcgctgtctgagctggatgcgcttttttccgggtttaccgaaaccagctcgacccggaacgaaggccgtacctacggcggcaggacgctggtctaccacgatagtcgacgcaatatggcgctatcggtaggcgaggatatcaagcaaagtctggcgccgctgtacctgctggccaagagtgcgcgctggatttgctggaggctggggactgaggttcggcaattgctcaggcaaacttatcagcgctgcgtcgaaaagcacggggcgcaatttgacctgaccaccatgtggctggagtcgttgggccccttgtcaaaggtcatcgatgcggcgctcgacaacattgatcaggtcttccgggccaagtgggcgaaaatcatcgctgtcgaggatagcgagcgacgagtcgagttcacgtacgcgcagctagaagaacgggtcaaccaggagtttgacgccccaggggccggttgggagggcgcgcgctacttttgcccggatgtgatgctttccgccgtcgacattaatgacctgaaatcgggtgacttcaaactggtgctgggggaaatccacctgtcaatcaacaccatgagaagctcatgtttcgtcacgcagcaccccgataaatcagcgttgctcaaagaggtggacaaggatttccccaaaccacagttgctcaatgtcctgcccaaggaaagtccacctcgtctgtcggtccgcacccacccggtgctgtcgcgagactgcgattacatgatcgaactcaactatcacaccgtggatgcggcccgcgatcgcctggtgaaaagtcgagacaccacaatcctcgaagaggacgggctgatcaagatcaggatccccaatggcgaaacgtttgatctggtcgacgtttacgctgagctgctgatgggccgtgtgattgacaagttccagttgttctcggaccgcgcgcacatgcccagagtcagtatcgataaattggtgattgcgcgagaaagctggcgctttcaggcgcaagacctggaattcgccaatgaaaaagatgaggcgctgagattcatgaaggcgcgcagctggtggaaatctcaaaacattccgcgctttgtcttcgtcaagtcgaaaaccactgaaaagccattttatgtggatttcgaaagcccgatctttatcaacatcctttccaagttgatacgacgtaatcaaacctctgaggcaatcaagaacaaagaggtgacattcgtcgagatgctgccggaccaccaggatctctggttgaccgatcatgccggtaataaatacacgtcggaactcaggtttacctgggtcgatagctacccgatcaaatga

SEQ ID NO: 357272 - DNA, 1323 bp, Pseudomonas aeruginosa
atgcgtattcatgaagacgcaggacaggctgacactcacgagtcgttgttcagagaggatgctgcctacgtctggcatccttgggcgcctaaccgcataagcaccagtacggtcattgccgtcgctggggagggcagccacatcacggatgccaagggggatcggtatctggatgccaaggcgtcaggtatgaatgccacgctggggtacgccaatcagaagatcgtcaaggccataacggctcagctggaaaagttgatgacctacgacatggtcgaagggggcaatgcgcccgccatcgagttggcgcgggcgattgcccgggtgaccgcaccgggcttgaccaggacgtttttttgcaacagtggctcggagggcatcgagacggcactcaaggtatcgcgccgctatcacaatttgctcaacgacccgcagcgatcgttgattgtgtcgctgaaaaactgttatcacggcaccaccctggccgcctctacgtgtgcgacatcttctgccggcgacgaacaagggctgcttcccgcaggtttcgtttcagtgccagggcccgactgggaggtcgtacgccgcgaaggcctgtctgtgtcccgctctggggtcgaggcgctcgaaggtttttttgccgagcatgggaaaaacatttcggcattcatcgtcgagcctgtccaaggcattggcggctacatcgtgccggacaactatctgcgggcggcgcgagcgctctgcacccagtacggtgcgcatctcatcctggatgaggttctgactgggtttgggcgtaccggcaagatgttcgcctatgaatatgcgcacatcacccccgatatcctgatcaccagcaagggcttgacggccggttacatgtcgctggcggcggtgaccacccatgacatgattttcgatgtgtttgaacgagaaaaggaaatgtccggcttcagccacgggcacacgcactccgggcacgcttcggcttgcgcggcaggccttgcggtactggatattctgcaaaacgatggggtgttggcgcgcgtccatcagttatcgacggtgttgcgcgaagcagtcggtgcgtgcgccgagacggcaacggtccgggatatcagatgccgcggattgctcatggcggtcgagttcgacagtgtccagcgcgccctctcaatcaagaagtacctgcaggacaacaaaatactgatccgtcgcagtggtcggaacatcatttttgcaccgccgctcaatatcgacctggctgatatcgagtacctcgctgcgcactttctcgacgctgtcagggtcgcgtcagtgcaatga

SEQ ID NO: 357273 - DNA, 1053 bp, Pseudomonas aeruginosa
atggatgaagctttttttttcgatgacgtcagcgtcgatcatatacgcctgtatgtgtatgatcttgagtcggcctcactgaccctgggcgaaaaatacggccttgcgtcatgtcatttcgatcttccggcctgctctcaggagacagagcgttcgcgctgcttttgcaaggaagatatctgcattgtcctgacccagccgctggtgccgtcgcacccgggcagcgagtttttgcaacggcatggcgaaggggttgcggacattgccttggcggtgccggatgccacgcgggccttcacgctggccgtgtcgcgtggtgcggtgccgcacctggctgcgcagcagaaaggcggcatcgtcagcgcttcgatttttggcgcggggaacctcgttcacacgtttgtccagcgaaaagcgtccggacatcggcgtgtgccggaagatgacataccagggagaacagtcagcggattgcatgccttcgatcactttgccgtgtgcctgcaggccggtgatctgacgacaacctgtgccttctacatgcaggcgctggatttctccgttctctatgaggagaaaatcgtcgtgggcaaacaatccatgaactccaaggtggtacagaacagatccggacgggtgacgttgaccttgatagaacccgacctgagttatgaagcagggcaaatcgacagcttcattcagaagaacaatggcgcaggcgtgcaacatatcgccttgcgtacaacgaatatcgtcaagtcggtccaggccctcgctgaaaagggtgtcgacttcttgacgtctcccagtgcctattatcagcagctgccggagcgtcttgatagcctcaaatatgatgtcgacaaactgatggagttgagcttgctggctgatcaggaccatgccggccagctgtatcagatattcgccaaaccctctgatcccgattgccattttttctttgaaattatcgagcgtgtcggggccaagacctttggcagcagcaatatcaaagcgctgtacgactctgtagaaatgagtaaggcgtcatga

SEQ ID NO: 357274 - DNA, 1083 bp, Pseudomonas aeruginosa
atgatcgcgactcccgttaaccttgccgattattcggaactggcgcgcctcgctttgtgcgactcgatctggggttttctttgcggtggcagtggcgaggagatcgcgctgagggccaaccggacggccctggatcgcatttccctgttgcctcgtgtcttgacgggcctgaccggacacagcacggcttgcacctggttcacacatgccagcgcgatgcccgtcgccattgcaccgatggcctaccacaagctgttcaatccgcaaggcgagctggccaccgcacgagccgcaaaagtcagcggtgtgccgtttatcgtcagtaccctgagcagtgtttcgatcgaggacatcgccgcagtgggcgctgatctctggttccagttgtactggctcaaggatcaggcacaggtccggtccctgatcaagagagctgaggatgccggctgcaaaagcatcatggtaacggctgatgtgccgctgatggcgcggcgtaaccgtgacttgcgtaacggattcgccttgcccgctgatgtgcatgccgccaatctgacgccgagtgcgcatctgcattctgtttcgcataccggcagtgccgccacttccgctgtggagcggcatacccgggaagcctttcttgcgggcttgagctggcgtcacatcgagcaactgcgcgccatgacgaccttgcccattatcgtcaagggggtcatggaccctcgggatgcgcgccaggctttcgaaagcggtgctgattgcgttgtggtttccaaccacggcggtcggcagttcgatgccgcacccggagcgctggagagtctggcgaatattgtcgaggtgaccccgaacgaatgttccgtgctgtttgacagtggaatccgaacgggtagcgatgttctgaaggccatggcactgggggctgatggtgtgctgctaggcaggccggtcctgtggggcctggccgcgcaaggtcagcctggcgtggagcgggttctcgcgttgctcaaggatgaactgctggacgccatggtcctggccggatgtcattcgcccgctgacgccaaagcgctggttgtaggataa

SEQ ID NO: 357275 - DNA, 1317 bp, Pseudomonas aeruginosa
atgaatctgaatctgaatctggacgatctgcacgccagcgtcaccgacccggcgctgaactccatgaacttcctcaatgaagtggccgagcgatatcctcaagccatttcccttgccgctggccgtcctcacgaggatttctttgagctggagacagttcatcgagccattcgtgtctttacccgttatctgactgatgactgccaaatgagcgaggagaaggtacggcgaaccatttttcagtacggacctaccgctggcatcatccaaggactgatcagcgagcacctggccatcgatgaagacctgaaggttgacccgcacgcgattgtgatcacgtcgggatgccaggaagcaatcctgctgacattgcgcgcactctgtcgtgaccccggtgatgtgcttctcgccatcaatccgacctatgtcgggctgacgggagctgcccgcctgctcgatattgaggtagtggcagttgccaccgacgcgaccggcgttgatttcgctgacttcaaggcagtcgtcgcgggcttgcgtgctcagggacgcaagcccagggcctgttatgtgatccccgactttgcaaacccttccggggcgagcatgagtctggaaacgcgtcaggcgttactggcattcgcggctgatgaagcgctgatgctcatcgaagataacccttacggatacttccacggggatgacatcaggctgccgacgttgaaggcgctggataaaacccgccaggttgtctacctggggtctttttcgaaaaccatatttcccggggcaagagtcggcttcgtggtcgccgaccagctcatcgagcccgcgggcacagccggtttgctggctgatcagatcgccaagatcaaaagcatggtgacggtcaacacgtctccgattgtgcaagccatcatcggcgggcaattgatcgagcatcggctcagcctctcgactgcgacacgtgatctgcgcggtatctacgagcgcaaccgggtggccgtgctggctgccctgacagaaaaactgggggcgcatgatctgcccgtcagttggaatatcccggcgggcggattttttcttgtgctgacggtaccgttcgctgctgacgaagcagcccttgcacagtgtgcgcaagagttcggcgtgatatggacgcccatgacccatttctatctgggaaagggcggggcgaaccagctacgcttatccatcagtgccttgaaccccgagcagatagaggatggtgtcgagcgtctgtcccgtttcattcggatgaggcttgatcgtgaactcaatgcaacaggtgtatcttag

SEQ ID NO: 357276 - DNA, 939 bp, Pseudomonas aeruginosa
atgtttgcagggtcgctacgcagcagcaatcgagcgttggcgataattagcctgatccaaccggcgcgcttcaatggatataagccgtatgcgtatctcaagaatgtgcttacgcgactgccgacggagcagactgatcgatgtctgtcagttactgtcgcatcactggcgtatataagtgtgcctatggatgagcgttgccttagacatgttattaatcgttacaactgctctgcttgccaagttttagccctgtactttactgatttttatatgatgaggattgagtgcgttatgaataattttgtccagcgggacaggagagtggaaaagaatgaatacaccggcgtaaaaattgtgggtgctgagttttataactgtgacttttcacaagccgacttgagtgaaacacaattcgttgattgtaagttttatgaccatgatgctgaacttggctgcagtttcaggggcgcaaatttagcgaggtctgtgttcgcaaagtgtgatcttacaatgtgcagctttagcttttcaaaggcattaggtatagagatgtccggatgcaaattacaaggtgccgatttttctaatacaagtttcatgaacatgattacgcacaagagctggttctgtcacgcaacaattacggactgcaacctctcgtacgcaattttctcgagagtaatactggagaaatgcgatctatggggcaatagatgggttggaacaaacgtcaaaggagcaagctttaatggctcagatctgtcaggtggagagttcaactcatttgactgggagcatgcggactttagagggtgtgatctgagcagctcagatcttggaatgcttgatgttagaagggtgaatcttgacggggcaaaattggaggtggagcagatttgcaacttggtcagagcgcttggagttgaggtagtatga

SEQ ID NO: 357277 - DNA, 276 bp, Pseudomonas aeruginosa
atggagttgaagtggaccagcaaggcgctttccgacctagcgcacctttacgaattcctggccccggtgaacaaacctgccgccgcgcggacggtgcagacgctgaccaaggcgccgacgatcttgctcacgaacccgcgcgtaggcgagcagctgttccagttcgatccacgcgaagtccgacgaattctggtcgggcagtacgaggtgcgctaccagatccaggacgagaccatctatgtgctgcgcttgtggcatacacgcgaagatcgatag

SEQ ID NO: 357278 - DNA, 270 bp, Pseudomonas aeruginosa
atgccgaaagctgaaactcgcgtgctgaccgcgcacgttcctgtcccgctcgccgagaaagttgaccagttggccgaccgcctcgaacgttctcgcggctggatcatgaagcaggcgctctcagcctggatcgcccaggaagaagagcgcgaccggctaacgcatgaggcactggctgacgtggacgccggccgcgtcatcgaccaccaagccgtgcaagcgtgggccgatagcctgagctccgacgaaccgctgccggtgcctcgttga

SEQ ID NO: 357279 - DNA, 459 bp, Pseudomonas aeruginosa
atggccacaatgcttactgcgcagattctggaacagcctcacacggctcacgactatttgcattgggtgaagggcctcatcgccgatgttaggcaggagcctgacggtcttcgccagatcagattgcgcattggattcgctaagaaccttatggaggaggcgcttcccatcggactcttcgcttcacacttcttcgcggggagcgaggaggtcgaaatttcactcaaggtcggtagccaaaactacgacgcgacggtccgagatgctcgctctcggcccagtggtgtcgagttcctggaggtgacaatggcctcagaaggagagacggactacctccgcatgcacatgttgcatgaaaccggctgcgtctctggcctaggttttgtacgaaaagtcgtcgggcgaaggtcaggcgaggcaaaaacgggtaaggaagcggagtttacgagctgtaaatga

SEQ ID NO: 357280 - DNA, 240 bp, Pseudomonas aeruginosa
atgattgctgtacgcgatgacttactgaagttgcatgcgatctccctggcgttgcttgaaggcactcttccgccggttacgaccgaggaatccaatgtctgggaggtagccgaatcagtgctgcttgatcttgagacgttgggctcctggattcgcacggctcagatgacgatcgcaccgctggtcgatctgatgccagagcatagactccgtgagctgccagatcgcgaaggcaactga

SEQ ID NO: 357281 - DNA, 3816 bp, Pseudomonas aeruginosa
atgagcggcgcgacgctgttcatgctggttctcctcctggtgctgctggcgctgctgctgggggcgctgggctggtggtggcgaacccgcggcggtacggagatccgcagcttctacgcggcggtccggcagatggagcgcgagcagggctggcagggccgctacgaagcgccgtggctgctgatgctcggcaacgagaccgagggcgagcagttgtgcgccacctggcgcctgctgccggtggcgcgcccggcctggttcggccgctggtggtcggacggcgagggggcgatcctgctggtgcccgagtcggtgttcctgcccgacgagggcctgcgccggcaaagcggcgcctggctgcgcctgttgcgtctgttcctgcgcctgcgcggcaggcgcgcgctggacggagtggtctggaacattccgctggcgcggctgcaggatggcgagcaggcggccaacctcggcctcgccgcccgtcgtcgctacgtggaactgacccagcgccttggcctgagcctgccggtgtacgtggtgatcactggcctggaagacctgccgggtttccaggaacttctcgcggcgctgcccgaggaggcgcgcgagcgcgccctcggctggtcctcgccgttcgccgccgaggcggcctggcagtcgcgctggtgcgagcaggcgctggaggaaatcaccgccaccctgaccgagtcgatcgtcgaactcggtaccttgcgcggccaggtgaacaacgacctgtattgcctgccgccacgcctggaaagcctccgcggttcgttgcaggcgctgctcgaaccggtcttccagggcaacgccaggggcgaggcgccgcgctttcgcggtctctacctgagcggcagcgaggcggcgggggcggcaagcgacgaagccctgccggcggtcgacgcgccgcgtcggcgcagcagcttcgccagccaactgtgggcacggcggatccttgccgaggaaggcctggcccaggcggtgccgcgcatcctccagctgcgccagcgctggcagcgcggtatcggcctcgctgcgctgtgcctgtgcctgctctggggcggcctgatgacctgggtctggcgtgacgcgctgcgcgacgccggcgaactgtcgcaactgctgcatggcgccagcgagcgctaccagccgctcgacgacgacacccggcgcgccgcccaggtccggcagaacgtccaggcctggtggcaactggtggcacaggcgccgcgctggcgcttcacctcgctggcgttccccagttcctggttttcctccctggacgcacgtatcgacagcgcgtatcgccgcgtttccgagcgcctgctggtgcgcccgctgcgcagcctgctggaaggcgaggcgagcgacctgcgggcgatccgcagcgacggccagcccggcctgaaggagggcgacgaccccagccagtggaaggactacctggcggcgaaggacctggtcgcccgcgccactaccctggagcgccacaatcgcctgttcgcccaggccatcgacaaccgcaagacgccgctcgacgatctcctgcaactgagcaacgacgccctgggcagcagctacaacgccggcagcctggcgcgcctggcctactacaaccgcacgctgttcgccgagcgtccggccgatctcgccgccctcgacctgggccgggtcggcgccacggcggcggataacttccatgacctgatggcccgctggctgaacgcctactttctcaccgacagcctggaacgcaccggcaatgccctgacccaggaactcgcgcagctcggccaggaacgagatgctacggcggcccagttgctgggggtcggcgaattgatcaaccacctgcagcagcaggtcaaccgcatcaacctgatctggggcaatggcgtcggccaggatctcgtccctggctaccagaacctgctcaagagcgcccagcaaagcagcctgctgggagatcgcgtggaggaactgcagaacctcacggtgcagttgcagcagcagttccgcagcgaatggatcgcgcctccggaggctgccggcgacggcctgctggtgaaacagggggcgaccctcaagctggccgatgacctgctcggcctgaaacgcgccatcgatgacctgaagaccaaggacttcgtctccgtggccctggccggcaagacgctggcggagcactccctgctgagcatcgacgacatcggcgtgacccaggcgttgagcttcttcaacgacttcagcggctactacgagagcaccctgccgtcgctcaacccgcgctatcgctactcggtcctgcacgccgccgccagcgcgacgaccgaggccatgtggcaaagcctcgggccgcgcagtcgcagcctgaccagccgcaatgcctcgcgcttcgacgtgcaggtcaagcaggtccaggcattgcaggcggcgctgctggagttgcaggacatgcaggccggcgcgcgcctgctggccagcctcaacgcgctggccgtggccgatatcggccaggccctgcgcgacatcgacgagcaggcggtgctgcgcgagccggtcgatttcagtcgctggtcgggcgcgccgaatttcggcctgcaggcgttccgcgcccaggacagcgccgagctgaagcagagcctgaccagccagttcaatgccatggccgcggtcgccgagcgccacgccccggcgctggagtggctgcaggcgcagcagtccagcctggccaccgccgactacaacgcgttcgtgcgcttcagcgcgctcaacgccgaactgcagaaattcaaggccgacaacccggcgagcaccgcggcgcagctggcgaagctggtgggtaacgatttcaaccagatggacatcggcagttgcgccgacattctcaacggcgtgctcctgccgtccagtcgcaacgacctggcgacgcgcctggtggacctgcgccagggcgcgctcgggcgctgccagtcgttgcaacagcagcaggcggcgcaggcctggaaggacctcgccgactacttcaaccagtacctcgccggacgcttccccttcgcctacagcctggaagcggccgatgccgagccggggcgggtgcggcacctgctgaagctgatggagacgcgcttgccgcaggtgcgcgaagggctggcccaggttcgctcgccggacctgccggccgccgaggacttcgtccgccgcctggagcaggcgcagggctggctcggcccgctgttcgagcgcgacaagtcgggcctgctcggcgtcgccctggacatcgactggcgcagcgaccgcagcctggaacgcggcgccgaccaggtgatcgcctggagcctgtactcgggcgaccaggaaagccggttccccggcgcgcaggacaagggcctgacctggaacgtcggcgatccgctgaagatcatgctgcgctgggcgaagaacggctcgcagcgcccggcagacgacccgcgccaggccagcctggcggtggccgacctcgaggccggctggagctaccagggctcctgggcgctgctacgcatgatgcgcgcgcacttctccccgcagcgcccgccgaacgtcgactacacggagtttccgctggtcctgcaactgccggtgtatgcgccctacagcccggaaaacgaggcgcggatgttcctccgcctgtcgttgatgagcctgggcggcaagaccccgctgtccatccagccgctgccggtgcgcgcgccgcaatcgccgttcgcgacgctgttgccggccaccgtcgccagcaccggaggtaccccatga

SEQ ID NO: 357282 - DNA, 1332 bp, Pseudomonas aeruginosa
atgagtgttctgcctgacgcggtgtgctggcacgaagggatgcaactgcttccccagcatttccagttgcagggattgcgtgccgaggcgctggcggcgcgcaccggacaggcctgcaacccttggttctggggcgtgaccgccctggaactggacccctcggcgttgtgcgccggccaggtgcgggtcctgcacctcgaagcgatcctgcccgacggtctgccggtgagcgtgcaggctggtgtcgacgcgccgctggagttcgacctggagacagcgctggcggccgccgaagagccgctgctgaacgtccacctggcggtcagtccgctgtggcgggcgggtcagttgctgccgctgaagggccgtctgcaatcgcgggtcggcgcgccgctgccggacctggccagcggcgagcaccccgagccgatcaccgtctggcgagcgtcgctgcggctggtcggcgacgacggcaaggccgactccgtgtgcctgccgttgctgcgcgtggcgaaggagggcggcgcctatgtcagcctgccctacgtcccgccgacgccattggtgctgccggaatcgcccctgggcaggcgcgtgcagtcgctctgcgcgcgggcccgggagaaggcgctgttcctcggcgggcgcctgcgcctggcgcagcaggcgggcaaccaggacgacgccgtggaagtccgtcgccagctcgccgcgctctggacccgcctgccggaggtggaaggcctgctggcaagccgcgcggcctcgccgctggccctgcacggcagcctgctgggcctggccggggcctgggcggcgctcgatccgctggccggcgtgccggccttcgaagcgctcgacttcctcgacctgcggcgtggctacgagccgctgctggactggctggagcgcgccatcgagtcgatccgcgcgggctaccgctgcctgccgttcgagcaggaggaacaggtgttttccgtgcgcctgcccgatccggcgccgcgccagcgcctggtggtcggcctgcggatgcccgccggcgccggcgaacaagcggcggctgactggctggagcgcgccatcgtcgcctccgatccgcacctgccgttgctcgcccggcagcgcatgagcgggctggcgcggcagccgatgaatcgccaggaacaggtggcctacagcgtcggcgacgacacccgtttgttcgtcgtgcagggcgccggcgactggttcgatgccggccagccgctgcgcatcgtcgcgccggtcagcggggttgccagcagtccctggcagatcgtgctgttcgtcgccgacggcagcgacaacacctag

SEQ ID NO: 357283 - DNA, 1437 bp, Pseudomonas aeruginosa
atgtgtataagagacagcctcgagctggaagtgcggccggaggaacaccgtggcgcggtaggcccccggtttgccggccacctcgctgacatccacccgcgcctcgcgcagcgggtactgcgccttgatttcctgcggtgcgttgtcgttgatcagcacgtagtcggcgatccagttgttcaggtaggtctgcacgttgtcgcgggtcatgaagctgccgaccttgtcgcgcatgatcaccttcaggtagtgggcgaagcgcgatgccgccagcacgtacggcagcatcgccgacaggcgcgcgttggcgttggcctcgttggtgttgtagagcctggccttgttggtggtctggccgccgaagaacaccgccacgtcgctgttcttcttgtggcacagggaaatgaagccgagatcattgagttccttctcgcggcggtcggtgatcgccacctcggtcgggcacttcagcgacaggtcgccggagctggtgcggaatgtgtgcgccggcaggccctcgaccgcgccgccgccttccgcgccgcggatcgccgcgcaccagccgtacttggcgaaggcctcggtgatgcgctgcgccaggacccaggcggcgttgccccagaggtacttggagtggtcggtgccgttgacgtcctcgacatagttcatgccttccaccggtcgcgtctccgggccgtagggcaggcgcaggaggaagttcggcagcaccagggacacgtagcgcgaatcctcgctctcgcggaaggcgcgccacttgatcagctccaggctctcgaagatcttggtcaggtcgcgcggcacggccagttcggtgaagctgttcatgtcgaacaggcgtgggctggcggcggcgatgaacggcgcgtgggcagccgcggcgacgttcgacagcttctccagcaggccgatgtcctgcggatggcgaccgaaggtgaagtcaccgatcagcaggctgaaggggtgtccgccgaaggtgccgtattcctcttcgtagatcttcttgaacagtgcgctctggtcgaactcgaccgccttctccaggtcgttctgcagttcgttcttgccgacgttcagcaggcgcagcttgagccgcgcgctggtctcggtgttgctcaccagttggtgcaggccacgccaggaggcttccagcttctgcaactcggggtggtggatgatctggttgagctggtcgctgatcagcgcatcgatctggctgatgcggtcgttgatcatcgccacggtgtccttgtcgacggccatgccctcgtcgaggacctgggtggcgaattccgcgagcatgtcgcgggcatagtcctgctggctgtcgtcgtgggccatgcggcccttggcgatgatctcgtcgagcagggacagggtctgggtcgaactctcgccggattgttcggcggcggatga

SEQ ID NO: 357284 - DNA, 969 bp, Pseudomonas aeruginosa
atgaatttcaggcgccttggccactcggggctgaaagtttccaccatcgcgctaggaacggctcaatgtgattggtgggtagatgaagcgacatcacatcgtttattcgacgcatatgtcgacgcaggcggcaatttgatcgataccgcagacgtctatccagttttgggcgatggcgtgggtggcagagcttcagaggagttcgtcggacgctggttgaaaaccacggccaaacgtcacgatgtgttgttggcaacaaaagtatctgggcggatgggtcccggaccaaacgaagagggactatcttggcggcatatcacaaaggcagttgagggttcgctgcgccggttgcaggtcgactgcatcgatttgtatcaagcgcatgatgattatgacgacgttccagtcgaagagaccttgcgggcgttcgacaacctcgtccagcgagggctggttcgttacactggatgttccaacttcaaggcttggcgactgatgaagtcgctcgggatcagcgaacactgcggatggagcagttacgttagcatccaagaacgctataacctgcttgaacgcgtccgggtcgaggctgaactacaatcgctatgcgctgcggagggtgtaggtttattgccatacaacccattggccaaggggtttctttgcggtcagtattaccccgacgcgaagttgccgggatcgccacgggcggagggagtgcgcagcgtctacttcaatgagaggaactggcggactcttgaggtcgtgcgtggagttgctcaggaatacggcaagacatgtacgcaagtctcactcgcttggttgctctcacgtccggctgtaattgcgccagtggttggcgctagtactgttgagcaattgctagagatcatgggggccgcgcagctgcaactatcgcagcacgcactgtgccaactgaatgaaatcagtaacgcctctacaatatga

SEQ ID NO: 357285 - DNA, 1974 bp, Pseudomonas aeruginosa
atgaaatccctgaatctgggtattctcgcgcatgtcgatgcaggcaaaaccagcctcactgagcggattcttttcgaagctggagcccgggtctgtttgggcagcgtagatacaggcagcacattcactgacagccttctgcttgagcgtgaacgaggcattacgatcaagtcggcagttgcctctttcgagctgaatggggtgcttataaatttattggatacccctgggcacccggatttcatcgccgaggtggaacgcgcgcttgtcttgttggacattgcgatcatagtggtatcggcggttgaacgcgtccaagctcaaacccgagttttagtaaacgcgctagagcgaatggagataccgtacgtattcttcattaacaaaattgatcgcaaaggggcaagttttcagcaaaccttggaagcgctcggcacgcagctcaagtgccatccgcttgccctatgcgatgtgaagagtgctgggtccagcatggcagtcgttgagtacgacatgccgctcagttcgtggatgctgtctcaatggctggatgtactttgcgagcatgatgatgtgttgctgcacgaatatgtcacaacccccaaactcatcaataaggagcgccttgaacaggcgttacgtacgcagcttggcgataacctagtaaatcccgtgttcgctggatcagctatcactggggctggtgtcgcagcaatgatcgaagcgatcacgtatctggggccaattaggcattgcaacgctaatgcccccctgaacgcatcagtcttcaagatcgatagaggttggggtggtcacaagcgctttcacctagtgattcttgcagggacgttgcatctaaggcaaaccgtcgaaactccgcatggctcctgcagagtcaccggaatttatgtgtctgcaagtggtggcctacaatccgcgagggaagccactgcaggtcagatcgcatgtgttatcgggcttgacggcgttcgcattggtgatcgtataggcgtttgcagcgcgcgggacgaaggagtgcatacctttacacctcctgcaatcgaaacacatgtatacgcagcgttgtcgattcagaccaaagcactttgggaagctctgatcgccctggccgagcaggatccgctaattgacctgcgaaggaatactgcaggtcagatgttcgtctcgctgtacggagaagtacagaaagagatcatccaagctatcttgcaggatgaatatgctatccaggctaagttcgaagagagctctgcaatctgcgtcgaagcattgcttggcacgggggaaggacttgaatcgcttggtgacccttctaacccatttttggctacggtagggttacatgtcactccgagagcacctggatcgggacaaatatttacccgcaaggtccatgccggtttaatgcccgcgagcttttacaaggcgatcgaggagtctgttatcaaaactctcggtgaaggaagacatggatggccggtatgcgactgcgaggtcaccctgacgatggtggattatgaatccccttcaagcacggctgctgactttaggcatctcacgccgctcgtgctagctgcagcgatcgaacaggcgggcaccacagtatgcgagccgcgaagccagtttcatatcgaggtccccatagctcagagtgcatcgatccaaacgctactggccaaggcaggggccatcactactggcgcgacgataagcgaaggaacggttcggatcaaaggctcaatcgtcacaactaaaatttacaaactgcaacatgaaattcccaacgtcaccagcggtctcggattcattgaaagtgaattcgcggcttatgcacctgttcccggagcacctcctagccgtgatcgcagcatggccaacccttaccataggcatgaatacctgcgccatattaggcttgggactcgcattggccaaccggttaacagcgcctga

SEQ ID NO: 357286 - DNA, 1254 bp, Pseudomonas aeruginosa
atgcacagcaaattggatgacgcattttcacgcgccgtgtttttttacgaagatgcaggtgcgcatcagacaaactggtctcgctccgtatgcgcaggcttggccgaacagaactttgacgaagtgccttatcgggttcctcagctgcttgaaccctcaacgctgtttgaggtagcccaaagacactcaatcggaattgatgaactcgaatatttctcgtatcccatggatggtccggtggccaaagttaagtggctggcggacatgctggattgggcgccccccgtacagatgcttagcttggcccaatgtttggccgccagctgcaggtaccgcttcgccaatgaagtgctggcgaaggtaccgtatgagagactcttccccgatcaacggttgacctaccatctcacccggtttgccattcagaatcgcctagaaatcacttcatcacatcaagaagatttcaccgcgctaagagcgctcatacaatcaaatcaaacagcccccgctagggtgttggacgtatgctcgcaggctattgtctggaaactgaaaggcaacgcgatcaatgacgaattgaataggtggttcattgacaccggtgaggcagctgctaagcaaatagcatcgagctacgaaccggttgatctggtttcactttcttcgttttatcgcggattggccatggtgcctgctgctaaaggtgatatctcggccacgcggcaatacatgctgctagcggaaaactatgccgaggcggtaattaacagcgaaaagggacgaagtatccctgcgagagaagcacgcaagaccgtctacgagtcgaagctgaaggaaatgctctacgttgcccgagatgttgagaatgccagggaagtagcggaagaactgattcacttcgatccacactggagcatttcctatcatgaagccgcagaggtggaaatgaaagatgggcagtggcagcgtgcttctcagcgttttcaggaggcttacgatatcggtttcccgcgacggacttactctcagtacatgatcggcgcttgtaaccagcaacttgggaagtttgacctggcactggatgcgtttaaaaatactcttttactggatgctacaaacatatcagctggaatttccggatatggagtggcacgtgcgcatctacccgagcacatgtctttcttcaagtcttacattgacgactgggaagccgccgggctgatgacggaagaatatcgggagatgatccgatga

SEQ ID NO: 357287 - DNA, 435 bp, Pseudomonas aeruginosa
atgagtacaccgcttgataaaatcaatattttgggtgtcgatcatattcaactcgacgttgcaaatattgaggaaagcctagatttttatgcgcgagtatttggctttgaagttaaagaagtaggtattcgcgcatttacgcgctggatggtaatcggtaccaaccaagcactttatttatgtatgcacgaatatgccgaaggtcgtggcgtaaaaaatgacggtctggaaataacccattttggaattttggttaaagactttgatagtgttctgtcacagctgcgcgaccatggcgtcaaattacttcctgattatgaggttaactaccattcctctcgctctgtttattttctggacccgaatggctacaaggtcgaaatatccgaaaaatatggcggcggcattgagccggccggacggatactatgctga

SEQ ID NO: 357288 - DNA, 1140 bp, Pseudomonas aeruginosa
atggatgaaaaattcctgggccggagcgcagaggcggattacgcaaagcacttgcagaccacttggtacaagaataatcaggcgcttcgctgtcaccgcccatggcgaaatacctcgtcagtggactggcaattgccaccctcttatcagcgcactatttcctgcgaagaaagggtatggagcattccatgccgaatcgcggatgatcgtattgtatttggttgttgggacaatagcctgcaatgcgtgcgcctgagtgatggcgcaagcctttggcgctttaccactcaaggcccggtttatagctccccagctgtatctgaagatggcagcttcgtcgtgggctgcgaagattatgtattgcgtcggataagccgtgaaggccaatgtctctggacctttgaggcacaaggggcgtttcatgcgagtgcgacaatcgactgtgcgaagaacattgtgtacgcaggcagctatgaccacacgctttacgctcttgacctcgccacaggcacattattatggaagcgatcgttcgacgaacaggtcgaggatgacctttatagctcaccggcgctgaacgcggacggcaacatcattgtgggcacggacaatattctgatgtgcttaagtccaacaggcgaagagcgttggagaataaccgagacaagcaggttcgaagggactgcggcgatcgattatccctctgggcgtggaatcattggcacagaaatagatggaaaaattattgtatttgatactagaaacggtgaagttctcaagcaattcacaacggacggcttcgtagtttcatgcccgagcctgtccccccagggggtggcgtatgtcggcagcaacgatgggtatgttcacggtattgaccttcaaacactggaagtgctgtggcgggtaaacctaaagtgcgagtttaggtacacgccctttactgtgcttccaagtggcgatgcgttgtttgtaggcaccgatgagcgtctgcattgtctcgcacaacacacaggagagactctgtggtgcctcgaacacaggggaggctttcattcttcgccgttgctgacggacgatggccatctagtgatcggctcgcatcgtaatgcagtgcatttttatcaatgggtcccctag

SEQ ID NO: 357289 - DNA, 648 bp, Pseudomonas aeruginosa
atgagtcacgaactggaagtcgaagcgcttttcgacgaatgggcaatcgaagatggggctgtggatatggcccgagaacattgggctcgcgtcgagccagtattgtctgcactgacgcctagtgaaggctggtatctagaaattgggccgggcaatggttatgcactcgagtacatagccagatcaaagttcgccaacggcagagtccgggcggtggagctcagccaggaaatggcgaacatgagcgccgctagagttcaggacttggacaacgtctccattgatgtcggaagctttctgaactggcatgcaccgaaagacgtgaaattcgacctgatcttttctatggaggtgttctattacttccaagacatttccgccgcaatcaaaaaagcctcaggcctactcgcgcctggcggtgaactgatcgtcatggtggactattacgaagagagtgaagaatcgcgagactggtcggaggagctaggcgtgaagcttacacgttggccgcaaagccgttacctggacgcatttaaggctgtgggtttgcaaggggttacacaagaaataaaaagcggtggcgttcacgagcgcggtctgaccctctgtacgcgaggacgaagtccatcggaaattgttcatgagtaa

SEQ ID NO: 357290 - DNA, 834 bp, Pseudomonas aeruginosa
gtgatatcgcgcctggatcatatcgtctacctggtaccaacagaccagctcaatgatgtaatcgagcagatggtacgtgccggtttcatggagcacacccgacgagtgcaccatagcgatggccggatcagcgccttcttcagagttactgggggttatttagaattttgctctgatggctcgcgccctggcagggagcactacgaaagctcttgctcgatctggctctgttcaaaggatctagtggcagaggttgaaagcttgccaatcttgcagcgtgaggctctggaaataatagagaagtcaccgctaggggacgatgaaccagcgtggttgatcacacacttacctactcgctgcggggaagacgtgagagtgtcgctgatagaatacctacgcggcatcggtggagatcttactcttcgagtaccagacaatggcttgtttgcgatcatcgcggtgtcgctgtgctgcaacctgcctgagctggagcaacatcattacctcaccagcctcggcgcacttacaggcgcgagtgcaatgaaagaggggggctttaccatcggacatcagtggctggcttttctaaatagccatgcgccacgctacgatggaccgttggttctgtcccaagcatcgtgcctagtacatatggctacgatcaacttggaccggacaatgtctatgcttaaggcggccgacttcatattggatgaagtggcgggcgtaggtttgctggcgcagtcgcagctcgcaccatcgttctgtcttgtgctttgcacaggtttggaccctgagtggcatcaggcacggcttttggcccgcagccagtaa

SEQ ID NO: 357291 - DNA, 987 bp, Pseudomonas aeruginosa
atgtcaaaagcaattgagctgtgtgatatcagcaaagtatacgaagtataccgcgcccgtgacggccattcgcgcagcttgctcggatattttcgtcgtgagaaggcatatatccccgcagtgcaggacgtctccttttcaatcgaggccggtgaggtcgtaggctttctcggcggtaacggggcgggtaaaacgacgacgttgaaaatgctttcgggcattgtacgacctagcggcgggcacttatcggtgcttggccacgaccctttcaaaagaagagcggaattccttaaatcaatcgcactggtcatggggcaaaagcaacaactgacctgggacctccccgctttggagtcctttcacttgcatggcgccatttacgatattccgcctatcgagtgcagaaggcggatcgacgagttgtgtacgctgctgtcggcggatgacatcattcgtcgtccggttagaaaactgtccctgggtgagcggatgaagtgtgagcttatcctttcattgcttcatcgcccgagcgttctgtttcttgacgaaccgaccattggcctagacctagaaatgcaagtcgcgattcgtgaattccttgccgactacaatcggaaatttggtgcaacgatcatccttacctcccattacatggcggacatcgaggcattggccaaccgggttattgtgcttgatcacggccatgtagtattcgacggtggccggcatgcgctggtgaaagcacatgtaaatgagcggcgggtcagcctgcgcttttcccgcacggtcgagagcgaagaactcgctgcttatggcaagttgattaacctggacagcgaaagcgctgaactgctggtagcagaggagcagttcgctaacaccctagctcagctgctgaccagctttccggtgacagacatctcgattcagagcccgtccttggagcaggcattcccgcgcttactattgccaaaggagcatgcctga

SEQ ID NO: 357292 - DNA, 804 bp, Pseudomonas aeruginosa
atgctcactctagtttcttggtctggtatcgccaagcgcctaatccgtacaagcgtgctggtgaccttggtataccgcgctcagttgttcgtgtggctcattagcggcgttgcaccactgttcatgatgatgatctggtgggagctctcgagggaaaaggtaatcggtggctattccgcaaatgattttgtggcgtattttctgggtatctacttggtcaggcaactgactgcagtctgggtcatcttcgttctcaacgatgagatacgccaaggaaccctgtcgagccgcctacttaaaccggtcgcaccattctggtttcatgtggctgagcatttggggcagatgctggttcgcgcgccgatcgtagtgacggtgttctgtgttggtgccgcgatgttcgccatcgacctgacggctattgcctggcgaatgcctttcttcctaatctcgctcatcctcgcttggatcatcatttttcatatctattactgtgtcgggctgctggcattctggatggcgaactcccttgctctggatgcgatggtctggtcaatgtacaccgtcctgggcggtatgctgattcccgtcgatttgtttcctgagacctcaagatacctggtggcgatgctgccgttttccgcgtcgctggattttcccgtcaaggtattgatcggcaaggttgtcggtgtcgagctgttatatggatttgcggttcagttgttctgggtggtgatgctggtcgcatttcgccggggcctatggcgacggggcttgaagcagtattccggagcaggcatatga

SEQ ID NO: 357293 - DNA, 741 bp, Pseudomonas aeruginosa
atgctcgccgaactggagtttcgcattaatgcccttaccaacgcgttgaatactgtggttgggatgcttctggctctgtacttccttgatgccatgttcaccgaagttggcagcttgggcggctggaacctataccaagtgctggcactgttcggtgtggctctaatactggagggcttacttgaggtctggttgtttccaagcctgcacgctctttcggaacaggtacgtaccggagacttagattatctgcttgtgcgcccggtcgacagccaatttctggtctcctgttccaagataagcctttgggaattaccgcgcgtattgattggtggagcggtagtgatttacgccatgcaaagcgagggtactctggggataggcaatctgatggccttcgtcgggcttatggctgcgggagtcgcaattttttactcgctattcttaataacctgcaccttgtcgatatggttcgtaaaaatcggtgacgtctggatcatcagttacaccttgatggagatcgcacggttccccgtaacggctttcccacaaacaattcgcacggttttgacgttcctcgttccggtatatttcgtctccaatgtgccggtagctgcggctatggggctggtcgaatggcaggctgttatgggcgcgcttttattcgcggtggcgtttctttgcctttcccgagtgttttggctttttgccctcagatcctacagcagtgcaagtagctag

SEQ ID NO: 357294 - DNA, 774 bp, Pseudomonas aeruginosa
atgagcaattattccggaccaattttcgacgcacatgtgcataccgagtttgccacggctggcgatctagagacgttcaaggctctgaagtcgcgattcgatattcgtgcatctataacagactcgcacgcacccgcttgcaacacccagacgttacagacgctgggcgtgggcagatgcgcggtcattgccaagcctgattggtgtcacgattctttggtgcaggggttagtaagcggcgtttacgtggcgatcaaaatcaatttgggattcatgcctgtctatgccgacgaccccagactcatgcggctgtactcgctcgcccacgagtttaatgtcccagtgctcctacatactggcgacactggttggcatcgttccaagctcaagtacgctcatccgttgagtatggacgaggtcatcgtcgaccatccacaggtgagttttcttttggtgcacagcggcaacccatggtttaccgacgcggcagttgtcgcagcaaaaaataataatgtatggctcgatatcagctcaatcgtcgaagggccattgagccaagtctctccagcgaagctggacaaattgatgatccagcccatcagatggatgctcgactacaccgacaagccggacaggctcatcttcggctccggatggccatctgtcgactatccacactatgtcgccgcgtgcgccaaggcaatagatccgcagtgtcactctcaggtgtttttcgagaatgcgaccaaattcttcaaagtcatcaaagactaa

SEQ ID NO: 357295 - DNA, 1581 bp, Pseudomonas aeruginosa
atgcgtcggtcgttgccgaaaaagacgaaacaaaaatcgaagcaggcttcggcatttggtggctacctcaaaaacaagacctatgctgcagagctagccgctcactgcaaaactttgtcaggtgcgctttacgcagggcgcggtgccggtgaacacggcgggtggcgcgcgtcgagatggattgcgaggaaggctaaagcgttaggactggcctgttggcacgggcgccagagcctcttccaatcggtaccgttgggctgttccattgccaggcctggaccgaatagtttaaagatgctcagctttgggagcggagcgaagcatgattttttacatcaggatgagttactaattcgatcccagcatatcagcgttaatttagacaacacgcctctggtgttcgtcggttacggaatcgttgcaccgcaatacatgtgggacgactacgccgggattgatgtcgcaggtaagatagtagtggtactgcccaatgaccccggaggcgagcgcttcttaggtgagcgaatgacctactacggccgctgggaatacaagtatgaagaggccgctcggcaaggtgcagcaggtgtgattatcgtccacactgatgaattatttggcagcgccttttcattggtcatagacgagatgcatcgtgcgtttcgttttttgccgggggcagtgcgcggcggtttagcatttgagagcatttgcagtgagcgcctcggacgggagttgttagcgacgtcaggcgtcgacctagatgcgttcttggcagcgccctatcctaccggcaatcgctcatcttggctaaacgcctacttaaaagtgcgtttagatttcaacatcgatattagacattgtcgaaatgtactggccatgaaaaaagggaggttgtttccccgtcaatgcatattgctatgcgcgcattgggatcatctaggcaagagttcagacagagcgcaaccccgaggttactatcctggtgccgtcgacaatgctgtcggcgtttccgtattgctagagctagccagacgattaactacaggcgctcctttacgtcgaactgtactttttgcttggacttctgcagaagaagtcggaatgctcggttccgcgcgagcagcacaattgataagcagcaccgggctggaagtggtcgctgcgctcaacgttgatggatttgtacctatcggcaaaacccgcgacctaagcctagtggatggtgatcagtcagacctgcccgaaactttcatacgcgcagccagggctctagaccggcatatcaccctagatgatgatcctcgcgcgggctatttttaccgatccgaccaggctagctttgccaagatcggcatccctgcagtccaagtaagtaccggaagcaatctcctaaaggggggagtgcaagaaggaatgaaacggcatgacttttatgactcgaatacttatcaccgcacctccgacacattcaaccgacactgggatttctccagtatctgttctgatatagatgttctccatgaaaccctaatgattctgggcgattcgttgtgccgccctagccttcgctcatcttga

SEQ ID NO: 357296 - DNA, 1920 bp, Pseudomonas aeruginosa
gtgagtgcgaatgttgctgacgcgccgcagtggggcgagttgggactgcagccaggggatgctcgcgaactctctgtgagcgaacgtgaagcactcatcattagcgccactcgggtaggaagcgagtgggtcatcctcagtcgataccgtgacatgacttggcggttagaggggttcaccagcaacgtgccagacggtgtacgggagatcgacttcggtcgcgtccccattgaatttgttcttgtgatgaagttcgtcatgtatcggtatctacgccggggccgtgccggacaaaaacgcccatcggcgagtacagtgcgcaacgtttttgaaaacagcctgccgtttttgcggcacataagcacgttcaagatcaatcacttcggtgcgataacaccaatgatctgtgcaaattatgtctctgagtgccgggctatccgtcaaacacggcgaagcaagggaaagcccttatctgccagtgcgcttgaacggcgctttatggctgtggaggccctctatgagctgagccaatacacccacgacccaatacctagaaacccttggcctgatacgtcggcgcgcgcaatgtcgggggggcgttcgcggagcgaagaggccggcaagaccccattattacccgacgatgtattttgcgctctattcaataaggcccatgagcagattcggcgtggtaatgccttgctcgacatctacgatgatctagagcgcgtctctgcggagcgtcatgggcaagtaaccagaagcattcaagaggcgaaaactcgtcgacttgttgctcttggctggggcgaagggcttggggagtttaaccaagcgatccagagcctcagaactgcatcttacattgtcatagctagcacttccggctgccgaaaccatgagttggcgaacgttatggccggagctcaccacagcactgaagacgatgaaggcaccgtctaccattggcttcgctcaaggtcggaaaaaaccgacgcgggcctccatgattggatgattcctgaaagcacagtatctgcggtgcgcctaatggagcgttgggcagctccctaccaggcgatgattaccgacgaaatcgctaggcgatgcagcgtcaatccggctgacccgcaaatcaccgaagcgcaaaagcataggcacgcgctctttctgggcgtaacttccacgaaaaacaacctagtcagaactctctcgggctcgtcctggaacaagtgtctgaaagccttcgcaaagagttgtggcctcagttggaatctcgcgagccatcaattccgccgaaaatttgcgaactacgctgcgcatagcaaattcggcgacctgcgctacctccgagaacacttcgctcattggtcgatggatatgacgttaggttacgccatggatcaggaatggggtcagcatctcgatatcgagctttttgaagatatccagttcgaactcgaggacatcaagtctggtgtggttagcggctggttgggcaagtcacctctagggggcggttacggaagatcaatcaagcaatggcaccgagatcctaaaaatctcgccattttcaaaagccatgcctcgatggttaagtcgattgccgagagcacctcgatccgaagtaatggccactcctggtgtactgctgatgatgacggttgcgtcggcaatacaatggaaagaacgcgctgtagcggctgcgacagctctgtgattggtgtccagcatgctggggtctaccaaggactcttcgacaacctaaaaggcttgttggattgtaaagacatcggcgaaggtggccgccagcgcgttctgcgtgatttggatcgctgtcggaatgtactggaacagcttgaatttaaaccggagaccatgacgaatgaaaacaacacgcaagacatccgacagtcgtga

SEQ ID NO: 357297 - DNA, 1677 bp, Pseudomonas aeruginosa
atgggtaagcgaaagatttttgttaagaccgacctcagcgtgccccaagtggaacatagtcgtgactcagtgggtgcagttttcgtacttcctgaagcgcttccacctataactacgaatgtcgattttgggaggaacgctaccggctctagaaactacgatttcgcgtcgtggtacggggttggtatcgattcaatcacctatgcctgccagcgacagattgagcgatatctcgccaagcaagacagcgaaatcgagccaagtaccgtagcgagcatctgtaaaggtggcctacgtcactttctcaattttatgactttgcgagccactgcgcttgagcgtgagctagtgcttggagacattaatcgctccttagtcgacgattttctcgggcacctcgcgggccttggcatcgctaccctcagtcagcgaagtcactacacgtctgcgaaatccgtcctgagcgcgctaggtagcagagggataatttctctgatcacctcaggggacgacgcaaccttcccaagaaatcccttcccgagtagtggtagaagcaaaggggaaacgtcactgcccaagcgccaacggcaggcgtttgcttcagcattgaagcaagcagttgcaccgatatggaaagatgacgctgtactaagtggtgagcttttggcctacgtactgttgaccatcgcactgcatacagggcgcaactccacccctcttctagagatggggcgcgactgcttgcgggcgcatcccaaagacggcagtgtatttttggttttgtggaagcgccgtggacacaccacaaacaaggttgctctacgaacagaaagcgctgacgaacgcctccttgaatctactccgaccatcagaaccaatattgagcgcctgatccgccgaatcctgacccttagtgaaccactacggccagaagcgcctgacagcatcaaagatcttgtatggctctaccgcgtacagcgagggccagggcttgggagcattattgaattgacagccggggcgctgaaggtagcgaccagaaaactggtaaccgactacaagcttattgacacagatggtaagccgcttcgcatcaatatctcacgcctgcgcaaaacgtttgccaatcgagtatttgaattgctagatggcgatttgacgacgacatcaatcgcgctcggaaatacacctcaggtggccgacagaaattatctagcaccgagcactgaagcaaggcgcaaatggcgcttcatgggagagatcttggtgcaggaattactcagccggactataggcgcaacataccaaaaaactcccatgggccagtgcgaagacccagtaaatggtcagtacgcgccaaaacgccagggtatcgcgtgcttctcatttctcaactgcctacattgcaagcactacgcgattactggcgaggatttgcaccgactattcagtttctatttccgagtatttgcggagcgtgtacggatggggaagcggcgttggagtcagcaatacgcccacattcccagattgatagacgactatattatcgccgaaggcctgcggcgaggagccttcaaaccagaagctgtcgaggcagcccgcgaacaagctcgcctgagtccgcatcccttctggtcagtggatgtcctagatagccttgagattttctcgtga

SEQ ID NO: 357298 - DNA, 1146 bp, Pseudomonas aeruginosa
atggagctgcttcgggccactgagtccttggtgataggaggtcgtccataccctggattcccgatcttgctgtgggacaccatggctagttgtgtgcacgcgaacgagtttatgcgccactatctcctccgaggagccataggatctaagaagtcttggccaagcacggggcgtgctttatacgactatttcagcttcctccaggcgcacgaactcgactggcaggatgtagatcgaggtgaggcaaagagcatagtcatgggctaccgagattactgcttggtagagtgtcagttggcacgttctgccacccgccaaaggcttcattatgtgtgcaagttctacgagtttgctcagcgccagggatgggtgaccaagcttccgttcggacttgaggagcggaaaataaatggcgagtcaggttttctggctcacgttgctgccaatggtggaaaagcactggtgaacgacatcatgccggtgcagcaccgagtgctgcccaaatttctcagcatgaacgagattaaggcgctgctggcagaagcagagaatccgcatcaccgaatgatgatccgtctgggtcttcatactgggctgaggcgggaagaaatcgcatcttttcccttgtcctatgtcttcgatcccgacaaagccggcaaatctgagcgaaacattcggattcatctcgatccgcaagatggtagcggtatgcgcaccaaggggagcaagccgcgtgagatttacataagtcggcatttcctcatggagctccatcgatacgcagtgcaagttcgtggagagcgggcttcgctgagccataaccagtacaaaccattgtttctgaatcagcttggtgagccctacgccgatgacggaaagcgcattgaacgcattgtccgtgacattggaaaacgagcgaacctcagagtacatccgcacatgcttcgccacacctatgcaactcatacgctggtcgctcttcagcgcaatggccgagaggtggagccgctcgtgttcttgcagcggcaactcggtcacagctccatccaaacgacgatgatatacctgcacctgatcaatgaactcgctgacaacgcggtactggcttacgatgacgagcttgcagatggcatggacgcagtttaa

SEQ ID NO: 357299 - DNA, 474 bp, Pseudomonas aeruginosa; identical to SEQ ID NO: 338206

SEQ ID NO: 357300 - DNA, 195 bp, Pseudomonas aeruginosa
atgctgccccatccgaccctggacaagctccagaccctgcccccggtctcagctgtgctggcgtcgcactcgttgcaccgtacgactttcttcagccctgcagtccgtctccgacagagaaagccgggggggggggaacctaacagcagccggttcaggacgcttacagtcgagcagcagggtacgaatcagtga

SEQ ID NO: 357301 - DNA, 246 bp, Pseudomonas aeruginosa; identical to SEQ ID NO: 343638

SEQ ID NO: 357302 - DNA, 681 bp, Pseudomonas aeruginosa; identical to SEQ ID NO: 336068

SEQ ID NO: 357303 - DNA, 984 bp, Pseudomonas aeruginosa
atgctccactgcctggcttgcgctgcgactggcgtcggcggtctggctggcgtctccggcgacctgctggatcgccgcttccatgtcgccgagggcgtcgcggatctgcccggtatcgccggcctggcgctcgaccccggcgtgcaggccgctgctgacctcggccagggtctggctgctgccggcgacctgttcggcgcggcggtggatcgcgccgaccagctcggcgaggaagctgcgcaggcggttcagcgaatcttccaggttgcgcaggtcctcggtgcgggtacgcagggatatggggcgcgagaagtcgccgtcggcccaggccgagagcgccggcaccagttgcccgaggacccgcgccaggcgtctttgcaggctgtcgatggcgagggcgatgagcaggatcagggcgatcatcccaccctggatcaggcgtacctggccttgcaggcgctggcgttcgccgcgcacctgcggttccagggtggccagggcctggcgcaccgcgtccagtctggcgccggtgtcggcggacagttgctggcgacgctcgatcaggtcgcgggtgcggcgcaactcgtccggatagcgttgcagcaggctggcgagttcgcgccgcagcgccacgccgcggtcttcggcattgccggcgccagcctcggcgtcgccggccagccccatcatggcggcgaagtcgtcgctggccgagcgttgctcgtcgagcacgccgagcagcggcaaggcctcgatccgcccggcctgctcgcgcaggttggccaattcgcgctcgacgtcgccggccagggccgggttggcgctttccaccagcttggcgcgggccaggctgaggcgggtcaggtgcaggctggcgagcagcagcggggtgcggtaggcgccggcctggggctgccccgccgcggcgtccaggtaggcggaccattgttccaggttgccggtgaggtcgcgctcggcctgtag

SEQ ID NO: 357304 - DNA, 948 bp, Pseudomonas aeruginosa
gtggacaaccgtggcggcaagttggtgacggactccagcctgcgcctgaccagcgccagcctggacaacagccgatcagggatcatcagtgccaacgctgcggcggagatccataccggggttctgaacaacagccagaaaggcaatcttggcagtaatgacgggctcggcctgattgctactgaggtggataacagccaggaaggtcggatcactgccaaaggcatgatcgacgcaaatatcaagggactcgatcagcaggggaaagggcggctggtcagtaatgccggcatcatactcgacctgaacgagggaaccctggccaatggcgctcagggcctgatcgccacgcctggaaccttgctcctgcgccaactcggcatggtggacaacagcggcggggaaatttccagcgaccgagccttcacactcaccacctccgcgctgaccaaccagggtggccgcctgcgcagcggcggtgtactgacgttgcgcatcgcccaggctctggacaacagcctcgaaggtgttctctccggcaccggaggcctggatatccgggcgcttgccctggacaaccgcagtggctccatcggcagcaagggcgccgtcgatatcgacgtgtcccgtttggaaaacgatgacggcgacctgcttagcgaagctcgtctgaaactgactgccgagcgagcgaacagtgtcaggggacggatcgcggccaggggtgacctgcacgccagcgtgacagcctttaaccaggcgggtggcgaattgagcagcgagggtgcgctgatgctcgaggccgatagcctcgacaaccgcagcggcggtctggtcagtgctgatggcaacctcaccgtttccgcccggaggatcgacaaccgtgcgggcgaaatcgccggcccgggccaggtgacactggacgtcgccgagcagttggacaactga

SEQ ID NO: 357305 - DNA, 576 bp, Pseudomonas aeruginosa
gtgacccgcctggaaaacgacgctggcacgctgatcgccgaacgcggcctgaagctggcggccgatgaggcgaacaattccaaggggcgtatcgtcgccaaggatgatctgcgtgccaaactcggtgcgctggtgcagaacgggggagagctgacgactcagggcgcgctggccctcgacgccgacaaagtcgacaacggcgctggtcgcatcgccggcaaccgaggtgtggtcatcgatgtccggcaggtggacaaccgtgccggcgagattgccagccagggcgtggcgacgctgaacctcactgaacaactggacaaccgtggcggcaagatcgtcggtgacagtggtctgggcatcaccgcgccacgcgtgctcaaccaggacaagggagtactcgccagccgcgatgggctgcgcctgagtggtaccgaattgttcaatggcaatgccggactgctcagcagtcagagacatatagaggtcactctggacggcgtgctggacaatcagggcaagggcgcgctgctcagcgacggtaccctgacggtgagcgccgggcgcatacacaactag

SEQ ID NO: 357306 - DNA, 1284 bp, Pseudomonas aeruginosa
atgatccacacagcaaaggctccgcgacttgatttccttttcaaccatggccatacgactcccccaccgctccccctgctatttgactcaaatgggaatttctgctgggagatgaatagctatctaacgcaatatggcggtggcccccatagctacggagcacgccctctaccaaaaacaatatttagccgagccgaaacacttaacaccttccaggaatacttagactcgcacaaactaagaatttttgatgtaaccgacgaagacctatacgactttgttactttcaagaaaaaatcaggaaatagcaatccaacaaccatcaaaagaattataagacaaatattatttctactagagcacactcaaaaagaaaacaagtttacaaaacttattacgacagacccgagcgagcacaactttcaaattaacgccactgaagaacactataactttcagaaacgcagagtacgcttcttgtctcacccctgcatagacgagcttagagacaaaccagccgaaccggtaagctttattcgaaataacgagctaaacgcttggcacgaagctattcatgactacacatcaaatcagtatgtcatagatagatggtacacgcttgccactctattggaattcacagggtgccggatcgaagaagcgattaatatacccgcgagctcaatcatcgacgcattcaaaaacaaagatctcgttaaaaatatcccagtcctcaaaggcaagtataaggggtgcttacggcaagtattgatccctgacgctgagttattagaattatacaaattcgtcaaactcactcacgagttgcatccacacagcgtgcttcatgacaaaatttttgttagcgagggcagcggccttccaatgtcacgcaagacattcaattcttattaccgggtggttgcaaacgcatccaaacacaaggacatacttcaaggaatttcatatcacaactttcgacaccgctacttcacaatactggttgcacaaaacatcagtaagctttcgaaaatgtccaaagccaacatcttggatgtggcaatggctattgtgcgcaaggattcgtaccacgcctctaaggacaccctttcaacctacattcaccttacacaagacccagaaattcaggcgattttgaaagctgaacctaatgcgtccacaacccttcagtcgatccagagcattgtcgatgcagtggacggtagatcctccgaggagaagctcgcagcgataaaggctttgatgaaagccaagtctccttga

SEQ ID NO: 357307 - DNA, 219 bp, Pseudomonas aeruginosa
atgtcctgggtaagaaagctatcgctccggctgttccctgataagcgcccggcctgggtgcagcagcaagagcgggacttcatagccgcagttaactccctcaagacgctccatgtttctgagggtggaaggatgtctatcgacccggaagagatcagggagcaggtcttggagtcacgggagcgactaaaggaattggtacgcaggcccgagagataa

SEQ ID NO: 357308 - DNA, 714 bp, Pseudomonas aeruginosa
atgcaagacgcattgccgaacgtacacacctccctgatcgatattccttcgttggatcgactgacgccacgtgcaccctcacttcataaacctcgaattcttcttctttacggatcgacgcaagatcactcaattagccggttagccacgcaagaagcagcacgcctactggaggagtttggagctgaaaccgaaattttcgatccttcaggtcttccgttaccggacgaggcgctcgagacccatccgaaagtaacgaagttacgcgagctgatggagtggtctgaaggacaggtgtggtgttctcctgagattcacggtgctatgagcgcggtcttcaaggcccagattgactgggttcctctggagataggtacggtacgaccgacccagggaaagactctcgcggtgatgcaggtatgcggtggctcccaatcatttaacgtggtgaatcagctacgagtattaggccgatggatgcggatgttcactattccgaatcagtcttccgttgccagggcgtttactgagttcgatgaaatagggcgtatgaagccgtcctcgcactacgaccgtttagtagatcttatggaggagttgatgaagttcacacttctcctacgagacaggcaggactacctcattgattgttactccggaagaaaagagtccgctgaagagctatctaggttgcaggctgacagggattgctga

SEQ ID NO: 357309 - DNA, 345 bp, Pseudomonas aeruginosa
gtgccctcgttcccggcggtggcggtgccctcgttcccggcggtggcggtgccctcgttcccggcggtggcggtgccctcgttcccggcggtggcggtgccctcgttcccggcggtggcggtgccctcgttcccggcggtggcggtgccccagtccccggcggtggcggtgcccttgtacccggcggtggcggtgccccagtccccggcggtggcggtgccctcgttcccggcggtggcggtgccccagtccccggcggtggcggtgccccagtccccggcggtggcggtgccccagtccccggcggtggcggtgcccttgtacccggcggtggcggtgccatag

SEQ ID NO: 357310 - DNA, 342 bp, Pseudomonas aeruginosa
  misc_feature (13)..(13): n is a, c, g, or t
atgagtcgttatnctaaaggcgagacttcgcaagctaagctaatggagaagcaggccaaaactcaaagcctgctcaacaaaatcgtccttatcaggagggcctcacaagaacaccaaaggctacctactctcgacgcactgaaaagcaagagaggcatccccttcaaggctgcgctagcgtgggaagacgctgctctagaggtttcatcatgctcatataacacctcacaggagccgtacaacatagagtattcagggcaattagcggaagcacttgagatttataatgcaatgatcaccgagttttacatctggctcgcacatagccagttcttccagtaa

SEQ ID NO: 357311 - DNA, 828 bp, Pseudomonas aeruginosa
atggatgttgtcgcccagcatcgacgccaggaacccgtcaccgaacttctgcatcagcttctgcgcagtgacttgcccgatggtcgggatgcgcttcaaggctttcagcacggccgaggactggtcgctgccggacaggctgcgcgggcggatcagcgtccacaggggcgcggcgcaatggctgcacttcctgcggtactcctcggcttcgagcgcgaccgggttgaccggctcgccgtcgaggtcggtgatgaccgtgccgcagtcagggcacgctgccacgtcgccatggcgggtgcgccgcgtggtgaagacgggcttccagtggaatcccatccgcatccgcacgcgccccaggacaaagaactcctggcccgtgggctgcacacccaactgctcgcgcagcttgatgagtttgaccagcgtatccgggccgttgagcacccagaccttggcgcctgccaccgtctcctggatctcacgccgccacttgtaaacaaggtgcggcggcgaaagtaccagggtgcggcagtagccttcggcgttgagaacggcggccgtggcgatgccaacggtcgtcttgccgcagcccatttcgccattgacgatcgcggcgcgttcgccacggtcgatcagcagctcggcggcggcatggacgacttcggcctgagcctggaacagcttgcgcttgaggctggcgacgacgagttggcgatgcgcctgcggttggccggtatagaccggcgggttggcgcggttgagcgagtcgagcagttcgtcgccgaactcaccgacgaaatcctgaaggctcagggtcagaggggatga

SEQ ID NO: 357312 - DNA, 720 bp, Pseudomonas aeruginosa; identical to SEQ ID NO: 322380

SEQ ID NO: 357313 - DNA, 906 bp, Pseudomonas aeruginosa
atgtcaccgccccgtgggggaggtgcatgccccatctccttggagcatcaccatgtccctcgatctcgaaaccgttcccgaaaccgctgtgcagggcgacctgctcgaagcggccgcttcacccctcacgctcagcctgcaggacttcgtatccgagtttggcgacgagttgctcgactcgctcaatcgcgccaatcctcccgtctacaccggccagatgcgggtgcatcggcaactgatcctcgcagccctcaagcgcaagctgttcccggcgcaagccgatgtggtccacgccgtcaccgagctgttggtcgaccgcggcgaacgcgccgcgatcgtcaatggcgagatgggctgcggcaagacgacggtgggtattgccaccgccgccgtgctcaacgccgaaggctaccgccgcaccctggtgctctcgccaccccacctggtctacaagtggcggcgcgaaatccaggagacggtggccggtgccaaggtctgggtgctcaatggccccgacacgctagtcaagctgctgaaactgcgcgagcagttgggcgtgccggcccagggccaggagttcttcgtcctgggccgcgtgcggatgcggatggggttccactggaaacctgtcttcgttcgccggcgcacgcctcacggcgacgtgggggcctgcccggattgcgggcatgtcatcaccgacctcgacggcgagccgatcaacccggtcgagctggaagccgaggagtcccgccgcaagtgcagccactgccgtgcaccgctgtggtcgttgatccgtcccagaggtctgtccgccagcgaccagtcctcgaccgtgctcaaggcgctgaagcgcattccgaccatcggggaagtcaccgcgcagaagctgatgcagaagttcggtga

SEQ ID NO: 357314 - DNA, 234 bp, Pseudomonas aeruginosa; identical to SEQ ID NO: 341916

SEQ ID NO: 357315 - DNA, 681 bp, Pseudomonas aeruginosa; identical to SEQ ID NO: 336068

SEQ ID NO: 357316 - DNA, 522 bp, Pseudomonas aeruginosa
gtgcagccgcgggaagtcggcaatccgcgcttctataccgtgaccagctatccggtggtccaggaaagcggagaggaactgggccggaccctcaacgacgaactcgacgacctgctcgacgccaacggccgctacgccttcgaggtgcacggccccaacggcttcttccgcgagttccacggcaacctgcatctcgccgcgcagatggcgcggcccgaggtatcggtcacctatcaacgcaacggcaacctgcagttgaacatccgcaatctcggccgcctgccgtgcagcgtgacggtgacgccgaacccggcctatacccaggagggcagccgtcgctatgaactcgaaccgaaccaggcgatcagtgaagtgtggctgttacgcagcagccagggctggtacgacctcagcgtgaccgccagcaatacggaagccaactatctccaccgcctggccggacacgtcgagaccggcaagccgagcaggagcgatccattgctcgacatcgcagcgacctga

SEQ ID NO: 357317 - DNA, 2700 bp, Pseudomonas aeruginosa
atgaaaagtcatcccgatgccgccagccgttcggcggccgaggttgtcacgcagctacccgtgccgtcgcggctcgggctgctgcgtttcgagcggctgaacgagccgagctgggcactgctgttcctcgatcctgcctgcgagcgccagctcgggctgccggcgactaccctctgcgcactgctcgatgcgccttacgccagcctgatggaacccgaggcccgccaccgcctgcacgagcagatccagcagcaactggtgaagcgcccgcactaccaggtgagctacaagctgcacacacccaacggcgtgctgaccatgctggagttcggcgaagccttccagcagcatggccgccagttgctgcacggctacctgatggtcgaggagcgagcggagagcgccgagcgcagcgaacagttgctcgacctggaatcgcagaacctgcgcctgaaggcgtccctggacctctaccagcgctcccaggacgaccacctgcaacacctgctgcgctcgcgcacccagcagaacctgatcgtccgcctggcccgccatcgctacctgtccagcgacccgctgctggaggctgcgcaactgatcacccaggccgcctgcgaagcctacggcaccgcgcgagccggcatctggcggctgctcgacgaccagcgcctggaagcggtgaccgtctaccgccgcgacctcgaccagtacgagaagccccagagcatcgacgccagccgctaccccgcctacctcgaggcggtacacagcgggcgcgccatcgacgcccacaacgcccagcgcgacccacgcacccaggaactctacaaggactacctgaagccgctgggcgtcaacgccctgctcgacgccaccatccgcatcggcggcgaggtggtcggcgtgctgtgcctggaacacgccggcgagaaccgcatgtggcagagcgacgagatcgccttcgccggggaactcgccgaccagtacgcgcaggtcctgatgaaccacgagcgacgcaatgtctccagcgccctgcacctgttccagcgcgcggtggaacagagcgccagtgccttcctgctgatcgaccgcgacggcgtggtggaatacgtcaatccgagcttcacctcgatcacccagtacagcgccgacgaagtgcgtaaccgacgcctgtccgagctaccggcgctggagaacctcagcgagctgctgttcgacgcgcgttccgcgctgactcagcagaacagctggcagggcgagttccgcagccgccgcaagaaccacgagccttactggggccagttgtcgctgtcgaaggtctacgacgatctcggcgagctgacccactacatcggcatctacgaagacatcacgcagaacaagctggcccagcagcacatcgagaaactcgcctaccgcgacaacctcaccggcctggccaaccggcactatttcatcggcgccctcgaggaacgcctggaaagcagcggcgaccgcccgctcagcctgctgctggtggacatcgacaacttcaagcggatcaatgacagcctcggccaccagaccggcgacaagctgctggtcagcctggcccggcgcttgcgcagttgcctcggcgacggcgccaccctggcgcgcttcgccagcaacgagttcgccgtgctgctcgacgacaccgcggtggaaaagggcgaaagcattgccgcgcaggtcctgcacatgctcgacaagccgctgttcgtcgacaaccagttgatcaacatcaccggctccatcggcctggccagcgccccgcagcacggctgcgacccgcagaccctgatgaagtacgccggcctggcgctgcacaaggccaaggccaacggcaagcaccaggtccaggtgttcaccgaggcgctgaccgccgaggccagctacaagctgttcgtcgagagcaacttgcgccgcgccctggcgcagaacgaactggcggtgcactaccagcccaagctgtgcctgcgcagcggccagttgctcggcctggaagccctactgcgctggcagcatccggaaaaaggcatgatccgcccggaccgcttcatcagcgtggccgaggaaaccgggctgatcgtgccgatcggcaagtgggtgatccgcgaagcctgtcgccaggcccgcgagctggccgaggccgggctgggcgagctgcagatcgccatcaacctgtcgcccaagcagttcaccgacccggacctggtcggctcgatcgcggcgatcctccacgaagagaacatcccggccagccagctggaactggagctcaccgaaagcctgctgctggacgccaccgacgatacccgccagcaactcgaacgcctgaagagcctcggcctgaccctggcgatggacgacttcggcaccggctactcgtcactgagctacctgaagaaattccccatcgacgtgatcaagatcgaccgcagcttcatcaaggacatcccggacagccaggacgacatggaaatcacctcggcggtgatcgccatggcccacaacctcaagctcaaggtagtcgccgaaggcgtggagagcgccgagcaactggccttcctccggcgcaaccgctgcgacatcggccagggctacctgttcgaccggccgatccccagcgacctgctcaataccagtctgctgcgctatccctgccgcaccctgcactga

SEQ ID NO: 357318 - DNA, 192 bp, Pseudomonas aeruginosa; identical to SEQ ID NO: 356066

SEQ ID NO: 357319 - DNA, 729 bp, Pseudomonas aeruginosa; identical to SEQ ID NO: 320818

SEQ ID NO: 357320 - DNA, 570 bp, Pseudomonas aeruginosa
gtgatcggccatcctggcggggccacgttcagccggttcgccagcgcctctgggtacgtttgccctggcgccaccttcccgctggtgccgtacttcctcagcacactggacgccattggctggcggcatggcattcccgagcaggtgtaccccgaagcgttggtcccagggctgcgcgaggtgggtggaatcttctccggcgacatgtgggggaacctctatccgcgcagcggattcctgcaccagaccgacgactacaagacggcggccgtcatcgcccagcgcgccggcgacatcaccacgcgaatcggccagctccacgtctacctccccatgcgcgcagcacccaaggacggctactggccggcgggcgagctgaaagagggcgatgcctcgaccgggaaatggcaggagctgaccccgtccctgagcctcaactgcgcggtgtttcccaactcagggccgaagacgcaagccgtcgacggcgattacgcctgggcgctctggcgtccctactcctgctgccagcgcaaggggcagatcttcctcggcagtaccgacttccaataa

SEQ ID NO: 357321 - DNA, 570 bp, Pseudomonas aeruginosa
gtgatcggccatcctggcggagccacgttcagccggttcgccagcgcctctgggtacgtttgtcctggcgctaccttcccgctggtgccctacttcctcagcacactggacgccattggctggcggcatggaattcccgagcaggtgtaccccgaggcgttggtcccagggctgcgcgaggtggggggaatcttctccggcgacatgtgggggaacctctatccgcgcagcggattcctgcaccagaccgacgactacaagacggcagccgtcatcgcccagcgcgccggcgatatcaccacgcgaatcggccaactccacgtctacctccccatgcgcgcagcccccaaggacggctactggccggcgggcgagctgaaagagggcgatgcctctaccgggaaatggcaggagctgaccccgtccctgagcctcaactgcgcggtgtttcccaactcaggaccgaagacgcaagccgtcgacggcgattacgcctgggcgctctggcgtccctactcctgctgccagcgcaaggggcagatcttcctcggcagtaccgacttccaataa

SEQ ID NO: 357322 - DNA, 693 bp, Pseudomonas aeruginosa
  misc_feature (35)..(44): n is a, c, g, or t
atgcgtggccagttgaagataacgttgattttgtnnnnnnnnnngcttgaggatattgacaagagaaccggggagctggcagcggataatcctgaattattagtcgctttcgacgccatcatcggtggcagttataaggttgtaaaacaagagcttgtctatcaggcgaaaggtgcaggtaaacagcgctttacgatgaatgaggcgtcgagttgtattcgcgccctgctggatgttggtttctacttgcgatgccgagcgcgctccggtgatatttttatcattgatgagccggaactgaatcttcatcccaagaatcagcgagcttttgctcggcttgtggcgcgtatggtcaacgcaggtatcaaagtattcattacgactcacagcgactacttggtcaaagagttaaatacactgatcatgctgcatcaaagaacagaacatacgagatctgttcagcagcaatacaagtatgtagatgaggaacttcttgatccggcagttgttcgactttacatgacggcaacaatagcaaagccctcaactggtgctggtcggcgcggtaaagtaaggacgctgaagctggctaatatctaccctgatcgcggaattgaggtagaaacttttgatgacactattgaggtcatgaatgccatacaaggtgaaattttgtatgggggtgacctctga

SEQ ID NO: 357323 - DNA, 765 bp, Pseudomonas aeruginosa
  misc_feature (750)..(759): n is a, c, g, or t
atgcactttcaatttgaaaatctcggcttactagatcaggttgacctggagctagctaatctcacgcttatatgcggagaaaataacacgggtaaaacttacgcaacttatgcagtgtatggttttttgcgcagttggaggcaaatacttcgtgtagttatagaagacgaaattgacacccttttaaaagattctaatcaatatcgtatcgatcttggggcgatgttcgatggaaagatcgacgactacttgaaaagaatgggtaaaatttatgtcggcggattgccgagagcgttcgctacccaagctgagatatttgaaaaaacagtattcataccaagtgcttgccttgaaactgatatttcaagtaaggcgtttcaacgaaccgtgaaggctggcacgggggggaaagttcttgccaccttaaccaaagaatccgatagcgttatgcttgaagtgttggtggcggatgaagaagttatcatgcgccctttcggagggctaaccgatttcatcgtagacgctattgctgagattgtcttcgcgcagcatttgcctagagttcacatatccagtgccgaaagaacgggagcagcaattttccgtaaagagctagatatggctcgcactcgtatgcttaaggccataaatcagattgattcaaaagaactcagaagaaatccttttaagatacttcaagaaattgagactgattatgcgtggccagttgaagataacgttgattttgtnnnnnnnnnngcttga

SEQ ID NO: 357324 - DNA, 900 bp, Pseudomonas aeruginosa; identical to SEQ ID NO: 232189

SEQ ID NO: 357325 - DNA, 267 bp, Pseudomonas aeruginosa
ttgatcgagggcgccgctcaggcaacctcagaacagaaagaggcgatgtaccgcgaagctcaagccgcgaaggtgatacgcaactcgcgcaaacttgcacaagagctggacaaagttcggattgaagagacccaaaaacagctgcgtcactgcctgaaacagctcgcactgtgggagatttcagtgggggcgacctcgtgctaccaaagcctgaccctgccggggaagcgaaggcaactgcacttactgagcaacgaatgcgtgtaa

SEQ ID NO: 357326 - DNA, 156 bp, Pseudomonas aeruginosa
atggctagaaaagacacacagttcaacctgcggttgccagaggacttgaagcaatgggtagaggctgaggcgcaaaagaactgccgttcgcagaccgccgaagttgtttttgcgctgagagaagtgcagaggcagagggagcaggcaaatgcctga

SEQ ID NO: 357327 - DNA, 231 bp, Pseudomonas aeruginosa
atgactatacgcagcctcgccaagcacctccctccagacccagataacaccgggtgcgtgctcggctgggggttaattgaccgaacgaactggcactttatcgacatctacccgagccgagaggtcgccgaagcagaagctaaggcgcgcggtgaccactacacagtcgactatggttcacaccgcctgggcaccgatgattttgtaggcggactcacgccgccgggctaa

SEQ ID NO: 357328 - DNA, 525 bp, Pseudomonas aeruginosa
atggagaccttcgtcagcgaagacggagagctacacaacgaagaccacgcacacctgcgggactcgccgattgccttcctttgggcatcgtcgggattcgagaagcaggggcgccttgtgctcggccagtgcgaggaagtcaccttccgctgtggtgcttggcagaagggaaggcaagagcagcagatgctccagtggttcggctacataccggcctttctgatcacgctggcggccgactattcctccaggtgctccgacgccgagttctgcgctcttgttgagcacgagctctaccacatctcccaggcgctggataagttcggccagcccaagttcacagaggaaggcctacccaagctgaagctgcgcggacatgacgtcgaagagtttatcggcgtggttcgtaggtacggcgccagtgatggggtaaaggcgctggtggaggcggcaaacaacccgcccgaggtggcgaagatcaacatcgcgagggcctgcggaacctgcctgctgaagttggcgtga

SEQ ID NO: 357329 - DNA, 336 bp, Pseudomonas aeruginosa
atggacttcaacaatgcaacaatcaccttccacacaacatccgtagatgtgccacccctagacagggtcaatgcccattacagcccaggtgagcgcagcctatacactggtgcagacgggagcgaagccatcattaaccgtgcgggatggctagcgatcgagactgatgagttcaaagggtggcttgatgtctacgctatcgaagtcaccatccccgacggccctaccagcacgaggctcttcgaagtaacacgcaccttcaaaacccccatattcaaggacgggcacctctggttccctgtgattcatcggcaagcatcggtgtattcgggctga

SEQ ID NO: 357330 - DNA, 345 bp, Pseudomonas aeruginosa
atgatcgagatggtcggaatggttgatccgtgggccttggttgctgcactcatctgcagcgccatctgcgttcgcatcgccagctaccgtcggcagggtgcgcgttaccgagctggcgtttcgctactagcgtacctgttgtgtgttgggaccggctgctactccctaacggtctacctcgacatgctcaggggccacagttacgccaccttgtcaccctggctgttgatcattctgctggtccttgctgtgctggtgtaccgcgcccgcggcaacgtggccaggatcatccaaattgactgggaacagcgctggaatgggatcaatcgtcggcgaatgaaatag

SEQ ID NO: 357331 - DNA, 162 bp, Pseudomonas aeruginosa
atgaacaccgaacagttcatccgtgactcggccgcgcgcgggctttcccggcgcgcaacgaccgtccgccgccgcgtcgccgccggcatgagcctgcgcgacgcgctcaccaccccgcgccagcagcccaagcccgggcgcaggcatccctggaagcgctaa

SEQ ID NO: 357332 - DNA, 1014 bp, Pseudomonas aeruginosa
atgccgtcagtgcaaaaacagttcgaagactttcacagcgccatctgttttgacgaggatgatgagaaagcgaccctccgcgagaagcgagataccatcgttacggcgctgagggagaagctcggcgacgacgtgccatcgttcgtcaatttcaatcagggtagttactccatgcacaccggtgtggtgccgctggatggcaacttcgatatcgacgttggccttatcttcgactgcacaaaggatgaataccccgacccggtagcactgaagaagaaggtgcgcgatgcggtgaattcgaacttccgcaccgtggtcatccgtcggccgtgcgtgactgtcaactatttgagcggtggtgagattgcataccacgtcgatttggccgtctacaccaacggcgatgatggcaagctctacttggccaagggcaaggagggctcggccgaggagcaccgcatttgggaggtctccgacccgaaagagctgaccaaacgagtctgcggtgcattcgaggactccagcaagcttgcccagtaccgccgctgcatccgctaccttaaacgttggaggcaggttcagtttcagagcgccggcgcaccgctgagtattgccctcaccgtggctgcacttcactggttcaagccaaacttcggcacgtccggcaaacctgtcgacttgctggcgatgcttgattgggttaattcgatgctaggccagttcacctacgaattcagccaggacgaaggcctgcatctacggatgaaggtcgcattgcccgtggagccgtattccgacctgatggcaatgcgaacagccacacagatgaagaatttcaaggagaagctggagacactgcgtgatgccctgcagaaggcctatgacgaggacctgcccgaagatgcctgcaagcacttgaagaagcagttcggcgacgacttcaaggtacccgagaaatccgagacagctagggcggtctctcccgccgtaatcagcacgggaaactctgcatga

SEQ ID NO: 357333 - DNA, 1671 bp, Pseudomonas aeruginosa
atggctgcttgcggcttgcatggcatcgtggttgttcgcctagacgacccagcaccgaattgcctgggggttgagctcaaaggcgcaacgcgcacttggcctatatatgtcgattgcaatgaggagcagttgcgcttaccgaaggtttggactcggcccccggaggagccgctcgcacatgttagctacaacggcgtagtgtgcattgacgacggccaaggactatcactcgaccctagccgtcacgctgacattgtcgcgcacacagtcctcaaagcatttcacctgctagagaactcagcagcggatgcaaccactggctacgtggagttcttcaacgaactcgaggggtactggctgcacctgccgggctcactgcgcgcccgcgcctacttcgaagtcgacggcacctcgcgcatggtcaaggggttcgtgaactcaaaagctggcaaatcgaagtggtacttcgtggagcgcgaaactgacttgccctgggaagtgcataccaacaagcttgcggggcagcgggcgttatacgttcacctcgactcgctagcattgccacccgttcggccagatatgctgacggcatcattcatcgaagatgttcatcaacgcctgtcgcctgaccaattgaagttatggggcgagttgttcggtccgtccaagaacggccccaagcaattggccctgttggtatcggtacctcgacaagccggcggccgctcgttggttggtatcgccttcggtgctcaccgcgggatcgttgacgggaaggtagcggtcacaccgctgaccatgcgccgtcatactcccaactatatgcgcgagcgaggaggtgcgtctctggagttgctcggcaagcacgtggtcgtgctgggagctggcgccataggctgtgtcgtagtggataccctggcagcggcgggagtgggcaagatcacggttgtagatcacgatgaatattcggaagacaacgtctttcggcaccttctgcagcccctgtacatcgatcttggcaagccgcttggcctacagctggcgctggagcgacgttacccaggactaaatatcactccagtctgcactacagcacaaaactggctcaaaactgctgatttcagcaaatatgacggaattgttctcgcgttcggtgctccatcaatcgagcgatcattttcacgggtgctcaaggacaagcgttttgacctgcctatcgtctttacttggctagaggccttggacttgggcggacactcggtgctgatgtggactaacggtgaaggctgcctagactgtgcctatagggacgatgagggactgccatccttggcgccgcgcacgtcctttttggaaccaaatcagcccgttacacgtaatctcacgggctgtggcggcgctttcgttccgttcggccccatccaggccagacgcacgggattgctagcgactgagcacatcctttcggcgatgactgaggtggccgctggcaatcgagatagagatccgtcctataggttctgggtaggagaaggccgggtagctgcccagcatgggttacgcacaacgccttggtttcaggctgcgcgcacaacactccctgaagacgcgacacggcaggtgttcgggcgcgcgtgccgccactgccgcacgccaataggttcaacatga

SEQ ID NO: 357334 - DNA, 930 bp, Pseudomonas aeruginosa
gtgaagggcgagtcggagcgattagccaaggacgtcaacaacctgatgctggcttgctatgactgccacgctcgtattgaccgacatggaaagaagaacaagttcaccactccgcagcttcaagctatgaaacgcgagcatgaggctcgtatccagcgcatctattccgctacaggcgtggtggagagtttgccgttgctgatgacgtttcccattgggccacacgtaaccaacatcgacgtagagcagattcacttcgcgatgttggagaatagcgactataagctgttccctcagggtagccacatccacatcaaccgcagcgattttgacttccaggacaacgacccagacttctggcctcgtgcggagaaggcgctgaccgatcactacgaccgacgtattcagcccgcgctcgtcgaccgtaacggcgacgcgcacttaaccattgccgggtttgcgccgatcccgatgctgatgaagctcggtgcgctcattggcgacaagacccgtgccaacgttatggacctgcccaacgacggttggttatgggacaagcgcgagacgtgccctgagcccagctacatctacgacgtgccaaaagtgctgccgcgagaggtttcggtggtcgtgagcatttcgggtaaggtcgcatttccaatcgacaatgaggtcgttgagttccgcgctgaattgccgaaccgcggcattatccgcaaggaaacacacctattgaacttccgccgtgaattcgatggtttccttcagcgactgacaggagcgggggcacgggtagtgcatctatatcctgcgacaccattatcggcgagcgtcgagattggtcgtatgttgctacctaagacatttgaggaaatctatgtctgggagtggcaggcgcccgaatggaagcgagcattgaagttaaagtag

SEQ ID NO: 357335 - DNA, 2283 bp, Pseudomonas aeruginosa
atgactcccatttggaaactagaaaaagtaaaggctttaaatgatgaagtgcgagagctccatccagtcttgagagaactatttcataaccttcccaccatttcggcagtcaactacacccaaggaagcagagaattcggagcagacttcgtactcactaaacgtgacgagatgttgatggaagaagactatgtcggagtgattgtaaagtcagttccaataaaacaaaaccatgatgaaatacgtagacaaataagagaatgtgaaatccctagagtcatagaaggcggaaaaaagaatattcatataacagaaatctgggtcattaccagcaaagaaataacaaaaaacgcccaggaaactctacaccatgagtataaaaacacaaagataagatttttcgacgctgacaaacttgttggactaatagatcgccactaccccaggtactgggaattcaccagcataaagctcaacaaatacatagccgaccaaaaagaaaaactagagcgagccgaagggcagcattctttagtcccatcaagagtaggccgtatagacataccacaccaaataattagctcaccactttattcgcgacgaaaatttaagaccacaaaatataaaccttccacacttacgaatgaattggcaaagcaaaaatttttgattattgaaggaggcatgggctccggaaaatcagagatgctacgcgaaacagccatatctctatgtaatcagaacgtaatcgaagagcataaaataataccttactttaccacatatagagatatcctagattcaggaaaagggcttgttcgactacatgaagagatagaagaacagcttgaagacaaaggaaaaactatagcatttttcatcgacggcttagatgaaactgatgaatccatagaggaaaaaacagaaaagatatgcgctttagcatctgaactttgcaataaagaaaatgcaaaggtagtaatgacaacccgcccaatccaacaagaaaagtgcctagaaaagatcggcaagcactatgacatatattcagtctgcccgctatcatacggattaataataaatatcgttgaaaaattatgcggggcaaactccataacaaataagttcagagatgacctgcagcgctctccacttatgaaggcgctaccacggacgcctctaagtgctattctacttggccgccttttagctgaaaacataaaggaacttccatctactctacctgaactttattcaaagtacactgaattagttttaggccgatgggacttaaacaaaggaaacggcagcgaaaaagaatacgaaacaatacatcgcattaccggaaaaattgctgcctacatgtcagaaaatgacttggagtatctaggcctcagagaactcaaaggcatattcaatgaatatctagaacaaaggcgcacaggacaaaaagtcgatgatttaatgagagcattcttgtgccgacaagaaataattggtgttgacatagacagggacgcagttttcttcaaacacaaaacattcaaagagttcttctttgcaagcatgctatatcagcaaaaaggcattgaggcgccaataaacaaaccattcgacatttactggcaaggcacagagtacttctacctcggaataataagagacgctcccaaaagaatctctgaattaagcagcattatccctcaagacgatattgaaattctatcaaaagcttcttccatgggaagctttttgctcgccgcctatcaaaccccgtatgttgaaatagaaaaatcagtatcaagagaattcatagaacttgctcagctttttattgacgtctcgtacaaaaagaaagatagctggctcaaccagctcccagaactacagcttctatgcctaattacatttatacttcgacaagcatatagttacgacttctttctcccggcacttcaagagtcaaaattccaagtagaaatagatgagtgcttagatacagaactaaaaaatacaagcatattcctattcgatacagtactcgcctctcttggtgacaagcatgcttttgtatccctgacagacaagcgagagtcaactctatcttggacactaagatttggtattaccaaggccgcccaagatgtagacttgataaatactgccacaaaaaaaatggaaaaacgaataagcaaagccaccaaaggcaatagaccattcataaactatatagagcaggtacaagaagtcccaattgcggaaagaaaaaacctaacaaattag

SEQ ID NO: 357336 - DNA, 126 bp, Pseudomonas aeruginosa
atgtataggcccatcgaccccatcgaccccatcgtgctcaccgccctgctgatctgccttagccagatgagcgagcaggatcaactggacctgctgcggttggcgtgcgctctcagggggcattga

SEQ ID NO: 357337 - DNA, 612 bp, Pseudomonas aeruginosa
atgaaggtaattgaacctttaagtagtgctctattggtgactgcctgcgtgtactccgcaggcatggcccagaactcctcatttatgggggcatttggggtcaacccagcgtttagccagccggccatcgacaaaatattttatgatggcggacttatcacctttgaactactattaaagcacctagtagtttttagtctaatagtaattacaatggctctgatatgccccctatcgatactagcactgaaaattaaaaacaagacaacatttaagctatccgtcccacccattatagacttatactcaaacctaataagctcattagtaaaaatgagcggaatactgactatagcttatttaattttactcacctttcttgcttacgacaaaggaagagctgatgggcttggggtagcaaaatccttcatgagcacgtgccagcaagtcatcataaaaaaaggcagcaaagactttcgcggctgcgcgttcaacaaagaccgcgattctttgtggtatatccctatggatgactccgaaatgcagcctagctccaagccgctctctgagatagatcggataatatatcttgatccaattgatctaaattaa

SEQ ID NO: 357338 - DNA, 1248 bp, Pseudomonas aeruginosa
atgcacaatggaagagttaagattgcatacctaaatgatgaccagaaagtttggttcattagggcgagctcagggaaatatgcgaaaaacttcaagcatggcggcttgattgcaataaaacacttagaagaagctctgggagccgcccttagcgataggcttccgactgaagaagaggtggtaacagctcttctaggaaatgaaaaatattataagttcgttgaagacaacaaaacaaaaaagcaaatcaaaaaacttaacagagccggaagcttgcttctatctcaaattaagagatttgccaatgacattcaagcgggcgatgtcatagtaaccaagaatgagggcggcggatatgatgtcggaatttgcgtcgacagccacgcctacattgataatgcgcctgtggaaattccgagggaaaatgatgagtctcctaaggagccagcactacgttataagtttcggaaaaaggtggtatggggcccctcgatagatcgctcgagccttccccaaacagtacgacgtgcgacacgcggccaacaaaccattagcaaccttagtgctcatcgagtaaagattttccacttaatttatccatttttcaccgacggcgaaaacctttatttctcaaacaaaataaagaaacaaggcgacatcaatgccttagttatcggaaagctattcgaaaacgtttcgttagcagaaaagctaatccaggaactaactgatgactctgagcttgatataagcaagctcataagccagttaaacaaagacatattctcgctagacagctttgttgcctgccaagccgagttcatgtctccaggggatatgtggtgcaaaatcccactatctcaagtcaaagagctggtacctcaactgacagctggagttctcgtatgccttctattaactgggcaggttgaagcagctgatattgataatttaagctcgatcccaccaactgctactgcagtcctccaagttaatgaaaacagcccctctacagcgatgttcaaagaaaaattcgaaggggcaaaacgctcaactgcactaaaagagttctcagagaaactcaagaggaaacaagctgaacttgaaaagcttgaagaaaagcgatctacaaaggaagttcgagagaatctaaggctggaagtcacgtcaactaagactgaaaaacttgagaaattcaactacggcataaatatcattgagctgagaggactaaatgaaggtaattga

SEQ ID NO: 357339 - DNA, 945 bp, Pseudomonas aeruginosa
atgggcctggtgggcgttgtccgcctcggcctggtagcggcgcatgcggtcgctgacatcgctggcgaacttgaccaccttgtagagcttgccgtcggcgtcgtagaccgggttgtagctggcttccagccagaccggctggccgttgcggtggacccggcggaactgcccggtgacgtactcgccgcggttcaggcggcgccagaggtcggcgtactgcgggccgtcgcggtagcccggttcgcagaactgacggtggttggcgctggccagctcggctcggccatagcccatggtggcgaggaagttgtcgttggccgcgaggacattgccgtcgaggtcgaactcgatcatcgccatcgagcgggacagggcatccagtttgctctgcatctcgtgttcctggtggacgatggcatcgatgtcgctggcgtacttgaccaccttcagcagtcgaccctgcccgtcgcgtacggggttgtaggtggcttccagccagagtggccggccctcgcgggtaatgcgcttgcagcggccggaaaagtgttcgccgcgccgcaggcgttcccagaagcgccggtagtcttccgattgcgcgtaggcgccgtcgcaaagctggcgatgcggtttgccgaggatctcgtcgcggcggtagcccagcagggtcaggaaattctcattggcatcggtgatattgccgtccggatcgaactccacgcgcgccatggagcggtccagggccgccatgtgcaggcgctcggcggcgagttgctgttgcaagtcggcgttcatctgtcggtacttgcgagtgaacatgagaaaaatccttggatagagagaggggctcatccctgtcttcggcgccgatgggcgggagttgagagggtgggacgattgtattttttcatcgaacgacaaaaattcgtcgttattcttaatgggtga

SEQ ID NO: 357340 - DNA, 612 bp, Pseudomonas aeruginosa
atgccacgtatccgctgcgagcgttgcgctcgccccgccagccattgcctctgcgcgctgattccctccttgccgtcgcgtacgcgggtgctggtcctgcagcaccccagcgaggtcgggcacgcgttgaataccgcaggattggccgtcctcggcttgtgcaatgcggagctgcgggttggcgagcgtttcgccgaggagacctggcgggtaccgggctaccgggcctgcctgctgtttcccggcgagcaggcgcgtgcgctggcagagatggccgccgaggccgccggcgagcccctcctgctggtggtgccggacggcacctggcgcaaggcgcgcaagctcctgcacctgaacccggccctggcggccctgccgcgggtgagcctggccgaaggcatggcgtcgcgttatcgcctgcgcaaggcgccgggagagggcgcgctgtcgaccatcgaagcaatcgctgcggcgctcgacgaactggaggcgccgcgtacccacgaagccttgctgaaacccttcgatgccctgatcgaggggcagatcgcggcgatgggcgaggacacctatcggcgcaaccatctcagccaggagcgccgccgccgatag

SEQ ID NO: 357341 - DNA, 336 bp, Pseudomonas aeruginosa
atggccagaccgcgcatcgccgaactcttcgaacaggaaccctcgcgctggggcggccgtggcgacccctacctctggcaggaaatggccgggcaactggcggacgcgtcctggccggcttccgcagcggccctggaacacctgctcggcgagaccttcgagcgcctcagcggccatccgctggaatacgatgccttgatctacctcgcgcgccacgcccacggcggcatgtccagcggcatggtcagcccggagttctggcgcgaaacggcaatcccggaactgctcgaccgctatcggcggcggcgctcctggctgagatggttgcgccgatag

SEQ ID NO: 357342 - DNA, 1641 bp, Pseudomonas aeruginosa
atgcatggcatcaagggggtatccatgacgaatacgtcgaccctgacgctcgatggcgtctctttccagctgccggacggcagccttctgttttccgatctcgacgaaaccttcgacacccggcacaccgggctggtgggacgcaacggcgtcggcaagtcgctgctcgcgcgcctgctcgccggacacttgcagccgtccagcggcagcgtccggcgccaggggcgcgtgcgctacctggcgcagcagctcgaaccggccgactacccgaccgtcgccgatctggccggcgtccgcccatggctggaggcgctggcgcggatcgaggcgggtagcctcgacgccgccgactacgaatgcttgggcgagcgctgggacatccgccaacgcctggccgacgccctggccgccgaggggctcggccatctccgcgcggacaccccgagcgaacgcctgagcggcggcgaatgcatgcgcgtggcgctgctcggcgcattcctcgacgacgccgactttctcatcctcgacgaaccgagcaaccctctcgacgggccggcacgcgctttgctgcgggcgcgcctggcggcatgggacggcggcctgctgctggtcagccatgaccgcgaactgctggagggcatgcagcggatcgtcgagctgtcgaccctcggcctgcgcagctatggcggcggctattctttctacgcgcagagccgggaggaggcgcgcgaggccgccgaacgtcgcctggaccagcgtcgtctggagcgcaagcggcagaccctggccatgcgcgaacagcagcagcgccaggagcggcgccaggccagcggccggcgcgaaggcaagacggcgaaccaggcgaagatcctgctcggtgggttcagggaacgtagcgaggtcagcgccggcaagctgcgcaacgcccaccaggcggagcgcgagcgtctcgaccgcgaggtgcgcgaggctgcccgggaggtcgaggaggcgtcgccgctgctgctcgattcgcccgatgccgaactggcggcacagcgccggatcgtcgagttgaagggcgcggtcctgccgcatctgcgcgggccgttgcgcgaaatcgacctgctcctgagcggtccgcgacggctggcactggtcggcccgaacggcagcggcaagtcgaccctgctgcggcttctggccgggcaacgggcgccgctggcgggaacctgcgcggtgacggtgggcgccgcctatctcgaccagcggctgagcgtgctggaccacgggcgaggcgtgctggagcagttgctggaggtcaatcgcagtcgcggcgaaagctggctgcgcacgcgcctggcgcaactcggcttgccggctgaacggctcgcccagccgtgcgcgacgctgagcggcggcgaacgcctgaaggcggccctggccctggtgctctacgccgaccggccggcgcagctgctactgctcgacgaaccggacaaccacctcgacctggctgcgcggcaggccctggaaagcatgctcgggcagtaccgtggggccttgctggtggtgtcccacgacccggtgtttctccggcgactggcgctggatggcgaactgcgggctactgccgcgggttggcgcctggaggaccgatga

SEQ ID NO: 357343 - DNA, 1590 bp, Pseudomonas aeruginosa
atgcccaactccccgcttccttccggccgcaggctgcccgcttgcgccttcgccgacatcggcgagccctacgccgtgttccaggctcccggcggcgcgctccttgcggtggccagcgcctttcatgggcaacacccgggccgacagctcgacgtctacgaacagagcctgcgcctgtaccgcggcggcgacctcgaatgcatcgccgtcctgccggacctgggctttccgctcaacgccatcgcctggcacccgagccggcccgtactggtgatcggcggcggacgctacgacggcggcgccttcttcgaaggcggtctgctggcctgggactacgcgagcggcaagacccaatcgctgctcgccgacaaccgcgaagtgctcgcctgcgacttcgaggacgacggccggcgcctgaccttcaccgtcgcccccagcgacgacctggaggaccgaccgttgttccgccagcgccattcgctagcctttccggtcgacgccccactggtgctggacgacctgcccggcacccgcctgcccttcgactgggccctctaccctgcctcgacacaacgcgaagcagcgctgccgatcctggaaaacctagccctgggcaaagatcggcggttcctgcatcgtccaccggtgtgggacctgtgctttctcgacggccaacgcctggccatcgcccgcgccaacccccggctcgagctctggaatctggccgacgacagcctgcgcagcttcgaactggccgaacggggccagtgcctgcaggtcttccataacgccacggacgacagcctgctggtcaatctgcaactcgggtatgccgcccagcgactgttcaaggtgccgctgacaccgggacaaccgctgctcctgagcgactgccgccatctgctggcgcaatccgcccaaggcggttttctcgcccgccagatcgccctcgagggcaaagacctggaagacctcgtgctcgacccggccggccggatcatccacaggcgccgtctcggacactacgacctgttcaaccaccatctgcgcatcgaccgtggcgaagccttcttctacctggccggcaatccgccggagcagcaccaggacaagggcctgttccgcctcgacccgcagaccttcaagacccgcgaagtgctacgcctggagcgccacccggagcacttcaacaacctgcacggctgcctgctgggcaatcgcctgctgctcaacgccaaggtctacaactcgccgcatcacgcctacggtacccagcgcctgacctgctacgacctggagagccgcggcacgctctggggcgcgaccctgtccgcccaggtcagcgccttcgcgccgttgcccggcggacaatggatcgcactggcgctggtcgatggtcaggtcgaggtacgcgacctcgccagcggcgaatgtcgctggcgctaccgcacggcagacgccataccgctgtgcctggcagtcagcgacaaactcctcgccatcggtttcagccacggcggagtcagcctcctgcaggtcgcggcggatggccagctcatcggtcctccaggcgccaacccgcggcagtag

SEQ ID NO: 357344 - DNA, 1824 bp, Pseudomonas aeruginosa
atgtggggcatcgcttcggtgcccaccatgaaaccctccccctcctacctcacacgcaaccgacacggaaccttctacttccgcatcgtgattccacgaccattgcgagccttgctccatggccagcgagaagtcagacgtaccctgaaaacagacagcgaaaggctggcgcgtaagcgtgcccggcaatacgtcgcacgctacgaagccgtctttgacaaggtagtgaacatggttgagcgtgatgaactcggcctaaccgaggccgactacaaagagctaatggagctggtccccgacttctccagcccccaggacgaaagcaacccggcagagcccatcctttcagacaaggaaatcgaggctcgccagcgccgccgagaggtcgagcgcttactgaccggcgcctatggccgtcctattccaaccgaacttgagcagacggcccagcatctgctcgaactgtcacacacctaccaaccgacagagcttcgggcaatcctgccgaagcttcgagacgagctggcgctgggtaggctcacaggggctagcgcagtatcagcactcccagccatccatcaagttgacccggcgatggcaaactggacgctctatcaagtctggcagcaccggctagagctggataaggccgacaccgccgagaaaagtggccaagcaaactatggcggatcgttggagctgaacgagcggttcgccagggtgatgacagtccttactaaccacaaaccagtatgcgagctatccaaacaggattggcaggcagcctatgacgctgcgcgcaaaatgaaggtcggagcggaagcctccatcgatccgccgactccgcgcgatgacctcctgaccgacgatccggagcaaatggtgggacacgagcgcaccaatgcctttatcgatgcgatgaaacggatgcagcatcacgcccgcactcttgatctgacggcagttagagaggacgagctgcgcatcaagcatgtgaaaaagagggagtcagcacgcacccgcgacggcaaagccttctccacctccgacattgaagcgatcttttcgggctatatctacagaggcacaccacccacaaacagaaccaaggcgtacccgttctggttctggctcccactaatcgcttacttcaccggagcccgaacaaacgagatagcccagctcgacaccgctgacatccgggaggtcgatgggcatccttgcttcgacttctgcccagacgatccgaaagccttcgaggcgaaacgaatcaaaaccggagaggcccgacaggtgcccattcacccgcgcttaatagaactgggattcttggagtacgtagacagccaacgccaagccaaacagaagaagctgtttggcgatggtctgacgtacttaccgccacgaaacggagaaacagaccataacaaagagggatgggctaaagcggccagcaagttcttcaacgagagcccaaggggctacttagtcgaaatcggcgttcacgtaccacatgacgggaaaagcctgtactcattcaggcatacacttgaaacgaacctgagacatgccaaacgcgatggcaagtcgatagaccaaaccattatcgatgcaataactggccatacccccgagactattgccggcaagcactatgacgacggagcgacaatcacgcaaaagttagaagcaatcaaattgctacccatacccgaagcggtgagagacttacaaagctacactcacaacttcatcaaccgatttaaagcgacactcacagacagcataataaaacacagagcaaaacatccacgagaaatatag

SEQ ID NO: 357345 - DNA, 852 bp, Pseudomonas aeruginosa
atgctagtagctggttctgaacttagaaaatgggttgcttatcgtagggggcgggggcttgaggtttatcgtgttggtattgatgagtcaaagagtgttcattcatatctaatgcaccttggattttttgattttatacgtgttgacgagggaaagaaggttggggaggccagggggtctaccaagtatttacctatcaccaagatacagcgtcctgagaagtcagtagccgaaaatggtgtggctgcctggtatgaatctatagagtcggagtctaggaagcttgctggggttttggttggtagctatgacgatagccaggcacttcgggcatatacttactcaattcgagagataatcagaaatgtttttgagcactccgaggctgatgagtgcttcgtttgtggtcagcgctggtggaacggcagtgtggaaattgccgttatagatgaaggtgtcggtatatgtcgaactttaaggcgctcatttcaaatcggaagcgatgaggaagcgctggccctggccattagtccaggggttagtcgaacaactgctcttgatacggaagaaaatatttatgataactcaggctttggcctatatgtgcttagtcaaataggcagtaatttcggctggtttgctcttggaagcggtcatgcaagggtcattggatatgagcgaaaatttgagattgctccgttttcttttgcgggaacttttgtagggataaagcttgagcgcactccgtctaattttagagagctgttgtcagatataataagctcaggagaggaagaggctagagaggctggtagggaggctaaggcttctggaatgtcaaagcttgtgtaa

SEQ ID NO: 357346 - DNA, 801 bp, Pseudomonas aeruginosa
atgcccgctgttatcactgagaacgatatttcaacatggagcgacgagtgcggcgcggtttatcactaccctaagcgatatagcggcattctgacgccaggaactcaggttatttactacaagggcaaactcacagataaggcttttgctagtcagcgccttagtccggtgcctcattacttcggggtggcacggattggaaagatttaccctgatgtgaatagctctaaaggcgatctattcgccttgattgagaactatcagccgtttcagcgtgctgtgatcgctaaagatggcgatagttatttggaagaaataccaccagctagagctaaaaattactggcgtaacggcgttcgtgaaattagttttcctgtttttgagcgtattttggctcgggcggaaattaagccttttcaagttgaggaaagagacgaggtctttgactctcaagattttcagtcgcgtgaggaggggcgtgcgtccggctattatggggtcaggtatgagcgcgaccctaggttaagactgcaagcaattgctatccatggggttgcctgcatggggtgtggttttgatttcgagttggcttatggtgattacgcaaaggggtatatccacgttcaccatacatctctcatctcagagtttgatggggcgagaatggtaagtccggagactgacctagttacagtttgtgcaaattgtcatgcggtgattcatcgaaggcgagatagaactctgaccttggctgagctgagagcaatggttcgcggcaggtggtcttttgatcgagtatga

SEQ ID NO: 357347 - DNA, 1275 bp, Pseudomonas aeruginosa
atgcaacagaagaccgggcatacactgaccaaggaagagcgcgaagcgctttttgacgaactcgaagcaacgctataccccgacaccggccattcgctgctcatcaaagagcgcgcagacgagataagcatcccgccccaagtcgagagcgagcggctccataagacccccgaggagctggatcgtgagctagacgagatgtgtgatgagcttctggccaagtatcgtcggccgtcagcaccctcactccccgggccagccgagaaagaagagaatgaaccagcttctttgccagcgaacactcctgagcccgaggggtgggcggccttctcgaccgccgatccctccgcgaatgaagagtacgaaccaagctttttgccagtgaacgcttccaagcccaaagattgggcagccttttcctcccccgcttcaggcaccagaaagcgctctcttgcaaaaaaacctgctggatcagcgactgccccatcgggagtagatgcaaaaaacggcaagcgacgcaccgcatccatacggctcccaaacgcccataaagcggggcttctagcgaatttccaaggcatgcgcgagcaaggtgtagcagctattagcgaactagacccagactttgaccatgagcagatagctcagattgaagccaagatcagtttcatcgaccaagtggctcagtcatacgcagggaacgactccggcaagctggctgactggtcgaagcatgtgccggcagaaatcaaacagttcttccggctgctctggctggcccgccaacctgacgcagttgccgtgaccattcgcctagatcatcgcacagcgacaaaggcgctcgatgcgaagcgaggcccggctaaccaccttgcagcgatcatccagcgaacgctagcaaaactggggatcagcactgaccttgcattcaatctggagtacacccacggcgccagcaccgagaaccacccgcttcacctacacgggattgtgcgcatcccggctgaccgcatcgaagaggttaggctggcgctcaggtcggcacttgccgagggataccggcagcgcttcggcaatcttgccgtccacatcgaggcaatcagcaacccacggtggtgggctgggtactgcaccaaggagcacggaatatccgccgacatcctcaagaaggcccggggaaaacggactgttccggactacgccagcgaatcggcgagagacggcggtaaaacgctctacgagagcgtaggagagcttttcagtgattacggctag

SEQ ID NO: 357348 - DNA, 201 bp, Pseudomonas aeruginosa
gtgattacggctagatgggtggcagcgctggcccttttcgcgctcagcgcgaccgcagagcccgctccgcgcactgacagcatcgatcaggactacgaagaatcgcagattgacaaagacggtccggatcaagacccggtgtacgacgaggacgacccgacttatgacgaagcggacgactacgaacaacaagaggagtga

SEQ ID NO: 357349 - DNA, 231 bp, Pseudomonas aeruginosa
atgcaacatcgcttaattagctatgagagtgcttgcgaactaattgaccacctcgacgcagttgagatacttagcgccggcagctttcaagccttcactagctccaagggtgctcagcagaaattcatcttgttaacaggcacctctgaatgcctcgttattgaaaatccgctgaaactaaggctagttagtggcagcggccaaactaacgcgaagcagcatgagctttga

SEQ ID NO: 357350 - DNA, 240 bp, Pseudomonas aeruginosa
atgcccgtaaagccccaccaatcccctcttgtcagcgtatttgctgagaacgtgcgacgcatacgccaagaactcggactctcgcaagaggagctagccgagcgggcaggcgtacaccgcacatacgtgggcatgcttgaacggagcgaaaagaacgtgacgatctacaacatcgaacggattgcgctagcgctggacgtagagccggccctgctcctgacccgaacagagagccagtga

SEQ ID NO: 357351 - DNA, 888 bp, Pseudomonas aeruginosa
atggcctctttttcggaagtgttcttgttcttttgtgaggggccgcatgattcagcttttttgtcacttctattgcgcaaggctcttggggtagataggcaaaatcttgtcgtgtcggatttgccctatccattctcaaatattattaagaagagtatggagagtcgtgctgctgaggatcttagactcgatttggctaagaaattctttttgccagattttgtgcatgcgcggggcgaaaagcttattttgatattcaactctggaggcaaaaatcgccgcgtcgaatcaatgcttccatttcttgagagcatctttgacctcttgtctgttggaagtacttttggtggtggggagggtggccgtactgtacctagtgttcggtgctctatttttgtggatgctgactctgatgggacaagtgtagcgctttctgaaataagccgtgactttgcattaatttgcgagcaagactgggtttctcaagcttggcaggattccgacggaggaaggttttatactcagagcacagcgtttggagaggtttctgcgcacatttggcggaaatgggaggaagatggagggacgttagaagatattcttatagagtgctttgagggtagcggtactgttcagtcgactcaggagttcctcgatcggcgattctcttgggagccgagtgagcctcagaatccaaaaaatgttagtgctactgccgcaaaaaggcttaaggcaactctttgtattgaagggcagcgcaaaaagcctggcggaagtcttagcgtagttttggatcaggctgggctgctaactgaagagtctatggcacgatctcgttcaattgcagcctgtctgaggcatctgaagagctggatgggagttccgtag

SEQ ID NO: 357352 - DNA, 2193 bp, Pseudomonas aeruginosa
atgtctgattcagagcgggaagagttggagccgtctggctctaaggcgacagccaatttgcggagggttagccttcgcaatctttatttggacccaaataactttaggcttatccatgaaccggatcagaagtcagtccccgatgagcaggtgaaggagcgaaacattgctcagcgcacaatgcgacttttggccggtgagcgaaatcagaatattcaggatttgatagaaagctttaaggcgaacggatatttgccagttgaccagatacaggttcgcgagttgcctggctccgggtatgtagtggttgagggaaatcgtcgtgtggctgccttgaaatttttatttcaagagtatgagagtaaggcggttgatttgggtgagcttgacccggaatttttcagccaaattccggtggtcatctattctgatgcggatgaggttcaccacctcactcttatggctcttaaacacatcagtggaaataagaagtggggggagtggaatcaggcgaagcttctggaaatgctctataccactcacgggctgagtgagagcgaaattcgtagtcggattggtatcagtacagttgagcttcggcgcagcctgcgggcattgtcgatggttgctgagtatcagtcttctgattatggggatcaatttgtggagacgatgttccctatatttcgccatgcagtgcgaaatgctgcgctaaaggactggctgcaatgggatgatgatgatcgaaaaagcaaaaatactaaaaatcgtgacttcttcttttcattgctttcccgcgaaccgcttgaggagccagaggatgatggctctatcggctttggggataaatacctagagcctgcggtaatcaagcgagatgatatagatctactaggtaaggttgtttcggatgatcgcgctctggagtatttgaagaagacgcgcgaccttaatggtgcctatcgtagtagtgatgtgatatttcgtgagcgacaagagtcaacaataaattctgttgcttcggagataatctccctgagtcagctgagtatacgtccagaaaatattcctgagctggaggggattcgagggaggctgcaaaccataattgatcgggcgaagatatcggggctgtcgggggtcgatcaaagacaggtttttcgcgatcgtgtagattctcattttggcaagattgaggtcgagagctatcgaagaatagtcgggctgactatgtctaatctttctcgaattaatttgattgcgggaataaataactctggtaaaacctcgctgctggaagcgatttatctactgattaagcaaaacgatattgatggtctgatagaggtaatgaggcgtcggggtaaggtttctacagatcaacttgatcctgaatggatgcttgagcaaattggtgatcgtccgctattggctggcggaatttttgatgatttaaaggctggggtaaaaattcagtctcgccaagaagaagactcaagcttggaccggacccgctatcttgggtctgttgagatggactctttctttggtgccagtaagctcagttccacaaacagagtgtacaaagggcaggatcgcgaaacgcacgcagacggtatccgctcgttgtgcccggttatttttagtagcccgttcttctacaacgaaccgcatcgttactccggatactaccataaaagtgtccagtctaaggctttgcctgcgatatttgaattcttgcgcgctaatatgctcccctctctcgaggatattcggctaacagatgagcgtcagcgatttgtagtaattgatagcaattttgcggaaggtgtggatctctcctcttatggggagggaattcagcggatgtttctactatcgctgctttttgcatcagcgcagcatggtgtattgctgatagatgaatttgagaatgccctgcattataagctgcttgctccattctctagatttgttcatcagatggccagagaatttaatgtgcaagtttttataactagccacagtaaagaatgcattgatgcgtttttgtttgaggtggatgcaaagtctgagttgtcctgccatgctattgttaatacgccagacggtatacgtagccgtgattttactggtgtgcgatttaagcgcctccttgatgctggtgatatagatcttcggagtgcaatttaa

SEQ ID NO: 357353 - DNA, 165 bp, Pseudomonas aeruginosa
atgccaaccgacctcgtcaccattcgtcaactctgccacatgctccagatcagcagcgcgacattatggcgccggcgccaagagcctggcttccctcctccctacaggatcggccgcttggtgcgcttcagtctctccgaggtggccctccacctccgcagctga

SEQ ID NO: 357354 - DNA, 1425 bp, Pseudomonas aeruginosa
gtgagtggaaggctgacagacacgcaggcacgagcctgggcgcagagtggcatgcttaagaagggggatggtcccaagcggacgaagactcactccgagcccctgggggagcgtggggcggggtctatgctcttggagcgccggactaatgggagcatcgaggtgtatctctcttggcgccgaaatggcggccaggagcgaatgaagctgggcgtctttggcgccttaggggcagatggacatgtaagagggctggctttctggcggcgggaggccgcacaaatctccgcccaggctcggccattctccaatcttgccgcttatgaggagcggcggcggctggaccagtcgcaatctgagcgccaggtgtcgttggaggcccaacagggcagtcttgagcagttgctcaaggcatatgtcgacaatttgaagcggcgcgagaaatcgagcgccaaggacgtaggtcgctcccttgagttgaatgtgctccaggccttcccagacttggctcagaggagggccaaggacatctcggcagctgagctgtcggatgtactacggctctgcattcaccgccaaccagcgctgaaagggcggggagtcaggaagacggtcgctaacgccgtgaatggcaagcggacaatggccaacaggctgcggtcatacctgcgcgctgcctacgcctacggcctgaagcacgatcttgatccattgcgagcaggtgactcgatccaatttggactgacgcaaaatcccgctgcgatgcttccgacgattgacggagcggagagagccaataccgattcgctgactaaagatgagctgcggcacctgctgctaggcatcgatgcgatggatgagccgcagcgtgccattgcccgctgtatggtttacctcggtggccagcgcgtggcgatgctggtgcgggccaccaggggaagcatcattgaggtggatggctatggctcggtccttgccctcactgagcggaagggcggcaaaggagcaatgccaagggatcatctccttccgctgactccgagattgcaggagtacctgaaacccttgctacaagcatccgcaggatcagtttcggatccgctgttttccgtgaggacaggtcgacaagtggcccgcgacacggcgctgcagctcttttcggagctgggcgctgaactggctgggaaggggcttgcgcgtaagttcacctggcgcatggtgcgggccagcatcgagactcatctggcgcagctaggcgtggatgagcagcgccgcgcctggcttctgtctcacggtcgcaacggtgtgcaggcccggcactatgatcgctaccattacctgcgcgagaagcgtgaggatctggagttgctcgggcgctatcttgatgaggttagagttgctgattcacttgggagaaaaggttga

SEQ ID NO: 357355 - DNA, 243 bp, Pseudomonas aeruginosa
atgacgacgcgcaagctgcggctggggccgctaccgaaaaccgataccacgaagctgacctttgcctgcccggccagcctgaaagccgacctcgaccgatacgccgcgctgtacgcgcagacctacggtgaagcggtcgatgccacagtgctgattccgcatatgcttgaggtgtttatggcaggggatcgtggttttaagaggggagggcagggggcagcgccggaggcatcaacgaagtga

SEQ ID NO: 357356 - DNA, 1065 bp, Pseudomonas aeruginosa
atgccgtatttgcgtgatcgccgcgacagcaaactttatagaactccatttaccgatgtcgtactagaaaagcttgttgaaatagccaagaaggacgggaagtcatctattgacggaatcgcgccgccacctcacatgcaaaaaaaacgattcgacagtttttgccattctgttcaatttgaatactccaatcttgaatatctttccataccggggctggggagtgacttcagccacgacggatttcttgctcctgtgtatttcaataatgaagtcttaaataagtatactcaaaatcccaaatacacaattgatatattttcgggaacatacggcagcatagcccagggcgatgaatggcaaatatcatttggcgtcaatgccagcaaacaggtaattatgtggcttggcgacattgataagctgccaatcaaagagcagcaatatttgctttcggagaatattccttctgcatttgatattcactctgacttttttgacgcgcaaattgaaaatcattggtcagagggcgccatcgagaatatatgcctgaatttaaggcgggaaatttccgataaagtaaaaatcctttatggcgatagcctttataaacttccgaatgagattggagtaactattgcagggttgcagaaaccgattttttgggaagatcgacatgtggcaccagttgtcgaatcactaaatcgaatatttattgaatcactaaacgaaaatttcctaaaagagtttctagtttctcgtgatgtcaaaatcgcgcctggagcacgcgggctgaagttgcttcagggtgttattgaaaatctatctaaccaaactgaagcgcgggcaataatgtcgccattctttgtgctttatgactacaggataaatgtttgtcacttgcagtctcaagaaacagtaatgacaaaaaccaagacaataaacgaaagactttccatcgatgcatcgaatgcgtctcacgaaataatttatgatagtctttttgagaaaattcatgattcgctcacaaagataaaatcgcttgttgaaatggaaccaaaataa

SEQ ID NO: 357357 - DNA, 669 bp, Pseudomonas aeruginosa
atgaatatgatgctggccagtgaacttcatgcaggcgatgttctgctttgctacaaagatgcaaaaatcgacccaattggtaaaggcatcagccgagtaacaaacagcgaatacacgcacgctgcgatttgcattagctccggcactgcggcagaggcaacggttcgaggtggggtgtccaaggttgagattgaagacctcatcaaacggtacgatcatgtcgcggtattccgtcaacctgatgcgtggcaacctccagaacgcgtgcaagccgtaaatgcatttatagattccgtcgtggcctctggagcgaaatacaacttgcgcgacgtagtaactttcaaaaaaagaaatgagattcaccagctatcgcttaccgaccagctccatgcgtacttcaacggaacctacgctccagcgccagtcgagaaaggtagttatttctgctctgagcttgtggcaagctgctttgtcgtcaccggcttcttagatcctagcgcagccgtcgtctacaaatcagatctcacttcgcctggtgcattagggagagatccaactttcggaacgttctgcggttatgtttcgaccgtgccaaattactcggttccggctacggatgagtttatcaaccactcgacattcaatgagatattcggcagtggcgcataa

SEQ ID NO: 357358 - DNA, 258 bp, Pseudomonas aeruginosa
gtggtcaagctgttcacgccggacgccggcgcgtcctggctgctgatcgagatcggcccggacgatcacgaccacgcctttggtttgtgcgacttgggcctggggatgcccgaacttggcggggtcagcttgcaggagctggcgaccttgcgcgggcgactaagcttgccgatcgagcgcgatttgcacatccgtgcggagaaacgcttgagtgcctatgcgcgcaatgcgcggcacgccgggcagatcatcgtgtga

SEQ ID NO: 357359 - DNA, 459 bp, Pseudomonas aeruginosa
gtggtcaacctgatcctcgtcggcccgatgggtgctggaaagagcaccatcgggcgcctgctcgccaaggagctgcatctcgcgttcaaggactccgacaaggagatcgaacagcggtgcggcgcgaatatcccatggatcttcgatgtcgagggcgaggtcggtttccgcgagcgcgagcaggccatgctcaccgaactctgcgccgcaccgctgttcgatctccttgtcggagtccttgaagcctcggtcgagcaccagatcgcgcgcacggcgcgggaccgcaaccgccccttgttgcagaagcccaacccgggacagatcctccgcgacctgatggcgctgcgcgatccgctctaccgcgaaatcgccgatgtggtggtggagaccgacgaaaggccgccgcgcctggtcgtccaggaaattctcgaacgcctgcgcaagttgccgccccgctga

SEQ ID NO: 357360 - DNA, 270 bp, Pseudomonas aeruginosa; identical to SEQ ID NO: 349378

SEQ ID NO: 357361 - DNA, 219 bp, Pseudomonas aeruginosa
atgaatgacatccatcaaatgccgcccgataccgcctttctggtgagctgggtcaacgaaaacacttctgacgacatcaccgtcgagaccggcagtgccaataatgttttcgcccaacaaggctacgaagaccttacgcttcgtaagctgtgtggtgatggcttcaggagaaaagctttgctcaacctgagcgatcacatcaggcggatagtcctgtga

SEQ ID NO: 357362 - DNA, 1119 bp, Pseudomonas aeruginosa
atgccgttccagcgcgcgccggctcaggtgcttgccgcgctcgcggtgggtgaagcggccgggatagtcgtagtcctccaggtccggttgctgcgccccgggctgcgggccatgggcggcctgcatctgcaacgcgggttgctcgaagtcgtagtcgcgccgggtaacccggctggcacgggtgtcgaagcgcacgccgaagcgcttgaccaccggctggtcggcgaccagcccggcgtcctgcacgtaggcgacggggcgttgcagccgcggaaaggaggtctggtcgtcgccgaagaccagcacatggccctgggcagaaaactcatggtggtaatggatgccttcctcctcgcagagcctgctgaggaacgccaggtcggtttcgtcgtactgcgtgcagtattcgcgggccgggtacggcgtcgggcccagctggaagcggtaggcgtcggcgagaatgccgtggccctccagcacccgaccgatgatttccggcacgctgaggcgctggaagatgcgttggtcgctgcacagccccaggtaggccaggcgcggctccagggtcgcgcgatagccggtcaggcgcttgccggagtccccctgggcgatgctggtgagctgtccgtggaccccttgcccgctcggcgagaggatcaggaaggccggctggtgcagcagcgcgtcgaggtccagatcggatcgctcgctgaccagctccaggtcgaagcgaaagggctggctgatggcttcgcgaccgcggaaggcgagtacctggaagtcgtgccggaggttttcgatgcgaaggctgaagtgcgtctggttggcgggggcgaacattcactgtcctcttggaaacgcagccgtgcgttcctggcgtattcggttccgggcgcgacgcgcctgcgcccgcgcgatggaaatgctggccgagaggatagaggagaacagttgtgcaactctttgcgcactcggcctcccggccgcatcaacgctgacctcaataaatttgtaacagaaaatttccagaataccgacacggacgccccaccccatccgcggcattcacgtccgccaggacgggccaggcgtccgccgcctcgagcgcctcaggcgtag

SEQ ID NO: 357363 - DNA, 1194 bp, Pseudomonas aeruginosa
atgagtgttctgcctgacgcggtgtgctggcacgaagggatgcaactgcttccccagcatttccagttgcagggattgcgtgccgaggcgctggcggcgcgcatcggacaggcctgcaacccttggttctggggagtgaccgccctggaactggacccctcggcgttgtgcgccggccaagtgcgggtcctgcacctcgaagcgatcctgcccgacggcctgccggtgagcgtgcaggctggtgtcgacgcgccgctggagttcgatctggagacagcgctggcggccgccgaagggccgctgctgaacgtccacctggcggtcagtccgctgtggcgggcgggtcagttgctgccgctgaagggccgtctgcaatcgcgggtcggcgcgccgctgccggacctggccagcggcgagcaccccgagccgatcaccgtctggcgagcgtcgctgcggctggtcggcgacgacggcaaggccgactccgtgtgcctgccgttgctgcgcgtggcgaaggagggcggcgcctatgtcagcctgccctacgtcccgccgacgccactgatcctgccggagtcgcccctgggcagacgcgtgcagtcgctttgcgcgcgggcccgggagaaggcgctgttcctcggcgggcgcctgcgcctggcgcagcaggcgggcaaccaggacgacgcggtggaaatccgtcgccagcttgccgcgctctggacccgcctgccggaggtcgaaggcctgctggcaagccgtgcggcctcgccgctggccctgcacggcagcctgctgggcctggccggtgcctgggcggcgctcgatccgctggccggcgtgccggccttcgaagcgctcgacttcctcgacctgcggcgtggctacgagccgctgttggactggttggagcgcgccatcgagtcgatccgcgcgggctaccgctgcctgccgttcgccccgcacctgccgttgctcgcccggcaacgcatgagcgggctgccgcggcagccgatgaatcgccaggaacaggtggcctacagcgttggcgacgacacccgtttgttcgtcgtgcagggtgccggcgactggttcgatgccggccagccgctgcgcatcgtcgcgccggtcagcggggtcgccagcagtccctggcagatcgtgctgttcgtcgccgacggcagcgacaacacctag

SEQ ID NO: 357364 - DNA, 768 bp, Pseudomonas aeruginosa
  misc_feature (706)..(715): n is a, c, g, or t
atgcccgcgcagcgtcatccgccgtatgtcgcgaacggttcggcggggcaggcggccagcacggattgtccaaaccgctcaggcagattgaagcctttcgacattgccccgcgtcggccatggcgtgaagattccggctactccatacaaaaacaagccgaggagtcctgcaatgcgcgactacgccaccactgccgccgggttcgacttgcagcggaccgccgccgccacgctttccggtacgctccaggcgctcaacgcctgcgtcgaatgctgcgaccggcatgccctgccgggacggatcgcgttgttctgggagggcaaggatggcagtcgcgccagctataccttcagcgagctgaaagcgctctccggacgtttcgccaatttcctccaggcccagggcgtacgcccgggcgactgcgtcgccggcctgttgccgcgcacgcccgagcttctggtcaccatcctcggcgcctggcgcctgggcgcggtgtaccagccgctgttcaccgccttcggcccgaaggccatcgaacaccgcgtggcgaccgccggcagcaaggtgctggtcaccgatgcggccaaccgcgacaagctcgacgaactcgccgatccgcctctggccgtcaccgtcggcggaccgaaggggcagggcatccgtcgcggcgatttcagcttctgggccgagctggagcgctatccnnnnnnnnnnctatccggccgaattcgaaccggttccgcgcagcggcgaggatccgttcctga

SEQ ID NO: 357365 - DNA, 912 bp, Pseudomonas aeruginosa
atgggtacggatctccagcacccggccatcgaacaggcgctgctcgcgggcgctcagcggactcccctgggagtcctggctgcgcggcgtgagcaacggcaattcgctctccgccatgacttcggcgaaggcccggtgcccggcgatcggggccagcccgcagagctccaggaagcgccggttccacaactccagcacgccgtcggcaccgaccatcgccacgccctgggagagattgtccaccgcccgctgcaacaggtgcgacttctgcgccagcgcctgctcgcggcgcgcggtctcgctgagcttgatctcggtgacgtcgctgtagagcaccgccagcccgccgtcgcgggtcggtcgctcgctcatccgcagccagcgctcgtcgcgcaggcggtacagggtctgctggtcgccgccacgctgctcctcgacgatcagcccgccgctacgcgccagccggtgcagttcggcgcgacgcatgccaggaccgatccgcgcccggctgtcgatccacagcgcgcggaagcgctcgttgaacaacacgatgcgttgctgcggatcgaacaggacgaaggcgtcggagatgctttcgatggcgtcgagcagatgctggtgggcggtctcggcacgcaggcgagcgtcgctgagcaactggttgctggccttcagttcgagcatcgtctggctcagcgcgtcggtgcgctcgcggacctgctcggccagcaccacggaatactggaaggcgccgtaggcctcgtcgctctgcgcggcgctcgactcgatgcgtccgatcagcgcctggttgatccgctgcaacttgtgccgctcttcttcgagggcgacgacccgcgcctgcagctcagcgacggacacctccgcggggtcggccaatggcgaccccggtga

SEQ ID NO: 357366 - DNA, 915 bp, Pseudomonas aeruginosa
atgcagtgttttgaggatcggtaccgccagttcctgacgtattcgccaccgatcttcatcactcatgtcccgcgcttggcgctcgacctcgtacaagccgctgatagagtgcagcgcctgttcggccaactgacttttgttcgccacgtgcagatcgaaaaacttgcgacgggcgtgagccatgcagccgatttcagtgatgccttgctcaaaaccagctttataaccagcgaagtcatcgcaaaccagcttgccgctccagtcgcccaggaagttgcgtgcatgttctccggcacggcttgggctgaagtcgtaaaccaccgcattaagcgccgaaaatggcgtcgtgctgtaggcccagacataggcccggtgggttttcctctcgcccggcgcaagcatttgcaccggtgtttcatcagcgtgaatcacgccctggctcagcaacgcttcacgcagtgcatcgaccagtggctgaagtcgcacgccagtttgcccaacccactgggccaaggtcgagcgagcgatggccagcccggcgcgaccaaagattttctcctgccggtacagcggcaagtgatcggcaaacttggccaccattacgtgggccaacaagcctgctgtcgggatacctttatcgataacctgcgccggcaccggcgcttggatcaatgtttcgcactggcggcaggcccatttgccacgtacgtgttgctcaacggtaaacacacccggcgtgtaatccagcttctcgctaacgtcttctccgatgcgttggagttggcagccacagacgcactgggtgttttcgggttcgtgacgaatcaccatgcgtggaaactgcgacggcaatggcacacgtttcggggattgccgtggttcggcctgtggcgcagctggaaggagctgttttag

SEQ ID NO: 357367 - DNA, 630 bp, Pseudomonas aeruginosa; identical to SEQ ID NO: 335262

SEQ ID NO: 357368 - DNA, 870 bp, Pseudomonas aeruginosa
gtgccgctgctgctcaacggcgagaccggttccggcaaggaggccttcgccaaggccgtgcacctggccggcccgcgcgcggaacaggcgttcgtcgcgctgaactgcgcggcgatcccggaaaccctgatcgagagcgaactgttcggttatcgcggcggcagcttcaccggcgcgcgcaaggagggcatgcgcggcaagttgcagcaggctgacggcggcaccctgttcctcgacgagatcggcgacatgccgctggccttgcagacccgcctgctgcgggtgctggaagagcgccgggtggtaccgctgggcggcgagccggaggatgtcgacgtgcgcctgatcagcgctacccaccgcgacctggccgggctggtcgccgatggacgcttccgcgaggatctctactaccgcctcaatggcatggtcgtgagcctgccgccgctgcgcgagcgcagcgaccgcgaggagctgctggactacctgctggccgaggaggccaggggccagcgcatccagctcgacggcgaggttcgccagggcctgctggcctaccgctggccgggcaacgtccggcagatgcgcacggtgctgcggaccctggtggcactctgcgaggacggccgggtcggcctgcgcgacctgcccgcggatatccgccaggccctggcggcgctgccgcccgccgcagcggcgcccgccccggccgcgggcaacagcctggacgacgccgagcgagccgcgttgctggcggcgctggacggccagcgctggcacgtgagccgggtggccgagcaactggggatcagccgcaacaccctgtatcgcaagctgcgccggcacggcctggtgcgcggccaggcctga

SEQ ID NO: 357369 - DNA, 231 bp, Pseudomonas aeruginosa
atgcccagcccggagcggattgcctcggtcatggcgtcgccgacattgacctggaacggcgaggcgccgatggagaccatttcctggccgttgggaccgtcgaacagccagcgatccagcggcaccaccgggctgaccaggcgcaggcagtcgtggctggccagctccgaaggctcgctcggcgtgccgttcaggcgcaggtactccggcgaggcgcaaagaatgctgtag

SEQ ID NO: 357370 - DNA, 1206 bp, Pseudomonas aeruginosa
atgaacttcccctggcgcgacggcaaccgcgtagaactgctgatcaacggcgaagagtactttccgcgcctgttccagtgcatcgccgaggcgcgccgggagatcctcctggaaaccttcatcatcttcgaggacgaggtcggccggcagttgcaggaagccctcagcgccgccgccgagcgcggtgtcgaggtacaggtcacggtggacggctacggcaccgcctcgctcagcccggactacctggccaggctgaccgccgccggggttcgcgtgcacctgttcgacccgcgcccgcgcctgctcggcatgcgtaccaacctgtttcgccggttgcaccgcaagctggtggttatcgatcgccagcaggccttcgtcggcggcatcaactacggcgaggaccacctggtgcgtcgcggcaacatggctaagcaggactacgcggtgcgcgtcgagggcccggtggtgcgcgatatccgccaggcctgcctggcgctgctcgaaccggacgccgactacccgccgttgcggccgtcgggcgccgggcagccggcgcgggtgcgcctggtaatccgcgacaacgaccagtccagcgacgacatcgagcgcgagtacctgcaggcgatccgccaggcgcggcgacgcctgctgatcgccaacgcctatttcttccccggctaccgcctgcttcgcgagctgcgcgatgcggcgcgccgcggcgtgcgcgtcgacctggtactacagggcatgccggacatgccgctggtgcgcctgtgcagccggttgctctacgactacctgctgcgcgagggcgtgcgtatccacgaatactgccagcgtccgctgcacggcaaggtcgcggtgatcgacgacgactggtcgaccatcggttcgagcaatctcgatcccctcagcctgtcgctgaacctggaggccaacctggtgatccacgacgtcgccttcaacggccagctctaccagcacctgcgcgagctggcgcgccgccactgccggcgcatcagccgccgccacgcgaggcgcggctactggtggcgggcgccgctgatcttcctcggcttccacttttcccggcatttcccggccatcgccggttgggtacccgcccatctgccgcgcctgaaatcgctggagccgcgtccgtcgcggcgctggcaggaacgccagggccagcggggcaacccatga

SEQ ID NO: 357371 - DNA, 1443 bp, Pseudomonas aeruginosa
atgcccagcgccgtctcgtcgtcgcggctcggcctcgccgggctctgcatcctgctggcggggcaactgttgccgatgatcgatttctccatcgtcaacgtcgccctcgacgccctcgcccattccctcggcgccagcgaaaccgaactggaactgatcgtcgccgtctacggcgtggccttcgccgtgtgcctggcgatgggcggccggcttggcgacaactacggccgtcgccgcctgttcgatctcggcgtcgccctgttcgccgtcgcctcgttgctttgcgggctggccggttcggtctggctgctgttggtggcgcgcgccctacagggcgtcggcgcggcgctggtcgtgccgcagattctcgccaccctgcatgtcagcctcagcggccacgcgcattcccgcgcgctggccgcctacggcgccatcggcggcctggccttcgtcgtcggccaggtgctcggcggcttcctggtctccgccgacatcggcggcctcggctggcgcagcgtgttcctgatcaacctgccgatctgcctcggcattctcctttgcagccgccgctgggtaccggagacccgcgccgagcatgccgcccgcgtcgacgcgccgggcaccctgctgctcgccgcgctgatcctctgcctgctgctgccgctggctctcggcccatcgctgcactggtcctggccctgcgccctgctgctggcggcggcggtgccgctgctggcctggctgtggcgcaccgagctgcgccaggaacgccgccaggcctggccgttgctgccgccgtcgctgctgcgcctgccgagcatccgcttcggcctgttactggcgatcctgttcttcgcctgctggagcggcttcatgttcgccctcgccctggccctgcaggccggcgccggtctctcgccggtacaggccggcaatgccttcatcgccctcggcgcctcctacttcgtctcggcgctgctcaccgcccgggtggcggcgcggatcggcccggtacgcctgctgctgctcggctgcctcatccagatgtgcggcctgctcggcctgatgctgaccctgcaacgggtctggccgcagccgggcatcctcaacctggcgccggcgaccctggtgatcggcttcggccaggcgttcatcgtcagcagcttcttccgcatcggcctctcggaggtgccggccgcccaggccggcgccggcagcgccatgctcgccaccgtccagcaggcctccctcggcctcggctcggcgctgctcggcgcggtgttcgcgcacaggctggagcgccatggcgactacctggaagcgacgcagacgaccctggccgtcgagttcgtcctgatgacgctgctgctcggcgccacctgcctcttctacctgcgccgcgtgcgcacggtgccattgcgctgcgactcgccgggcaactga

SEQ ID NO: 357372 - DNA, 669 bp, Pseudomonas aeruginosa
atgtgtataagagacagcgcggaggatgaaggcgccgtcctcgatctccaggtaggccaggtcggtgagcaccttgcgaatgcagccgcaaccggtcagcggcagggtgcagtacggcagcagcttggactcgccgtccttggaggcgtgggtcatggtgacgatgatgttctcggcgccggccaccaggtccatggcgccgcccatgcccttgaccagcttgccggggatcatccaggaggcgatgttgccgcgcacgtccacctcgaaggcaccgagcacggtgaggtcgacgtggccgccacggatcatggcgaaggactgcgccgagtcgaagatcgacgcgccgacgcgggcggtcacggtctgcttgccggcgttgatcatgtcggcgtcgacttccgcctcgctgggaaacgcgcccatgccgagcaggccgttctccgactggagcatgacgtcgatgccttccggcacgtagttggccaccagggtcgggatgccgatgccgaggttgacgtagtagccgtccttcaattcgcgcgccacgcgctgcgccatctgttcgcgggtaagtgccatctggggaaacctcttgtcgttgtagcggccgccgtcaggcgcgcagcgtgcgtttctcgatgcgtttctcgaagcgaccctggatga

SEQ ID NO: 357373 - DNA, 459 bp, Pseudomonas aeruginosa
atggagcgcatccagctgctgttcagcacgactcgccacccgttcagcggcctgatccgcgcggccacctggtcgcgctggagccacgtcgcgctggtcgctgggccccacgtgatcgaggccgttgccctgggcggcgtgcgccaggtgtccaaggcctacgccctccagcgcgcctcggagtactgcctggtcgacctgccggcccacgatgcgcaggcgatcatcgacgcggcgcgcagccagatcggcaagccctacgactggacggccgtggccggcctcgggctgcaccgcgactggcaggaggacgattcgtggttctgctcggagttggtggcctgggcggccgatcaggccggtgagccctggttccgcccggaggcgctgcgacggatcacgcctcagcatctgtggatgctgtcgcccgaacgggggctgtgtccggtagaggaataa

SEQ ID NO: 357374 - DNA, 756 bp, Pseudomonas aeruginosa
atgactgctcccgtcatccatatcgcacatccgctcactggcgaatacctcggtaccggttacgcggatcccgacccgcaagacgccgaaaactggctggttcctgcacacgcttatctagacgccccgcctgaggcgtctgcaaaccaaacccctgttcgtacggaggggggctggacactgctgcccgactaccgaggcaccgtttaccgaaccgataacggaggtgctgtcgagcacgcggagcttggtgagctgccggaagggttaaccgctgagccgcggccatcttcaagccatgtctggacgactgagtcctgggtgttcagtaccgagctgcagaatgccaaccacgatgcactgaaggtgcagctttgcaaggcaattgacgcagaagccgacatggctcgtcgcgctgttgcaggtgatcctctacgagcggtggagtacgagaaagcagcctccgaggctcaggccttcaaggatgccggctacccaggcggagcggtgccacgcactgtggcggcctgggccatcaacggccgtaccgcccagcaggcggctgacaacatcctgtccgaggcagcggcctacagcgaggcgctttaccggatccgcgaggcccgcctcggtgccaaggaacaggtgcgccaggccatggcagccaaccaggtggagcaggcccacatgattgcctcggccaccatcgacagcatccgcgcggcgatagccggcatcggtaatgcaggagcctga

SEQ ID NO: 357375 - DNA, 1032 bp, Pseudomonas aeruginosa
atggctaacgtgccagaaacgcccgattacccagctggcatttaccagctcgaaacctccgacccggtactgggtggcgcaggcggcattgccaatcgccaggccgagcaactggccaaccgcaccgcctggctgaaggccaaggtcgacgcctttatcgacggtaccgtggcggtgctcaaggccaccaagctggctaccgcgcgcacgctatcggtcagcggcgccgccagcggcagtgcctccttcgatggcagcgccaatgccaacatcgccctgaccctggccgacagcggtgccgtggccggcacctacccgaaggtgaccatcaacgccaaaggcctggtgactgccggtgccgccctggtggctgccgacattcccgacctggactggagcaagatcaacagcggtaagcccaccaccttggccggttatggcatcacggatgccttggctgcaggcgggactgcggtagcggccgcaaagctggcaactgcccgtagcatcaccctcagtggggatattgcaggcagcgccacattcgacggcacaaccaatatctcaatcgcggccagcatcgtcgggagcgtcggtcagattgctctatacgcgatgtcgtcaccgccgaccggatggctcaaatgtaacggtgctgcaatcagccgcaccacatatgccgatctttttgccgccatcggcaccacatttggcgccggtaacggttccacaaccttcaacttgccggatctgcgaggtgagttcgtgaggggctgggatgatgcgcgaggagtagataccgggcgggtatttggctctgcccaaggcgatgcattcaaggctcacttccactccactgtgggtaacaaccagttcggaaatttccagtacatcgctgacgtaaccacgggtggtaatgctggaacagctgcgggcaccaacctatcaaccaatgcgccatttaacgatggcggtggtagcaccgaaactcgtccccgcaaccgagcgctgctcttctgcatcaagtattga

SEQ ID NO: 357376 - DNA, 582 bp, Pseudomonas aeruginosa
atggctgagcagcagctgccgccggcactggccggtgatgagcgcttcgcgctgctgtgcgagctgctcgccgagacctacgccgagctggatctcggggcgatggccgtctacctggtcgaccaggtcaaggcgtccctgttgccgaccctggccgagcagttctccctgctcgatgaggccgcctggctgctggccgagtcggaggatgcccggcgcaacctgatcaagaacgccgtcaccctgcatcgctacaaaggcacgccctgggcgatcaaggagatggtgcgcctgctgggcttcggtgaagcgaccctgctggaggggctcggaggcctggactacgacgcccaggcgaacttcaacggcctgcgcgtatacggtgacactggcagctggccggtgtaccgggtgttcctcagccagcccatcaccaatgaccaggcagaactgctgcgccgcgtgctgcgcgccacggcaccggcccgctgccgcctggcctcgctggagtacacggcggtacccgttcgatacaaccaagtcgccgcgttcgacggccaatacaaccatgggagcagctaa

SEQ ID NO: 357377 - DNA, 1119 bp, Pseudomonas aeruginosa
atgcgcgcactaccaccgcctgagttcgtcaaggtcgacccggccgccatcgaggcggccctggtcgcccgctacgagtcgaagtccggcaagaccctgtaccctgcgcagatcgagcgtctgttcatcgaccaggtggcctattcgcagagcctggcgctgatggccatccagcatgccggcgagcagctcctggtgcgcttcagctcggcgccgatcctcgactacctgggcgagctggtgggcacgcctcggctgctcgcccagtcggcgcgctgcaccctgcaattcagtgtcagcgaggtcgcggcgctgccgctgctgattcctgccggtacccaggtgaccagccaggacggtcggctgatcttcaccaccgacgcagacgccaccatccaggccgggcagacccaggtgcagacctcggccacctgccagacagccggtgccgtgggcaacggctgggcggttgggcagatcagcgtgatgcccagcccgcccttcgacgggctggtggctagcaacgtgaccgtgccggccgatggcgccgacgaagagaaggatgaccgctacaaggagcgcatcatcctggcgccagaggcctacaccaacgccggcagccgaggctcctaccgctaccacgccctgtcggcgcaccagaacatcatcgacgtggccgtgcatgggccggacgatggccagctcgatggccatgtcgccgtgtacccgctgaccgccagcggcctgcccaccgccgacatgctcaccctagtactgaaccacctgagcggtgaaaagcgcaggccgctgtgcgacacggtgcatgccatggcgccgcccgaggtggcattcaccatccagggcagcctgaccttctatgccaccgccgaccgcgcgctggccatgcagcaggctcaggcagcagccgatgcctgggcggcagagcgacgcggcggcctgggccgagacatcgtccccgagcagctgacagctgtgctccaggtggccggggtataccgggccgccttgaccctgccggtgctgacggccgtgcagtcgcaccagtgggccaactgcaccggcatcgtgctgacggacgccggggtggtcgatggctga

SEQ ID NO: 357378 - DNA, 384 bp, Pseudomonas aeruginosa
atgaccacgcccacttcctacaccagcatcaccgccgcccactggcaaccggccctcggctcgcccggtgaggccgtcgaaggcctgcgcgatatcgaccaggccatccgcatcatcctcaccacgcctcggggcagcgacccgcaccgccccgagttcggcagcgacctccacctttatatcgactggcccaccgaccgcgtcgtcccgcacctggtgcgtgaggcggtcgaggccattcgccgctgggagccacgagtagtcctggtgcaggtgctgaccgagatcgaggaggcccacatcaccctgcgggtgcagtggaaggtagcggacggtgttctccagcagaccgaggtgccgtatgcgcgcactaccaccgcctga

SEQ ID NO: 357379 - DNA, 933 bp, Pseudomonas aeruginosa
atgatccaaaaggaaatcgtagttctgggccaacgcaggtcgatctctggtgaccgcgactacctggggcgaatgggggaagagttcgaaccagaaaccacatccctgttggcggcgctctgcgatgctgatgcaactgctgtggacatcggtgccaacattggcctgacctccctggctctttcgagcatctgccacggcggaaaggtcatagccatcgagccagttccccataccttcgagctgctaaacaagaaccttgcaggagcgggcacccagaatgtttcctccttcaatgtcgcagttggcgcgagcgaaggctcggtctccatgtacgttgatgagcgcaacctggccacctcatttgtcgtggatatcgacagtggcgccggccaggaaatacccctgacctcccttgactccctggtctcccagttagctatcgagcgattggatttcatcaagatagatgtggaaggttgcgagctggaagtcctcaagggcgctgaaagcacgctcaaccgattcaagcccattgtcatgctggaaatgaaccattggtgcttgaacgtattccggcgcgtttctttgccggagttccgggaaaaactactccagctattcccatacgtttatgccgtcgaccgggggggctatctggacttctctgacccattgaatgcgggctcgatctatcacgagcatgtcttcgagaatcggtatatgaaccttgtggcaggattcgatcaggccgagttgattgccagacttaactgcctgaaacctgtcccacaggttgcttctgcgccatgtgaggttgccgccgacaccagcgcggagcaacagcttcaagcagtgctcaactcgcgcagttggaagatgaccgccccaatgagacgcctgagtgcttgggctcgcactcagtggctgtga

SEQ ID NO: 357380 - DNA, 522 bp, Pseudomonas aeruginosa
atgagtggcgaaaccctggacggcctgcagttcggcctggtcagcaaagtggattacctcaactgccgggcgaaggtgcgcctggacgagttcgacggcctggagacctggtggctaaaggtgccccagcggcacaccaaggcgaccaagagccgcccgctgatgccggagatcggcgagcaagtggccgtgctgctgcagcgcgacggggtcaacggagtggtgctgggcgggatctactcgacggccgagccgccgccggtaaccgatgagcacaccgagtttgtgcgtttcagcgacggcaccacggccagctacaaccggcaggcccacctgctggcggtgaattgcgtgggggcgatcagcctgcaggcgtcacagtcggtgacggtgcaggcgccggccgtgactctggataccccgcagaccaccctggagggcaatctgcaggtgaacggcaacgttaatgcgacgggggcagtgatggatgctggaggtaactcgaaccatcacagccactga

SEQ ID NO: 357381 - DNA, 1107 bp, Pseudomonas aeruginosa
  misc_feature (905)..(905): n is a, c, g, or t
gtggttcaagtaagcgatatccctggccgcaactcggctgagccaaccgtctggcgcattggctatcagggccgcgacctgaccgccgagctgtcgccctacgtcctgggcgtgacctggacggattacctcagcggccagtccgacgagatcagcattgagctggaggacaccgacgacaaatggctgggcgtctggtacccggtcaagggcgatgccctgaccctgtccatgacctacccaggccaggctccgctgaactgcggcagcttcgaggtggacgagatcaacgccagcggcccaccatcggtggtggtcattcgcggcctgtccgccggggtcagcaagggtgtgcgcacccgcaagggcgtggcctacgagaacaccacgctggccgagatcgcccaccaggtggccaagcgcaacaagttcgagctggttggcgagatccgcgagctgcgcatcgaccgcatcacccagttccaggaacgcgacctggccttcatcacccgcctcgggcggcagtatggctacgcggtcaaactgcgggagagcaagctgatcttcactgccaaggccgctctgcgcgatggcatcccggtgcgctcgatccgccgccaggagtgcagccgctacgacctgaaggacaagatcaaggacgtgtatcgcacggccaagaacactcaccacgacccggacacccagaagaccatccgcagccaggttgaggacacccgcgccccggacagcccggccggcatggaaaccagcgccgacgagctgcgcatcaaccagcgtgccccggatgcggacagcgcccaggcccaggccgacgccgccctgggcgatgccaatgatgagcgggccggcggcagcctgacgctgccggccgaccgccgcctggnggccggtgcggtggtgaccctggatgccagctgggggcgcttcgcgggcgactacctgatcggccaggcccgccacagtaagcgccgcactgccggtaccacggccgacatcgagatccgccgggtgacgccagcgccggtaccgccgatcccgaccctggccggggagcccacccagtccagcaccgaggcaaccgcatga

SEQ ID NO: 357382 - DNA, 216 bp, Pseudomonas aeruginosa
gtggccgacgaatacctgagccataccacccgcgagggcgagcgctgggatcagctggcgttcacctactacggggacgccacccgctacgagcccatcgtccgggccaacccgcaggtgccgctgaccggcgccctgcagtccggcctgactctgcgcatccccgtgctcgatgtcgcccccagcagcgaggatctgccgccgtggttcaagtaa

SEQ ID NO: 357383 - DNA, 1059 bp, Pseudomonas aeruginosa
atgtgggcagtactcggtgacattgagttcgagctgcgcaaccagcccagccgacaggatgaccgcgccaccgcggactatgcccagcatggcctgatccaaggcaagccacgccccgagtgggtgggcgatggcctggacgaactgaccctggagctgaccctgcatgcgctcctgggtgaccctgaggcacagatccgccagctgaagaaggcgatgcgggcgcacgagccgttgccctatgtgctgggctccggcgactaccggggcgtctacctgctgaccgaggtgggtaccacgacacgccggacagacgcccaggcccggttgatctcggccacggtcagcgtctcgctcctggagtactccggccaatacaagaagccgatgccggtaccgcgcggcctgagcaacagcctgctggccaatcccggcgcgcgggttggctcggtggcatcgctcggaagcttgacgcagagggcgctgggcatggcgcgcacggccgggaacatcctcaatgcgggcatggaaggcttcaacatggccatgctcctgcgcgataacccgatggtgctgctcgaccaggggcccagtctgctgaacatggcgagccaggccctggccccgctggaggggctgcagacggtcgccgccggattgttcgccaagggtgccgagctggtgagcatgggcgcggatgtggccgacgatgtgctccaggcaaccggcatcgcgcagctcctgggggatgcacccatggaactgtatggccaggcgtcgcagctgctcggccaaattacccagggcctgccgctggacgggctgcagaactccgcgtccgggctgctggccagcggcgccgagctgttgacgctgggcgtagatgccgccagtgatgtgcgccaggctatggcctcgctcacccccctggagctggggacggtagtcagccaggtcgacgatgccgcgagtcggatgcagatggcggtgactcgcttggacgccagctccccgcgcctggcccgcatggccgtcgacgtaattacccggagagcctga

SEQ ID NO: 357384 - DNA, 2586 bp, Pseudomonas aeruginosa
atggccaacgaagtcctagtcggtttgaagatcggggcggcagtcagcgggacgctgcatgctgccttcggctctgctcgctccaccgtgcaacagctcggccgtgccacggatctgctgcgcggccagcagacacgcatgggtgcagctctggccaccgctttggcccagggtggcagcggtgtcggcaagctgcgccgacagtacgaacaggtcgggcagaccatcgagcaactgcgcctcaagcaggagcgcctgaacaccagcatcgcccgaggcgcagccctcaaggagcaccgcgccgacctgcgtggccagatgatggagacggccggtaccgccgcagtcctgggcgctccggtggtgcaggccatgcgcaccagcgtcgactaccaagaccaggtgcgtgacatcgccatcacgggcgacttcgacgcggccgaagagcagcggctcagccaggtaatgcgcggcgccgctctgaagtggaaccagacccaggccgaggtggcacgcggcactgccgtgctgatcgcgggcggcatctccaacgcccaggagctggcccgctatgccccggtgatggccaagaccgccactgccacccgcgccagcatggatgacctcggctcggtggccatcgccctgaaggacaacctgggtatcggtgcggcgggtctggagcgctcgatgaacatgctggcctatgccggcaagcgcggtcagttcgagctggcggacatggccaagtggttgccgcagctgaccccacagttcgccgccctgggcatcaccggcgagcgtgccgtggccgagatcggcgcctccctgcagatcgcccgacgcggtgcaggcagcaacgacgaggccgccaacaacttcaaaaatttcctgggaaagatcaccgcgccggacaccatcaaggacttcagcaaggccggcatcgacctgcaggccggcatgcgtcgtttggtgggcgaaggcctgaccccggtgcaggccatgctgcagctgatcacccagtacatgggcagcaaggggccggccgccgccagcgagttccagaaggccatggcactgaaggatgaccaggagcgcgaggccgccctgcagcgcctgaacgaagcctacaagctgggcgagctgttccaggacatgcaggccatgtccttcatccgcccggccgtagccaaccaggccgacatggcggacatccagaagggcagcatggacgccgccgacaagggcgtgctcgatgccgactggaagaagcgcatgggcagcccgaaggaggagctgaaggcgctgaccaccagcctctccgacctcggtatttccgtgggcagcgtgctgctgcccgcgctggtcgacatcgttcaggcggcggtacccgtggtgcagcagttctctgcctgggcaggcgagaacccggccctggtcaagggtgtggtcggtctggtcacgggcctgctggtcggcaagctggccttccttggcgtggcctatggcgccaacctggccatcgccccgctggtgggcatgaccaccaccatcacgggcctgtcggcgaagtggacgctgctgcgcgccatgtggcaggccggcaagttcctcccattgatcaccgggctgaccaaggtcggcggtagcctgctcacggtgcttcggtacagcggcctgttgctgcgcggcttcggcatggccttcggggcgccgctgatgctggccggccgtgggctgctaatgctcggcggcgtgctgggcggcagtctgctcaatggcctgcggctggctggccaggcagtgctgtggcttggcagggcgctgctgctcaaccccatcggcctgctgatcacgggcatcgcagtcgcggccttcctgatctaccgctactgggagccgatcaagggctttttcggcggcctgtgggcggagatcaaggccggcttcagcggcggcttggccgggatactcgggctgctggtcaacttctcgccgctggggctgttctaccgggcgttcgccggggtcatgaactacttcgggatcgagctgccaggcaagttcagcgagttcggcagcatggtgatcagcggcctagtcaacgggatgacggccaagctcagcgcggccagggacacggtggtcagcttcggcaactcgatcaagggctggttcaccgagaccctgggcatccactcgcccagccgagtgttcatgggttacggcagcaatgtcagtgagggggccgccatcggcatcagcggaagccaggggctggtacgcaaggctgctctgggtatggccgccgcgaccgccgttaacttcgccgcgcccaacctggtcgccgcaactgatgcagcccccaccagatcggcacccaacctggctgccgcgactgcagtacctggtgctactggcatggccggcggcggcatcgtcatccactacgccccgcagatcaccgtccagggcggcggccctggtacccaggaggctgtccagcaggccctgcagctgtcgcgcaacgacctggagaagatgatgcgtgaagtcatggccgaccagcagcggagggccttctga

SEQ ID NO: 357385 - DNA, 258 bp, Pseudomonas aeruginosa
atgtttgaaaaagtcgcgggcctcaccagcaagaccctctacgtcgtgatcgtcggcgctgtggccctgtgcctggcctggctgtgtctggcgaacctgccgctgtgggcggcagtcgcagtgttctgcctggccatgccgttcgtggcgatggtggtgtccccggtgacagccttcgccgccctgatccttggcctgctggccggggccaccgctaccggcgtgcaagctgctcggcaagctcggcacgacggttga

SEQ ID NO: 357386 - DNA, 315 bp, Pseudomonas aeruginosa
atggcagccaaactcagcatccccctcaagttccccttcaccactgcggccggcgagcacctcaagtcgctgcagatcacccgcctcaagcgcaaggacattgcagccgcccaggcccactcgaaggacgaaggcgtcgttgaggacatgctgctggccaagatgaccggcgtgaccctggaagacctgggcgagctggacatcgccgactccaaggtcgtcaccgaggtgtttcgggaaatggctctcggcggagaccttgctgcagtcctgggacgaagcgctgctcctggtgctgaggatgcagccgtctga

SEQ ID NO: 357387 - DNA, 192 bp, Pseudomonas aeruginosa
atggaagaagaaatcaccctaaagcacgagggcgagacctactcggcgagctatatccaggtcggcgacgaactgctgacctacctgcccgatggcagtgagcgccgcaccatgctacgcgggctcagccccgagcacgccgcgatgacccacctgcgcggctatatccacagcctgaaaaccaagggataa

SEQ ID NO: 357388 - DNA, 525 bp, Pseudomonas aeruginosa
atggcaggctttagcgcacaccgcatcaccaacagcaacctgtacctgggcggccgggacttcttcgccaaggccgaggagatcgagctgggcagcgtcaaggcggtcatgtccgacttccagggtctgggcatggtcggcttgatcgagctgccggacggcctcgacaagctggaaggcaagatcgtctggaacagcctgtacaaggaagccgcgaccaagctggccagccccttcaagacgatccagctgcaggcccgaagcaacgtccaggtgttcaacaacggcggcctggtagacgagatccccttggtcaccctgatgaccatcatgcccaaggaatacaacctgggcagcttcaagccgcgcgacccgtcgaagttcgagacgccattctcggccatctacgtgcgccagctgctgaacggcgaggaggtgctgatgctggattacctggccaacatcttccgcgtgggcggtgaggatcagctggccaagtaccggcgcaacatcgggcagtcttag

SEQ ID NO: 357389 - DNA, 1431 bp, Pseudomonas aeruginosa
atgaccgccaactacttgcacggtatcgagaccaccgaagtcgagcgcggcccgcgtgcgatcaaggtggtcaagtcgggcgtgatcgctctggtcggtaccgcaccggccggcccggtcaacacgctgaccctgtccctcactgaggtggacggcgcccagttcggccccgagaccctggagggtttcagcatcccgcgcgcgctggccgggatctacgactacggcgccggtaccgtcctggtgatcaacgtgctcgatccggcggtgcaccgcagcaacgtggtaggccaggagcgccagttcggtgacaacgaccagctgcagctgggccatggtgccctacaggcgctgaccctgaagtcctccgatggcgcgaccacctacgtgctgggcaccgactacagcgtgaccatgctcaccggcaaggtaaagcgcctggcaggcggcgccatcgcggccaacggccaggtgaaggccgactacacccatgccgaccccagcctggtcaccccggctgacatcatcggcgcggtcaacatcgccggccagcgctcgggcctcaaggcgttcgccgacagctacaacctgttcggcttcttccccaagctgttcatcgcgccgggcttttccaccctcaactcgatcagtgtcgagctgatcgcggctgccgagcagatggggggcatcgcctacatcgacgcgcccatcggcaccacggtgcagcaggtgatcgctggtcgcggcccggccggcgccatcaacttcaacaccagcagcgaccgggtgcgcctgtgctacccgcacgtcaaggtgtacgacgcggccaccgatggcgagcgcctggagccgttgtcgatccgcgccgccggcctgcgcgccaaggtcgacctggatgacggctactggtggagcagctccaaccgcgagctggtcggcgtgatcggcctggaacggccgctgaccgctcgcgtcgatgaccccagcagcgaggtcaacctgctcaacgaagtgggcatcaccacggtgttcaacagcttcggcaccggcctgcgcctgtggggtaaccgcacggcggcctggccgaccgtgacccacatgcgcaacttcgagaacgtgcgccgcaccaaggacatcatcgacgagtccatccgctacagctcgctgcagtttgtggacatgccgatcacccaagcgctgatcgacagcatcaccgagagcgtcaacctgttcggtcgcaagctgactggcgacggcgccttgctgggcttcgagtgctggtacgacccggcgcgcaacccgcagaccgagctggagctggggcacctgctgttcaactacaaactgacggtgccgctgccgttcgagcgcggcaccttcgagaccgagatcaccggggagtacctggccaacctgaagggggctgcataa

SEQ ID NO: 357390 - DNA, 222 bp, Pseudomonas aeruginosa
gtgaaactgactcgttacctctacaagggcccgcagagcggcgcccaactgcgcgtaggcgccaaggccgagctgctcgaagtccggctccatcctggcaagccggtcgatctgccggccgagcacgaatacacccaggtgctgatcgccctgaagtacctggagcccatcaccgaggaggccgctgcgcctgctccggccaagaaggagacccgccaatga

SEQ ID NO: 357391 - DNA, 471 bp, Pseudomonas aeruginosa
atgggccagaccgagcagatcctggacgcgcttgtcgagcggttgaaggccgagctggggcgcgacctgatggtggagctgttcccggagaacccggcgcagtatcgcctcaaccacccgcgtggcgccgtactggtggccttcggcaagtcgaccttcggcggttcccaggccgtcgacgcgatgttccaggagcgcaacctggtgatcgccctgacgctggtgttccgccagctcaatggcaaggacggcgcggtcggccatctggatcgcatccgcgacaccctgaccgggtggtggccaccgcactgcgaccaggcctgcagacctgtctccgagcgcttcatcggtcacctgcagggcgtctggcaatacggcctggacatcgcaacccgtgcaacccaattgcaggccatggctccttccagtgggccgctgctgactcaaaccctctacgaggaacaaccgtga

SEQ ID NO: 357392 - DNA, 432 bp, Pseudomonas aeruginosa
atgcactactgcacccgcgccgatatcggcaaggccatcccggagctgacgctgactcagctctccaacgatgaccccaccgccgagctgcccgatgagagcgtgatcgaggacggcgtccgccaggctgaagagctggtggacggctacctgcgaggccgctacgacctgccgctcgatccggtaccgagcgtgctgcgggatgcggtggtgtatctcacccgccactggctgtaccagcgccgccccgagggagccatccccgaggcggtgaaggacagccgcaaggacaccctcaagctgctggaaagcatccgcgatggcgtggtcaccctgggcatgcccacgggcgaggccgcaccagagccgggcaagatccgcgcccgcgctcgccgccagcagttcggcgatgacctcctggagcgctactga

SEQ ID NO: 357393 - DNA, 333 bp, Pseudomonas aeruginosa
atgaagtcgcagaaagtgaacctggtcgagtcggtggttgccgctgtcgacctgacgcgccgccgcttcgtcggctttgacggcaacgtctgcgccaacggcgtcaaggcgctgggcgtggtcgatgccgacaccgcagccggcaacgtcgccccggccaacgtcctgggcgtgatcctggtcgaggcaggcgcggccatcgccgccggtgccgaggtgcagtccgatgccagcggcaaggccatcaccaaggctgctggcgtcagcaacggcttcgcctgggatgccgccacggcggccggcgatgtgatccgcatcgtgcgcggcatctga

SEQ ID NO: 357394 - DNA, 294 bp, Pseudomonas aeruginosa
atgagcgataaaaccaaggcctaccgcgtcgtgggcatcgacctggacatcgacggcgagcgcatccccgagggcagcgagatcgagctggtggccgagccaccgcgcaagctcgcgcgctggctggagctgctcggcgacgtggagcccatcaaggcgagcaaggccagcaagcctggcaagccgaccaagcccgaggatccggccaagggtggccagcaggatcctgatccccaggccggccaggacaacggccagcaacccgccgacaacgctgaggagaacaaagaatga

SEQ ID NO: 357395 - DNA, 924 bp, Pseudomonas aeruginosa
atggctgaccgtctcaagcaactgcggatcgtcgatccggtactgaccaacatcgcgcgcggctaccgcaacgcgcagtacgtgggcgaggcgctgttcccgctcgccgacatggacaaggaagcgggcatcgtgccgctgttcggcaaggaggccttccgcctctgggataccgagcgagccatccgcgcccagtccaacctgatgaccccggacgatctcaacaccatggacgtggtgctgcgcgagcatgacctggcctacccggtggactaccgtgagcaggccgagtcgatgttcgacgcggaagcccgtgcggccaagcgcgtcaaggaagccatcgacctgcgccgtgaggtgtcctgcgccgccctggcccagaacgtcaacacctacctcagcggcgccaaggtcgctctggccggtgccagccagtggagcgccagcggcggtgacccggtggcggtagtcgagaccggcaaggaagtggtgcgctcgcgcatcggcgtgcgccccaacaccatcctgatgggcgcctcggtgtacgccaccctcaagttccacaccaagctgcagggcgccctgggcgccaacgaagccaagctgatcaccctggagcacctgcgcacgctgttcggcatccagaacatcgtggtcggcgaggcgctggctggcgacagcaccacctcggacatctggggcgacaacctggtgctggcctatgtgtcgcaacccggtgcgggcgagaagtcggactacgagaccccgtccttcggttacaccctgcgcaagaagggcatgccggagaccgacaagtacgacaccaacggcggcaaggtgcgcttcgtgcgccacaccgacatgtacaagcccgtggtggttggcgccgacgccggctacctgatctccgacatcgtcgcctga

SEQ ID NO: 357396 - DNA, 1134 bp, Pseudomonas aeruginosa
atgtactaccacccaagcgcacagcccatgaagccactccatatcttcaagaccggcaagcacgtcgccatgagcggtgccagcctcaacttcagcgagtctgacctggccgccaccgtgcgtgcctacaacccggcgctacacgaggcgccgctggtcatcggtcacccgaagcacgacgccccggccgctggctgggtcaagtccttgaccaacagcgcacagggcctgatcgccgagccgcaccaggtggccccggagttcgccgagcaggtggcttccggtgcctacaagaagatctccgcctccttctatcacccggactcgccgagcaacccggtgcctggcgtgtactacctgcgccatgtcggcttcctcggagcccagccgccagcggtgaagggcctgcgccccatcgagctggccgagggcgaggaaggtgtcgtcgagttcgccgacttcggccacgagaccagtgccggactgttccgccgcctgcgtgactggctgatcggcgagcgcggcctggaagtggccgaccaggtcatcccgaactggcagatcgactccctgatcgaggtcgcccgccgcgacgacgatccgcgcccgtcctttaccgaaccaacccaacccgcaaccgtcgaggaatccaccgtgacccccgaagaaattgccgccctgcaggctgaaaacgtgcggctgaagacccaggtgcagcagcaccaggatcaacagcgtcaatcccgccaggaaaccacccatgccgccaacgtggcgtttgccgaggaactggtcgccgctggcaagctgctgcccaagcacaccgccgcgctgatcgccaccctggacttcgccgaggacggcgatgccccgctggaattcggcgagggcgatgcccgccagccggtgtccgccggcctcaaggcgatcttcggtgacctgccgcagcagatcgactttgccgagcaagccagcggcgcccgccgtaatggcgacaccccggtcgccgagctggagttcgcagagaagaacaccgaccccgaccgccttgccctgcatgcccgcgccacccagctggcggcagacaagaacatcccctacgagtcggccgtgcgccagctcatcaaccagtaa

SEQ ID NO: 357397 - DNA, 477 bp, Pseudomonas aeruginosa
gtgttcaccgtccagctggatcaccaacgcctgcaggaaaccctgcgcactatcgagtgggccgtgggcgacctggcgccgctgatgcgcggcatcaccgccgagctggccagccagaccgaggagaacttcgaggccgaaggccggcccgactggcagccgctgtcgtcggtcaccaccgagcgccgggagaagtccggcacctggccggggcagatgctgcaggtaagtgctgccggcctggccacctcgatctccacccactcggacgacagctccgccctggtcggcagcaacaaaccctacgcggcgatgatgcagttcggcggcgacaagtccgactttccccacctgtggggcgacattcccggccgtgagtacttgccgatggatgccgaaggcgccctgcagcccgaagccgaggaagccatcctcgatctggccatcgaccacctgaaaagggccgcccgcctgtaa

SEQ ID NO: 357398 - DNA, 858 bp, Pseudomonas aeruginosa
atgcggatcgggaagactgagatggccaaggcacccaccccggccgacctgcaggccatcttcggcctggagcccgagcaagccatcgcctacctcaaggccaagggctacgccatcacctggaactggcaggagatgctcgaccaggctcacgaccaggccttcaccgtggccaaggcgatgcgcctcgatctgctgtcggacatccgcgcggccctggaaaccgccttgcaggatgggcaaaccctccagcagttcatcgagcagctgcagccagtgctggaggcacaaggctggtggggccagcaggtgatcgtcgacggcgcgggcaatgccgagctggtacaactgggcagcccgcgccggctgaagaccatctaccagaccaacctgcagagcgcctacatggccggccgtaaggccagcatggaagacagcgccgacactcacccttactggcgctacgtggccatcctcgacgggcgcacccgacccagccaccgtgccctgagtggcaaggtgtaccgccatgacgatccggtgtggtcggcgatctacccgcccaacggcttcaactgccgctgccgggtcacctcgctttccggcgctgcgctccagcgcaaggggctccaggtcgagagcagcgccgggcgtgtgcagaccgagacggtcgagatcggcgtggacaagcgcacgggcgagatccgcacggctcaggtgaccggcgtgcgcaccaccgacgcggcgggcaagccggtgatgttccgcaccgaccctggcttcaaccatgcaccaggtgcggggctgggtgacatgctcaagcgtaagcaggccgctgccggcctgaaggaggtctga

SEQ ID NO: 357399 - DNA, 1497 bp, Pseudomonas aeruginosa
atgaacagcaaaggtctgtgggtcagccccaccgagttcgtccgtttcagtgagccggccgccggcaaggccctcaccgagcacatcgccagccggggtcgcagcttcgactcccaggccctgggcatgtacctgcccaaccctgacccgatcctcaaggcccagggcaaggacatcaccgtctaccgcgacctgcgcagccaggccctggtgggcggcaacctccgccgccgcaagtccgcggtgctcgccctggagcgtgacctcaagcgcggcaacgccccggtgcgggtcgagcgcttcattcgcgactggctgaccgacctcgatctcgaccgcatcatccgcgagctgctcgatgcgccgctgttcggttaccagccggtggaactgatgtggcgtccgctgggcctgcacctggtacccgaggatctgctgggcaagccggccgagtggttcctgtacgaccaggacaaccgcctgcgcttccgcgcccgcgatgccggcctacagggcgagctgtgcgacccgcagcgcttcgtggtggcgcgccaggacgcaacctacaacaacccctacggcttccctgacctgtcgatgtgcttctggccggtggtgttcatgaagggcggcctcaagttctgggtgcagttcaccgagaagtacggctcgccctgggtgatcggcaagcacccgcgcggtgccgccaccagggaaaccgacgatctcctggacagcctggaggccatggtgcaggacgccgtggcggccatccccaacgactccagcgtcgagatcctggaagcggccggcaagggctccagcgccgaggtgtaccgcgagctactggtctactgccgcagcgagatcaacgtcggcctgctcgggcagaaccagaccaccgaggccaacagcaaccgggccagtgccacggcgggcctggaggtaaccaaggacatccgcgacggcgacaggggcatcgtggccgccaccctcaatgccgccatccgcctagtggtcgacctcaacttcggcgagaacgtcgcggccccactgtacgagctgtgggaacaggaggagatcgacaagaccctggccgagcgtgacaaggatctgaccgacgcaggcgtgaagttcaccccggcctactggaagcgcacctacaacctgcaggacggcgacatcgtcgaggatccagcagccgaacctggcccggacttcgccgagcctaccctgcggccaatcctcgatcaggccgcgctcgaccaggtgatcgacaacctgccggccgagctgctccaggagcaggcccagcaggcgattgctccggtgatcgaggcgctgctgcgcggtcgctcggagaccgaggccctgggcctgctggccgaggcctacccgctgatggatgaccaggccctgcagcagaccttgacccgtctgctgttcatcgctggcacctggggccggctgagcgctgatgcggatcgggaagactga

SEQ ID NO: 357400 - DNA, 1620 bp, Pseudomonas aeruginosa
atgagcgcggcagccatcaagccgtcatcgagcacgctgcgcgtcgtcgagtgggacgagctgccggagtccgtccggcagatcccggagggctacaaccccatcgccgatggcatcctcatggcgcaccaggtcgactggctgcgcatccaggcccagatcaagctgtgcgagaagggccgccgcaccggcatcaccttcgccgaagccctggactcggtgatcaccgccgcctcgcgcaagagcgcgggcggcatggacgtgttctacgtcggcgacaccaaggaaaagggcctggagttcatcggctactgcgccaagttcagccgggtgatcgccgaggcgcaggcctcgggcgtcagcgagatcgaggagttcctgttcgaggatcaggacgattccggcaacacccgccacatcaacgcctaccgcatccgcttcgccagcggcttcaagatcgtcgcgctgtccagcaacccggccaacctgcgcggcctgcagggcaaggtgatcctggacgaggcggccttccaccgcgacgtatcggccgtgctcgatgccgcgaccgcgctgctgatctggggcggccggatcgtcatcatcagctcgcacaacggcaaggccaacgccttcaaccagatggccaccgacatccgtgagggccgctacggcgacgacgccgtggtctacaaggccaccttcgacgatgccgtggccaacggcctatacgagcgcgtgtgcttcatgaagggcgaggcgcccacgcccgagggcaaggaagcctggtacaagaaaatccgcaacgcctacggcccgcgcaaggcgcagatgcgcgaagagctggacgctatcccgcgcgacggcaacggcgtgtgcattcccggcgtgtggatcgaggacgccatgcgcgctggccgcccggtactgcgcctggccctgcaggatgacttcacccagcaggcggtgcatcgccgcgatgcctacgtcgagacctggatcgagcagcacctggtgcccgtggtcgcccagctggatcccgagctgcgccactttctgggcatggactacgcccgccaccgcgacttttcgatcatctgcccgatgtcggtcgaccaggcgcggcaccgcgacgtgcccttcgtggtggagatgcaccgggtaccggcccgccagcagaagctggtgctgttctacgtcctgggcaagctgccgcgcttcggcggcgccgccctggacgcctccggcaacggcgagaccctggccgaggacaccgccgacgagttcggccacgaccgcatccagcaggtgaagttgtcccgcgcctggtacggcgcctggatgcccaagttcgtcggcctgttcgaggacggcaccatcacgctgccgaaggatgactcgctgcagcaggacgtgcgcgccatcgagctggtggacggcatccccatggtggtcaaggcccgccagcaagacctgaaagatcccgacctgtaccggcacggcgacttcgctggagccggtgcattggccaacttcgccaccatggagatgaacttcggcccggtctccgtcaaatcccgtcgcccacgccagggcgcccgcattacccaggggtacgcatga

SEQ ID NO: 357401 - DNA, 555 bp, Pseudomonas aeruginosa
atggcgcgcgcgaatgcggtcgaccaactccccaaggaagtccgggcctggctggatcactctctggtcgagggcaacttcaccggctacgagctgctcgaaggtgagctgaagagtcgcggctacagcatcggcaagtcctcgatccaccgctacggccagaagatcgagcgccgcatggccgcgatcaaggccagcaccgaggccgccaagctgatcaccgagggtgcccgcgatgaccaggatgcccgctccgaggcggtgatcgccctggtgcagaccgagctgttcgagaccatcgtcaacctgcaggaggccggcgatatcgaagacccggccgagcgcatcggcctgctgtccagcgcggccaagaacatcgccaccctgacccgcgcgagcgttgcgcagaagcgctgggccgatgaggtacgccaggctgcccgcgccgagctgctgcgcgagcaggctgccgagctggacaagaccgtccaggccggcggcatggacgaagaccaggccatgttctggcgcaagaagttcctgggggtcgcatga

SEQ ID NO: 357402 - DNA, 312 bp, Pseudomonas aeruginosa
atgaatcttgaccaggcccgtatccgccgcgagtcgctgcgctggtacctgctgctggcactgaacaacgcccgccccgaggaggtctgcgaggagatcatccagaccaccatgcgttcgatctaccaggacgtaacgccgatggaagtccgcaaggaactggactacctggaaggccgcagcctggtgaagctgcgcaaggagccctccggccgctggtggtctgacctgacccgcatcggcgtggacatcgtcgaatacaccgtgagctgtgagcccggtatcgcccgacctgaaaagtactggggctga

SEQ ID NO: 357403 - DNA, 381 bp, Pseudomonas aeruginosa
atgaacctgacccttgagttctggcagctggtgagcctgctgctcggcttcctcggttcctgcgccggggccggcaagctgctgctggggcagatcgaccaacgcctggagactcgcttcaaggctatggaagaagcccggcagctcagcaccctgcattgggatgagcgcttcgctgcgctcttggcccagtccagggaggacggcgatgccgtgcgccaactggagcgcgatctgatgagcctgcgcgccgagctgcccgagcgctatgtgcgccgcgaagactatatccggggccagacggtgatcgaggccaagctcgactccctggccttacggatggagaacatccaattgaaaggagtacgccatgaatcttga

SEQ ID NO: 357404 - DNA, 219 bp, Pseudomonas aeruginosa
atggatgtagctgatctggctctcgacaacgacttcaccgaggcagcgctacgcgcccacgagtctgggctgcagcgccgctccggcccttcggctctgcgctgcgaagagtgcggcgatgccatcgacgagcgccgccgccaggccgagcctggcacccaccactgcaccgagtgcaagaccaccctggaacagctgagcaagcgaggcctgcgatga

SEQ ID NO: 357405 - DNA, 606 bp, Pseudomonas aeruginosa
atggtcgggcttaagagtctgcccgagcccgtgctgctcggcctgctggggtgcttgatcggcatctgcgcagcgggctccatcggctacggcttcggtgcccggcatgccgaggcccagggcaatgccagcctggagcgcctcaaggcagagcacgccgagcaggcacgccaggctgctatcgacagccgcgtgcagctgctgcagcagatcgagcgcgccaaccaggccgaggccctgctgctcagccagcaggccgggcacgaccaggatcaccaacagctccaggagcgcatcccccatgtcacgactgtctaccggccggcacctgctgctgcgcctgtcgttatccctcgctgcgtgttcactgctggctgggtgcgcgacttcaacctcgccctcggcgccagtctgtccaccgcaggaggcagcaccgcgaccgccggccctgctcaagcggcctggcccgcccccggtactgacgccgaactactggaaagcggtgtcactccggcagacatcctggcccatgcccaggactacggccgctgggcccgcaacaaccttgcccaactcaacgccttgctcgacctgcagaaggactga

SEQ ID NO: 357406 - DNA, 219 bp, Pseudomonas aeruginosa
atgaggctgatcgccgagtggcgtcgctgccacaccttctacagcgtgcagctggccgcgctgatcgccttgtttggcttcctgcaggccaccctgctgccaatgtggcaggcccagctgtcgccgaccgcctatgccgccctcaacagcgtgctggccagcctgctgttcgtcgctcgcttggtcaggcaggggccggaacaggagcagtcgaaatga

SEQ ID NO: 357407 - DNA, 471 bp, Pseudomonas aeruginosa
atgcgacctgacatcccacgcggcatccgcaactacaaccccggcaacatcgagcgcaccagcacccgctggcagggcatggccctggatcagtccagcgactcgcgcttcatcgtcttcagccacccggtatggggcatccgcgccatcgcgcgcacgctgatcacctaccaggacaagcacggcctgcgcaccgtcgagcgcatcatccagcgctgggccccggacagcgagaacgacaccgttgcctatgtggcagccgttagtgctcgcctgcatgtcggccccggtcaggccatcgacgtttatgactaccgcaccatgctggagctggtgcgcgccatcgtccgccacgagaacggccctggcccgcttcctgagggtgactggtacggcgagccgatgctggccgaggggttggccctggccggcatcctgcgcggtgtgcgccacggcgaggtgtcggcatga

SEQ ID NO: 357408 - DNA, 384 bp, Pseudomonas aeruginosa
atgaccatccacggatcagtcggccaggtcgcctacggagacatccataaccatggcgttgacgatctgatggggatggggcgcgagcaactcaatgaggccctgcgcatatgcaacgagcgtttggccgacgcgcggcggcgcctgctgtttagttggcccgtgggttggttccttgtaggggttgtcgtgtttgccctgatcgtgctgaccggcaacgcatttgcccacactcagctgcttgccgcgtcgatcctcatcggcattctgctgccgatgttcttctacatgcccatggctcagcgcttcggcccgatgatcagggagtacagactcggtatccataagctggagttcgtcctgcataaccgaggctggctctga

SEQ ID NO: 357409 - DNA, 408 bp, Pseudomonas aeruginosa
atgaatgcaacgcaaacatgtgtggccattgcggtgtgcgggatgctgtacggctgtgactcgggcagcgcccagacagccttcggtgtcacatcggatgatccgctggtaggaaaggccctacccagcatcaggcaagcatgtcctggtctggacaagtacgcagaccagtttgagtctgtgcgcgtggagaaccagtaccgtacaactgtcgttttcgatatcccggatgcggctcgcattcccgatgcctatacggctggtgggcatacctgcttcctggagatagacgacaaaggcagtatgctctacatcgagaagctggcctgcaagtcagtgtgcctcgatcaagttgaggtgcccgaagggcagctgaagctgccgctggggggaggcccgcagtcatga

SEQ ID NO: 357410 - DNA, 594 bp, Pseudomonas aeruginosa
gtgagccaggaaatccacggcaacgttggtcaagcaacatcaggggacattcacaactacggcatccagatcaacctggccgacaaggttgaggagcgcggtctggtgccggcgcagcgcaaggagctgcacgagcttcgggcgaagtgcgaagagctgggggacgatccccgcgacgtatggcgccgcgtccatgcgcagctcggcgtgaagtcgatcagcgagatcggcgccgaccagttttccgaagcgcgcgatgtactgcgcgctcggcttgagcagctccaggacgaggccgacaagcgccgcctggtgggcaaagtgctgcgagcagcgtctgaaaaggatgcgaaccaggaggtcagcaacttctgtgaactgaccttcggcagaacgcagctgactcaactcaagcgtgccgagctgcaaaaggtgctggagttcatcctgcagttcgatgcacggcctgccccgacaccacttcaggctgaggctgcgcccaagctcgatctgcgaggttttctgctcgcctaccgctggaacgctgctgggctctttctctttggcgtgctggttggtcggttctggatctga

SEQ ID NO: 357411 - DNA, 228 bp, Pseudomonas aeruginosa
atgaacaatcctccgtatccctcaaccccgaagcaggcccatgcctggttcgtcactcacggcatctgcattgccgattggtgcaaggagcagggcttcaaccgcttcaccgtcttcgacctgttgcgcggtaagcgcaagggtgtacgcggcgaagcacacaaggctgctgtcgcgctcggtctcaaggccgaccccaaaaccgtttcgcagcccgttgccgcctga

SEQ ID NO: 357412 - DNA, 213 bp, Pseudomonas aeruginosa
atgggttcacaagagcggctagatagacaggctggcaacttggcggcgctggaaacggctttcgcgctgctggtcaggcgactggagttgcaaggtggggtggatcggcaggcgttcattgctgatctccaacaactggctgagcagccggccaaagagccagatgtgctgctggcagagcagcggctgttgcgcatgctgcaggcgctgtag

SEQ ID NO: 357413 - DNA, 480 bp, Pseudomonas aeruginosa
atgacgcccgctcaatggaaacgcgcccagccgatctcgctgcgtgacgcactcaagatgagccagcagcacgccaaggagcgcttcaacttcagcatcgagcgcatcgccgcgttgatggggctggacgatcactgggcgctctacaaatggatcgccaatggccgtatgccggctgtgttgatcccggcctacgagcaggcctgcggcatcaacctggtcagccgctggctggcgtcgagcggcggcaagctgctgatcgacatccctaccggccgtaccagcagcgcccacgacatccaggccctgcaggccgtgctgcacgaagccaccggcaagctgatggccttctacagcgataacaccgaagccagcgccaccctggcggccatccaggccggcctagaggagctggcctggcaccggggcaacgtgcagcagcacgcccacccacagctcgaactgggagagcaaccgtga

SEQ ID NO: 357414 - DNA, 318 bp, Pseudomonas aeruginosa
gtgagcactgaagacaaatacaccagcgaccaggtgcagcgcgtcctgcgcgtgctgctggccctggccggcaatgagttccgcgggatgttgctgaaagaggtggccaccgcctctgactgtaccgagagcaatgccctgcgcgccctggagaacctgcgcaccgccggcctggccgagcgcaacgcgcatgacgacaagcgctggcagctcggcccgcgcctggtgcaggtggccttcgccttcgatagcgccctgcagaaagcccaacgcgacctggatgagcgccgtcagcgcttcacccgtacccccaactaa

SEQ ID NO: 357415 - DNA, 999 bp, Pseudomonas aeruginosa
atggcccgcaaaccgaccaccacggagttcacccccatggccgagatcaacccggaggcgttccaagaggacgctggcgccctgggcatgctcggcaaaatcgcccaggacatcagcgaggagcgtgacctcgtcaaccagcttcttgggcaggctcaaatggctggcgcgttcgaagaattttcccgaaccgttcggacttccaaactggctttcgtcaaagaaaacaagctttaccgggctctgaagggacggcggactccgaacggttcggagtttctgagcggcacttgggaggagttctgtggcttgctcggacgctccgcagacaaagtcgaccttgatatcgccaatctccgcactttcggtgaggaagcccttgagtccatgtcccgcatgggcatcggttaccgcgagctgcgccagtaccgccgcctgcccgaggatcagaaggccgcgttgatcgaggtggccaagtccggcgacaaggagtccttcgtcgagctggccgaggagatcatctccaagcacgccgccgagaaggctgagcttcagaagaaactggacgatgtccagggtgactacgacgccctgtccaaggtggaggccgacaccagtaaggagctgcgtgctgcacggctggacatggagaagctgcagctgcgcaccgcgccctggagcgagaaggttgcccccttccaggaagagatcgccaagcgccaggtcatcatcgacgagtccatgggccgccacctgcaggctgtcgaggcactggatgcctggtggctgggcgaggtcgccaaccagccggactacgacccggaagcgcagagcgagatgcccctggaagttcgcaccgtcctggtcgagcttcacgacgccatcaaccgctctgcccatctgatcgcggcggcacgccacgagctgtacacccgcttcggtcacgagctgactcaggcccagcagcacctgctgcaactggatgaagaacaggcctga

SEQ ID NO: 357416 - DNA, 1800 bp, Pseudomonas aeruginosa
atgagcgccaagggagtggtcgacatggcaatcacgccagatatccgcgagtacctgaccgagctggctcgcaagctggacgcggccggtcacggccagcgcggcccgctgatggaggccgcccaggagttcctgggctgggccccggccactatctaccgccagctgaaggcggcctgcggttggactgcaggtcgcaagacgcgagcagacaagggctcgacctcggtaccggcccagtcgctggaaatgctcggcgccctgcagcgcgagagcctgcgggagaacggcaagcagacgttgttcaccaccaccgcgcgctcgatcctggagcagaacggcatccacctgggcgtgagcaacactcaactgaaccgcctgatcgcggcgcgcagcctgaacgttgccagccagcgcaaggtcagcccggtgcaggcgcagcgcgcgccgcacccgaactacctgcacgagatcgacccctcgctgtgcctggtgtactacctcaaggggcgccagtacatcatgcgcgacagcgagttctacaaaaacaagctcgacaactacgccaaggtgaagctcaaggtgtggcgctacgtgtgctacgaccgcgccagcggcgcccttgtggtgtggtactgcgaggcggcgggcgagaaccagcactcgctgttcgacttcctgatgtatgcctggggcaaacaggagggccgcctggtgcatggggtgccgctgttcctgctgtgggacaagggctcggccaacaccagcagcgcgatcaagaacctgctcaagcacctggaagtggagccgctggagcacgaggccggcaacgctcgcgccaagggtggcgtcgagggtggcaacaacatcgtcgagacccagttcgagagccgcctgcgcttccagccggtggacgatatcgccgagctgaacgccgccgcccaggcctgggccgaggcctacaacgccaatctgatcccagggcaggacacccgcctgcgccgcgccggaatggccgagccggtggcgcgctacgacctctggcaactgatccgcgccgagcagctgcgcctgctgccggaggtggccgtgtgccgcgcgctgatgaccagccgcgagcaggagcgcaccgtgcgcccggatctgaccattagcttcaagcaccagaacgccgagcagtccctgcagtacgacctgcgcggcctcgacggcatcgtggtgggcggcaaggtcagcgtgcgcggcctggcctacggcgactgcgccatccaggtggagtccccacgctatgacggcgagttgctgatctaccgggtggagccgatccgtggctatgacgtgttcggccagcgcctggacgcggcaatccctggccaggaatacaagtcgctgccggagaccgccatcgagcaggcggccaaggccatggacgaactggcctacccggagcaggacgccaaggccgcgcgcgcgaagaacgtcacaccgttcggcggccagctcgacacccacgagcacctcaagaagatcgagcaccctgcctatctcacgcgccagggcaacaccatcgaaaccccggagcatctgcgcgccgacctgccgaagctgtcgccgctggaggccatgcagcgcgtcgccaaggctatcggccgaaatctcaccgcccaggaaaacacctggctgcgcaacaccttcaaggagggtgtgccggaagaccaggtcaacgccctgatcgaacagttcacccggccggcagcacctgtcccggccgcccaagtcaccggcctgcgggccgtttaa

SEQ ID NO: 357417 - DNA, 1254 bp, Pseudomonas aeruginosa
atgcagcagcagatgatgaagttgaagcgtgtgatgtggcagctcgacatctctcagcgggagatggccgaggccatcatcaagccgaacggcgaccccatcagccagtccaccatggcccaactggtcaaccacggtctgtggcccaagagcctggaacgccaaccccttgagcgtcagatcacgacgcttctgttcgcccgaggggcgaacgatgaccacattcgcgacctgttcgtgatggaagaaaccgatgcagcgcaagtcttggtcggccgcgctgcaccggcgccccgcaatgccaacagcaaagagagcgactacatgctactacgaaaaaacaccctgacccgccaggccaaggatcacttccgcttgccctgcgacccgttcaccgacgagatgcagagcgagcaggacgtgttcctgtccgatgacatccgctacgtgcgccaggccatccgccagacggccaagcatggcggcatgttggcggtggtgggtgaatccggcgcgggcaaatcgaccctgcgccaggatctggtggagtggatcctcgacacccgcgagccgatcaccgtgatcgagccctacgtgctcggcgtggaagacgacaacgtcaagggcaagacgctcaaggccctggacattaccggcgcgatcattcgttgcatcgacccgagcgtgaagccgcgccgcagccaggaagatcgctcgcggcaaatgcacgagctgctgctggccagcgcccaggccggtcgccgccatgtggtgattatcgaggaggcgcacagcctgcccatcaccaccctgaagcacctcaagcgcttctacgagctgcaggccggcttcaagaaactgctggccttcatcctgatcggccagaccgagctgggcgacaagctcagcgagtacaacccggcggtgcgtgaggtggtgcagcgctgcgagctgatccgcctgaagcccctggacaaccacgtcgaggcgtacctcaagcacaagttcgcgcggatcgaggtggactaccaggagatcttcgagcccagcgccttcgaggaaatccgcaaccgcctgcgcatgtccctgactggcggtcgcggcgcggcgcgcgaggtgaagacgatctccctgtgctacccactggcggtgaacaacctggtctccggtgcgatgaacctggcggtcaagctgcacgagaccaaggtcaccggcgagctggtggtggcctccctgcgcgatgaggacgtgtga

SEQ ID NO: 357418 - DNA, 327 bp, Pseudomonas aeruginosa
atgggcgccgtgctcgccatgttcccggcagcacccaagcaggccccggcctgcacggtgctgaccgaggagttcgccaaccggctgagcgcactcaactccctgaaccgtgatctgcgcgccgctggcgtgcaggtcgtggcccaggatgtggagtccacgacgctgaccatcgaccgcgccagcgtgccccagctggtcaaccacttctccaagcgcctgcgcggcctgctgtctcgcaccgagggccacctgactcgccatcgcgccgaaatcggccgcgtcagcgtggtgtggtacagcccggtgaaggagcaggacgcatga

SEQ ID NO: 357419 - DNA, 267 bp, Pseudomonas aeruginosa
atgaacgtgctctgcatcagcctctgcaaccccgagctgatcaccgacccacaggagctgcgtgaagccctggagcgtgccaatcagcaaatcatccagctgggtaaccagctggattgcctcactcgcggaacccacggactgaccaccgagctggcggtgatgtgcgaggcacatctggcaggtgatgccggacttgtcgctcagaaggtctccgagttcgccacccactaccggcagcattgccgaccaggagtgaaacactga

SEQ ID NO: 357420 - DNA, 615 bp, Pseudomonas aeruginosa
atgactactcaaattcccgccggttgccggcagaacgctcagggccacttcatccccgagagcataatcaagcccatcgacctggagcgcgaccgcctggtgcgccacctggtcgaccgtgccagcgagctgagcggtgaacttgccgacttcaagacggtggcctttggagatatcgaagccttcatcgaactcagtgccgagcagtacggcgccaaactcggcggcaagaagggcaatgtgaccctgctcagcttcgacgggcgctacaagatcatccgcgccatccaggaaggcattgcgttcgacgagcgcctgcaagccgcccgcgccctgatcgacgaatgcctgcgcgattggacggcaggcgctcgccccgaggtggtgaccttggtcaatgacgccttccgcaccgataccaagggcgagatccgcaccgctcgcgtgctagccctgcgtcgcctggagatcaccgacgagcgctggcaacgcgcgatgcaagctatcggcgaggcctgtcaggtggtcggcagcaagtcctacatccgcgtctacgagcggatcggcgacaccgaccagtaccgcccgatcagcctcgatatcgcgggggtgtga

SEQ ID NO: 357421 - DNA, 690 bp, Pseudomonas aeruginosa
atggatcaggaacgcatcctcgaaaagatcaagaagtgcatggagatggcgaagtcgaagaccgccaaccccaacgaagccgagacagccctgcgccaggcacacaagttgatggaggcttacaacctggaactaggtgatgtgttggccagcatggcgggcgaagtgaaggtgccagcaggctccgagggcgatcctcctgcctggcgcgttcgcctggcccaggtatgcggccatgccttcggtacccacctgatcatcagcaatggctggattgaggccgcatccttcatcttcgtcggctgcgctgcggccccggaactggccggctacgcctaccaggtgctggagcgtcagctgcagaaggctcgccgcgactacctcgcaacgcagaaacgttgcaagcgttcgaccaaggtcgcccgtggtgacgccttcgcacatgcctggatcgacgcggtgtactccaagatcgaagccttcgcgggggtggaggacaacatcgccgaggcgatccaggcgtatatggccaagaagtacccgaacctcggccaggccaagctgaagcgacgcaagctgaaggcgcgcgacgaggtggccaccgaggccggctatcgagctggcaagtcggctcagttgcatcaggctgtaaaccatcagccgcgtgcgctgctaacggcaggggcctga

SEQ ID NO: 357422 - DNA, 552 bp, Pseudomonas aeruginosa
atgcgcatccagtgcccatgctgcggtgagcagttcccgttcgaggccggcttcgccgatgccgaaggcaagcagttggcggccctgttcgccgacctggagcctcggctcggccgtgcggtgctggcctacctgcggctgttcagcccagccaagcgcagcctgcgcaccaccaaggcgatcaagctggtcgaggagctgatgctgctggtcaatgccggcagcgtcacccgcgacgcccgcaccaacgaatccaagccggccagcccggcgctgtgggccgctggcatcgagcagatgcttgctcagcgcgagcggctctccttgccactcgacaaccaccactacctgcgcgcggtggtgttcggcatcgcgaatgacccgcagcaggctcaacagatcgtcgccaccaccaaggctccggccagctcgcatgtccgcatcgagcgccaggagaagctcggccggatcaagggcgacatgatgctgggcctgctcaccaaagaagaaggcgaccggcgcatcgccgagttgctgggagagacccaatga

SEQ ID NO: 357423 - DNA, 450 bp, Pseudomonas aeruginosa
atgagcacggacaatcgcctgcgcctgatcaagctgatccacgtcgcccgtcgcgagctgggcatggatgacgacacctaccgcctgctgctcagcggaatgaagggtttgggcggtgcaacctccacagctgacctcagcgttccaaatctctaccgggttttggaacagctcaagcagcgtggcttcaaggtgcgctcaagcaagaagcagcgcccgctggcggccgatgaccagtcgaagaagatccgcgcgctgtggctggcactgcacggtgcgggcgaggtacgggacccgtccgaggaggcgctgggcaagttcgtcatgaagatgaccggcgtgcaggccctgcagtggctcagcggcgaccaggccagccaggtgatcgagaacttgaagaagtggcagcggcgcgtggctcgcgccactaataaggaggggaatgtatga

SEQ ID NO: 357424 - DNA, 363 bp, Pseudomonas aeruginosa
atgagcgacttccgtagcaagggccccgagctgctgatcgacctgacccagcacatcgcccacgccctgggtgagctgattgccctggacagcgagcaggccgagcacgtggcgaaggaggtcgcggatcggatggctgcccactggggcggccagaacatctatttcccgatggggctgtcgatcaagctgagccggcgcgaccggcagatctacgacaaattcaacggccacaaccagagcgacctggctcgcgagttcggggtctcgctgcagtgggtctacaagatcatcaaggcggtgcggaaggaggagatcgcgcgtcgtcaggtggatatgttcagcccggccagcgacgcctga

SEQ ID NO: 357425 - DNA, 972 bp, Pseudomonas aeruginosa
atgcccggctcgtcggactgtgcctcttccggcaacaggcgcgcgagcagcgccgcaaggggtccggtgaagccgatcgccagcagtgccagggccaggttgaaagcactgtggaaccagaccgccgccgcaccgccgagtgcgttggccggttgcgccagcgccgtcagccagggcagcaccagcaggcaaccgagcaggcgcaccagcaggttgcccaacggcaggcgccgcgccacccggctaccggccacccctagcgccggcaaggcgccgccgaggttggcaccgagcaccagggccagggcgatgggcagcgagaccagtccggcctgggccagggacgccaccagcagtaccaccgcgacactggaatggcaggcccaggtcagcagcgcggcgagcagcagggcgatcagcggatcgccttcgaggccgtggatcaccgcgacaaaggctggcgaggcctcgatctgctgcagggaatggccgagcaacgccagcgccaggagcatcaggccgagtccgatcaggcactggccaaggctctccaggcgtggaccgtcgcccaggcggaacagcagcaggccggacagcagggccagcggcgccagcaacgaggtgtcgaagctgagcagttgcaccaccagggtggtgccgacgttggcgccgagcatcactgccagcgccggcgccaggcccagggtgccactggcagtgaaggacgctgccatcaggctggtggcggtgctgctctgcagcaggccggtgatgccgagcccggcgagcagggccagccagcggttgcccaggtggcggccgagccagttgcgcagcacagtgccgaaaccgcgcagcacgccgctggagaccatgtgcgtgccccacaacaggagggccacggcaccggccaggttgatcaggaggatggttcccagcatggcggaactcccggttcggaatggatcgtga

SEQ ID NO: 357426 - DNA, 798 bp, Pseudomonas aeruginosa
atgaacacctcggccctcgataccccgctcccggcccgtcccgcccgccgccgtctccagcgccgccggcgcggccctggctggctcctggtcagcccctcggtggcgctgctgctgttgtggatgatcgtgcccctgggcatgaccctgtatttctcgctgatccgctacaacctgctgtatcccggcgagaatgccttcgtcggcctggagaacttcaccttcttcgtcaccgacgccggcttcctgcccggcgcgctgaacaccctgctgctggtgggcagcgtgctggcgatcagcgtggcgttcggcgtgctcatcgccgcgctgctggaggccggcgaattcttcggccgcggcgcggtgcgggtgttgctgatctcgccgttcttcatcatgccgacggtgagcgcgctgctctggaagaacctgatcttccacccggtctcgggcatcctcgccgccgtctggcgcctgttcggcgccgagccggtggattggctggcgcactatccgctgctgtcgatcatcctcatcgtctcctggcaatggctgcccttcgccatcctgatcctgatgaccgccatgcagtccctcgaccaggagcagaaggaggctgcccgcctcgacggcgccggtccgctggcgatcttctggcacctgaccctgccgcacctggcgcggcccatcgctgtcggcatggcctcggccgggggcctgatcgcggtgctgatcgccaatatcgccgccatcgtgctggtgcggatgatcggcaagaaccttaccgagcgcagctga

SEQ ID NO: 357427 - DNA, 399 bp, Pseudomonas aeruginosa
atgagcatggaactctttcacggcagctacgaagaaatctcagaaatccgcgattctggcatatttggcggcctgttcggtgctcatgaaaaggaaaccgctctaagtcatggtgagacgctgcatcgcatcatttcccccctccccttgaccgattacgccctcaactacgaaatcgaaagcgcgtgggaagtggcgttagacgtagccggcggtgacgaaaacgtggccgaggcgatcatggcaaaagcttgcgaatccgactctaacgatggctgggaactccaacgccttcgcggtgtgctcgcggtccgcctcggctataccagtgtcgaaatggaagatgagcatggcaccacgtggctttgtctgcccggctgcacagttgagaaaatctga

SEQ ID NO: 357428 - DNA, 1335 bp, Pseudomonas aeruginosa
atgcaagagccggccaacatcaatacgacgaccgtacaacccgccccgaccgccaccgtgtacggcatgccggcctatgccgatcgtgctgcggccgtgggtgaagtgcatgcgcgcccgcatctgttgattcaggccccccgcagcatattgcagctcgctttcattaccgaaggcgatcaggccagggatcagatggcgatgagtgagttgtctcatcgcttcggcgttgccgaacccgaccatgctacgccgcttcacggcgtgacatgggatgaaggagacctgcactgcgaaaagcacaccgagttctcgacgtatctatggtgcgcttcgctggattccgagacgggagagccgtgcggcgaaaatccgttcaagcatggatttgttcctcccggcccggtcgtatccggcatccgtttgagacttcttccgtggacgccggaaacggagaaggaggtcgatcgcttcgatcctgccagcctgtgctactcgctggtggagaacggctctgccgccatcctgaccgactttcgacaggatgaggatggcctgacgcagatgctcgtcctggcccgcgatttgaccccggcgcgggcgggtgcgctggctcaacgtctgctggagatcgagacttaccgcaccttggcgttgctgtccttgccgttgacgcggtcgatgacgtcggagctgcggcgcatggagtcgcgccttgcggcgatcaccgacgagatgtgtacgagcttggtggaacggcgcgacagcgacgtgctgctgtccgaattgaccgccctggctgccgagctggaagctggcgttgcggcgaatctctatcgcttcggcgccagccgtgcctactacgagatcgtcgaggaaaggctggcagcgctttcggaagaagccgtatccgggtacttcacctgggcggatttcctgcagcgtcgcatcgctcccgccatgcggacatgccaatccgtaaaggagcgccagaccaagctctccgacaagctgacccgggccatcgcgttgctgcgttcctggatcgacgtcgagcttgaacgccagaaccgcgatctgcttgcgtcgatgaacaaccgggccaagatgcaattgcgccttcagcaaaccgtcgaaggcctgtcggtcgcggcaatttcttattacgtcgtgagtcttctcggctatttactcaagggcattccgatggttcacgacagcgtggcgccggtgatggcggttctggtgcctgcggtgatgctgacgatctggtggatcgtgcgcaggatcagacacgcccacggtgacacggcagcggaagagaaatcttcctga

SEQ ID NO: 357429 - DNA, 894 bp, Pseudomonas aeruginosa
  misc_feature (265)..(265): n is a, c, g, or t
atgcacgtgcagtccgttcccggcctggcccggatagggcttggccatgaaggtggtgtccatctcgtggtcgtaggcgatgttcttgaccaggcgcttgagcagcaccgcgtggtcgcaggccttgagggcgtcgttgacgtggttgaggttgacctcgaactgcgccggtgcggattcggcgacgatggcgtcggccgggatgccctgggcgcgggcgccgtcgatgatgtcctggaggcactcgacgtattcgtcgaggtcntcgatggagtacacctgcaccgactgcggacgcttgccggagatcggcgagcgcggaggctgcggccggccgttcacgttctcctggtcgatcaggtagaactccagctcgaaggcggcgacgatggtcagttccatctcggtgaacctggccaccacctggcgcaggacttcgcgggggtcggcgaagaagggatcaccttccagctcatgcatggtcatcagcagttgcgcggtcgggcgcttctgccagggttccatggagagggtgccggggatcgggtagcagatccggtcggcgtcgccgatgtcgagacccaggccggtactctctacggtggagccggtgatatcgagggcgaacagggaagcggggagattgatacctttttcgaagactttgttcagactgttgcgttcgatccgcttgccgcgaaccacgccattcatgtctgcaataaggaggtcgacgaactggacctcgggatgttccttgaggaactcgctcggttcagtgagctgaacggcacgctggggtaccgacatgatgcaacaccttttttgttaaaaatttcaatcatgcggggggtaggctatgagtcaatccgaaagcctgtgggatgtcaatag

SEQ ID NO: 357430 - DNA, 993 bp, Pseudomonas aeruginosa
atggtgggctcggatcgcctcggccatggcgcgattgccctgcaggcgccccaggtgcagttcggggtagccgcccggcaggtacaggctgtccacggcgggcaacgcctggtcctgcagcggcgagaagaacgccagttcggcgccgagttcgcgcagcaggtcgagattggcctggtagaggaaggcgaacgaggcatcgcgggccacgccgatgcgcacgccttccaggctacgttgcagcggcgccggagcgggcacctcgaaggtcaccggctccggcaggtcggtctcggcgctggcccgcaaggcgtcggcggcggcgtccaggcgcacatcgagatcggccagttcctcggcctggaccaggcccaggtggcggctcggcaattcgaattcggccgagcgcggcagaccgccgaaccagcgcatgccgggcggcaggcaatcacgcaggatgtcgctgtggcgctggctgccaacgcggttgccgagcactccggaaaacggcaggtccggctggaaatgcgccaggccgtaggccagcgcgccgaaggtctgggccatcgccgcgccgttgatcacccccagcaccggcacgccgaaacgccgcgccaggtctgccgccgaggggttgccatcgaacaggcccatcaccccttcgatgaggatcaggtcggcctcgccggcggcccgcgccagcaggcgtcgcgcttcggcctcgccgaccatccacaggtcgagctggtagaccggcgcgccggaggcgcgggcgaggatcatcgggtcgaggaagtccggcccgcacttgaacacccgcacccgccgcccctggcgcgcatgcaggcgggccagggcggcggtgacggtggtcttgccctggccggaggccggggcggcgatcagcagggccggacagcgtgcctgggtcatgggcgaagcgtctccgcgcatggcgccggcatcagaattccactcctttctgcgccttga

SEQ ID NO: 357431 - DNA, 234 bp, Pseudomonas aeruginosa
atgatccaccagccgctgggcggtttccagggccaggcctcggatatcgagattcatgccaaggaaatcctcttcatcaaggagcgtctgaaccagatcctggcgcaccacaccggccagcccctggacgtcattgcccgcgataccgatcgtgaccgcttcatgagcggtgacgaagccgtcaagtatggcctgatcgacaaggtcatgacccagcgcgacctggccgtctaa

SEQ ID NO: 357432 - DNA, 654 bp, Pseudomonas aeruginosa
atgtccgttcgccgcaccaaaatcgtcgccaccctcggcccagccagcaattccccggaagtgctggagcaactgatcctggccgggatcgacgtcgcccgcctcaacttctcccacggcacccccgatgaacaccgcgcccgcgccaggctggtgcgcgaactggcggccaagcacggccgcttcgtcgccctgctcggcgacctgcaaggaccgaagatccgcatcgccaagttcgccaacaagcgcatcgaattgcaggtcggcgacaagttccgcttctccaccagccacgcccgcgacgccggtacccaggaagtggtcggcatcgactacccggacctggtgaaggactgcggggtcggcgatgagctgctgctggacgacggccgggtggtgatggtggtcgaggaagtcgccgccgacgaactgcgctgccgggtgctgatcggcggcccgctgtccgaccacaagggcatcaaccgccgcggcggcggtctcaccgcgccggcgctgaccgacaaggacaaggcagacatcaagctggccgcggacatggacctggactacgtggccgtttccttcccgcgcgacgccaaggacatggaatacgcccgccgcctgctcaccgaggccggtggtgagagagagtga

SEQ ID NO: 357433 - DNA, 624 bp, Pseudomonas aeruginosa
gtgactgaagccactcgaattctgctcggcgtgaacatcgatcacgtcgccaccctgcgccaggcccggggcacccgctatccggacccggtgaaggccgccctggacgccgaggaagccggcgccgacggtatcaccgtgcacctgcgcgaggaccgccggcatatccaggaacgcgacgtgcgggtgctcaaggaagtgctgcaaacgcggatgagccaggaacagcgcatccgcgacgcggtgcgacgcctggctgcggtgggcagcgaagtgtcgctgttcatcgatcccgatccgcggcagatcgaggcctccgcccgggtcggcgcgccggctatcgaactgcataccggtcgctacgccgacgccgaagaccccgaggagcaggcccgtgaactgcagcgggtacgcgagggcgtggccctcgggcgttccctcggcctgatcgtcaacgccgggcatggcctgcactaccacaatgtcgagccggtcgcggccatcgacggcatcaacgagctgaacatcggccacgccatcgtcgcccacgccctgttcgtcggcttcaggcaggcggtggccgagatgaaagcgctgatgctggccgcggcgaccaagcgctga

SEQ ID NO: 357434 - DNA, 372 bp, Pseudomonas aeruginosa
atgaaagaagcagacaagctggctcgcaaggcgagctatgacaaaagtgcagatgtgatcgccgtcgagctgatgacaggtgctgtgctgtcgttccggccagggatatgcaatgacctggacggcttgtcgtcgactggcctagaaaccgtccaggtgagcaaggacggcgcagcactcgatttcctagacggcaaagtttgggtgtacctgccagaactgatcgaggggcccaacgctggactctcaagcgtgcaaggaaagcttctggccgtgacttcccaaatcgacctgctgatcggccacgaccggaaacacccgctgtggcactgcctacaagagctgaaaagctgcacaacaatcgacgattaa

SEQ ID NO: 357435 - DNA, 798 bp, Pseudomonas aeruginosa
gtggccaagatcgagcgcgccgaggcggtcgccgacgacgacgcactcgacggcctgattcgtgccagcgacgcggtaatggtggcccgtggcgacctcggcgtggaaatcggcgatgccgagctggtcggcatccagaagaagatcatcctgcacgcccgccgcaacaataaagtggtgatcaccgcgacccagatgatggagtcgatgatccacagcccgatgccgacccgcgcggaagtctccgacgtggccaacgccgtgctcgactacaccgacgcggtgatgctctcggcggaaagcgccgccggcgagtacccggtggaagcggtgaaagccatggcccgcgtctgccagggcgccgagaagcacccgaccagccagaaatccagccatcgcctcggccagactttcgaccgctgcgacgagagcatcgccctggcgtcgatgtacacggccaaccacttcccggggatcaaggcgatcatctgcctgaccgaaagcggcttcaccccgctgatcatgtcgcgcatccgctcgtcggtaccgatttacgcctactccccgcaccgcgagactcaggctcgcgtggcgatgttccgcggcgtggaaaccatccccttcgacccggcggcgctgccggcggagaaggtcagccaggccgcggtcgacgagttgctcaagcgcggcgtggtgaccaagggcgactgggttatcctgaccaagggcgacagctacaccgcccagggcggcaccaacaccatgaaggtgctgcacgtcggcgacctgctggtataa

SEQ ID NO: 357436 - DNA, 324 bp, Pseudomonas aeruginosa
atgctgctggtcttcggcctcaacctgctggctttcaccgctctctgcctggccatgaaccgccaccacaagaacctcctcggccacgagccgtcggctccccgggtgcttctgctacgcggcgtggcgctgctcgacctgggcctggcactggccttctcgatccaccggcagggcgtggagatcggcatcgtcttctggtcctgcctgctgatgctggcggccggcacgctggtcctgctgctcgcctggcggccacgctgggcattgccttgcgccgccggagtgccgttgctcggcggggtgctggcgctgctgcgctga

SEQ ID NO: 357437 - DNA, 441 bp, Pseudomonas aeruginosa
gtgctggagctggaggacggcagttgcctgtgggagtccaacgccatcctcaacttcctcgccgacggcagcgccctgttgcccagcgaaccgcgcctgcgcacccaggtgctgcaatggcaattcttcgagcaatacagccatgagccctatgtggccgtggcgcgcttcatcaagctctacctcggcctcccggaagcccgccgcgccgagttcgaagagaagaagatcggcggctacaaggccctcgacgtcatggagaaacagctgtcgcgcacgccattcctggtcggcgaacagttctccatcgccgatatcaccctctacgcctacacccatgtcgcccatgaaggcggcttcgacctgacggcctacccggcgatccgcgcgtggatcaagcgagtgggggaggtgccggggtatgtggggatgctggattga

SEQ ID NO: 357438 - DNA, 2163 bp, Pseudomonas aeruginosa
atgaaaacggagacgaaggtgatcaagggacgccagggcatcgcccgcaatcggcacaccccgttgtgcctggggctgctgctggcgctgagtccgctggccgcggccgtggccgacgcgcgcaaggacggcgagacggaactgccggacatggtgatcagcggagaaagcacgtctgccacccagccgccgggggtgactaccctgggcaaggtgccgctcaagccgcgcgagctgccgcagtccgccagcgtcatcgaccatgagcgcctcgaacagcagaatctgttcagcctcgacgaagccatgcagcaggccaccggggtcaccgtgcagccgttccagctgctgaccaccgcctactacgtgcgcggcttcaaggtcgactccttcgagctggacggggtgccggcgctgcttggcaatactgccagttcgccgcaggacatggcgatttacgagcgggtcgagatccttcgcggctccaacggactgctgcatggcaccggcaacccggcggccaccgtcaacctggtgcgcaagcggccgcagcgcgaattcgccgccagcactaccctcagcgccgggcgctgggaccgctaccgcgccgaggtcgacgtcggcggcccgctgagcgccagcggcaacgtgcgcggccgagcggtggccgcctacgaggaccgcgactacttctacgacgtggccgaccagggcacccgcctgctctacggggtgaccgagttcgacctgagccccgacaccctgctcaccgtcggtgcgcaataccagcacatcgactcgatcaccaacatggccggggtaccgatggccaaggatgggtccaatctcggactgtcccgcgacacctacctcgatgtcgactgggaccgcttcaagtgggacacctaccgcgccttcggctccctcgaacagcaactgggcggcggctggaaaggcaaggtcagcgccgaataccaggaagccgattcgcgcctgcgttacgccggctccttcggcgccatcgacccgcagaccggcgacggtggccagctgatgggcgccgcctacaagttcaagagcatccagcgcagcctcgacgccaacctcaatgggccggtgcgactgttcggcctgacccacgaactgctcggtggggtcacctacgcccagggcgagacccgccaggacaccgcacgcttcctcaacctgccgaacaccccggtcaatgtctaccgctgggacccgcacggcgtgccgcgcccgcagatcggccagtacacttcgccgggcaccaccaccaccacccagaaaggcctctatgccctgggtcggatcaagctcgccgagccgctgaccctggtggtcggcggccgcgaaagctggtgggaccaggacaccccggccacccgcttcaagcccggtcgccagttcacgccctacggcgggctgatctgggacttcgccagggactggtcgtggtatgtcagctacgccgaggtctaccagccgcaggcggatcgccagacctggaacagcgagccgttgagcccggtggaaggcaagacctacgaaaccgggatcaagggcgaactggccgacggccgcctgaacctgtcgctggcggcgttccgcatcgacctggagaacaatccgcaggaagacccggaccatccggggccgcccaacaatccgttctacatcagcggcggcaaggtgcgcagccagggcttcgagctggaaggcaccggctacctgacgccctactggagtctctcggccggctacacctacaccagcaccgagtacctcaaggacagccagaacgactcggggacgcgctactccaccttcaccccgaggcacctgctgcgcctgtggagcaactacgacctgccctggcaggatcggcgctggagcgtcggcggcggactccaggcgcagagcgactacagcgtcgactaccgcggtgtgagcatgcgccagggcggctacgcactggtcaacatgcgcctgggctacaagatcgacgagcactggacggcggcggtcaacgtcaacaacctgttcgaccggacctactaccagagcctgttcaaccccaactggaacaaccgctacggcgaaccgcgcagcttcaacgtcagcctgcggggcgcgttctga

SEQ ID NO: 357439 - DNA, 2736 bp, Pseudomonas aeruginosa
atgagcctcggcgaactgctggaaacctgccgcagccggcgcatcgaactctggagcgaggcgggccgcctgcgctatcgcgccccacagggcgccctcgacgccggcctcgccgagcgcctgcgggccgagcgcgaggccctgctggaacacctggaaggcggccctggctggcgcgccgaacccgacctggcccaccagcgcttcccattgaccccggtgcaggccgcctacgtgctgggccgccaggcggccttcgactacggcggtaacgcctgccagctgtacgccgagtacgactggccggtcgacaccgatccggcgcgcctggaggcggcctggaacgccatggtcgagcgccacccgatgctgcgcgcggtgatcgaggacaacgcctggcagcgcgtgctgcccgaggtgccctggcagcggctgaccgtgcatgcctgcgcggggctcgacgaggccgctttccaggcgcacctggagcgggttcgcgaacgcctcgaccacgcctgcgcggcgctcgaccagtggccggtcctgcgccccgagctgagtatcggccgggatgcctgcgtactgcactgctcggtggatttcaccctggtcgactacgccagcctgcaattgctgcttggcgaatggcgccgccgctatctcgatccgcaatggacggcggaaccgctggaggcgaccttccgcgactatgtcggcgtcgagcagcgccgacgccagtcgccagcctggcagcgcgaccgcgactggtggctggcgcgtctcgacgcgctaccggggcgtcccgacctgccgctgcgggtgcagccggacacccggtccacgcgcttccggcacttccacgcgcgcctcgacgaggccgcctggcaggcgctcggcgcgcgcgccggcgaacacggcctgagcgctgccggcgtggccctggcggccttcgccgagaccatcggtcgctggagccaggcaccggcgttctgtctcaacctgacggtactcaaccggccgccgctgcatccgcagctggcgcaggtgctcggtgacttcaccgcgctcagcctgctggcagtggacagccgccacggcgacagtttcgtcgagcgtgcccgacgcatcggcgagcagatgttcgacgacctcgaccacccgaccttcagcggcgtcgacctgctgcgcgaactggcgcgccggggtggtcgcggcgccgatctgatgccggtggtgttcaccagtggcatcggcagtgtgcagcgcctgctcggcgatggcgaggcgccgcgcgcgccacgctacatgatcagccagaccccgcaggtctggctggactgccaggtcaccgaccagttcggcggcctggagatcggctgggacgtacgcctcgggttgttccccgagggccaggcggaagccatgttcgacgacttcgtcgggcagctccggcgcctggcgcagagcccgcgcgcctggactgacggtgatgccacggaacccgtcgaggcgccgccgcaggcgttgcccggtagtgcccggagcatcgccgccggtttcgccgagcgtgccctgctgacccccgacgccacggcgatccacgatgccgccggcagctacagctaccgccaggtcgcccagcacgccagcgccctgcgccgcgtcctagaagcgcacggcgcgggccgtggccggcgggtcgcggtgatgctgccgaaaagcgccgcgcaattggtcgcggtgatcggcatcctccaggccggcgccgcctatgtgccggtagacatccgccagcctccgctgcggcgccaggcgatcctcgccagcgccgaagtggtcgcgctggtttgcctggaaagcgatgtcccggacgtcggctgcgcctgcgtggccatcgaccggctggccgccgacagcgcctggccgccaccgcccgcggcggaggtggcggcggacgacctcgcctacgtgatctacacctccggctccaccggcacgccaaagggcgtgatgctcagccatgcggcggtgagcaacacgctgctcgacatcaaccagcgctacggcgtcgacgccaacgaccgcgtcctcggcctcgccgagctgagcttcgacctctcggtctacgacttcttcggcgccaccgcggcggggcccaggtggtcctcccggacccggcgcgcggcagcgatccatcgcactgggcggaactgctggaacgccacgccatcaccctgtggaactcggtgccggcccaaggccagatgctcatcgattacctggagagcgagccgcaacgtcacctgccgggaccgcgctgcgtgctctggtccggtgactggattccggtcagcctgccgacccgctggtggcggcgctggccggacagcgcgctgttcagcctgggcggcgccaccgaggcggcgatctggtcgatcgagcagccgatccgcccgcagcacaccgagctggccagcatcccttatggccgtgccctgcgtgggcagagcgtggaagtcctggatgcccgcgggcggcgctgcccgccgggcgtgcgcggcgagatccatatcggcggggtgggcctggcgctcggctacgccggcgatccgcagcgcaccgccgaacgcttcgtccgtcaccccgatggccgtcgcctgtatcgcaccggcgacctcggccgctacctggccgacggcagcatcgagttcctcggccgcgaggacgaccaggtga

SEQ ID NO: 357440 - DNA, 312 bp, Pseudomonas aeruginosa
atgcagatgctgttgccagtggtgcgagcggactttctcgtcaccggcagctaccgctaccaggcgcatgggccgctggacgcggcgctgcacctgttcggcggacgcgaggacagcctgcgcagcgccgagttgctcggctggctgcatgaggccgggggcgacttcaccctcgacctgctcgacgggcagcactttttcatccgtgaacagcaggggcagttgctgcgcctgctgcgtcgctacgccggccagcatctgctgcgctggcacaaggacaaggtccggggaagcatgcgcgccgccagttga

SEQ ID NO: 357441 - DNA, 855 bp, Pseudomonas aeruginosa
atgccagacgacgacgaactggttcgccgtgccgtcgagcgatgtgatgctgtcgtcgtcgatcccgagcagcccgctgtcctcatcgaatacgggcagcgtcgcgacgtcgtagtcgtcacggatcagccgcagcgtccagagtccggtcgatcgagaaaggaactgggtggcaccgatgtgatccaggacggtctgctcgaagttgtccagctcgtctgccacgcgaaacttgaggcacagaccaaagccctcggcgaacaacgtatctgcggccgtgcgatacgacgcctggtccagcaggccgcgatccttgccccggccccagtcgcggttggtctggcactcgaacaagatgtgagcggggttcatcgccttcacctggtcgccggccaggctgatcactgctttctcgggataccaggttccaccgtcccatccgttgagcgctcgtcgccaccggctcatccaggccttcgggtacctgttcatcgcgcagagttgcccgtcgaagaaagcagtggtgacgccgcggaacgcaggcaccaagccacccaccatcgccgccaggcgaggattcaccggctgccccggggcgccgaacatgacgtccagtggcccggcgatgccaccctcggccttatcccccccgaacaactcaccggcctggatctggatggtctggttactcatcaccgaacccttccaagcggtacggtcaccggccttgatctcgaccatttcgtccagcggacctctcgcaaaccccatgagaatacccatgtagtagcggtagcccatcgtttgcgctttgctacggccgcccatatcccgcctccgcacgtgcgtggttga

SEQ ID NO: 357442 - DNA, 363 bp, Pseudomonas aeruginosa
atgcgcctggccggcagcgaagcggtactgccgcccgagcggatcgaagcctcgaatcaggaaggtcgagacgcccagccggtagtactcgccaagcgcagcggcaacctgctcgggggtgcctaccagggcggtggagttccagcgcgccccggtcagccgggccacgccggtccacaaacggctgtcgagcacttcgccctgctcggcagcggccagcaggcgctgcgaaccgacgttctgcggctggtggtcgcgcagcggcagaccgaggcgcgcacggttctcgcggacctgttcgagcacctcggcggcacgcttccaggcggcctcctcggtatccgcgacgatcggccggaatga

SEQ ID NO: 357443 - DNA, 174 bp, Pseudomonas aeruginosa
atggtccgccccctggtggcgacggtggagacaatggtggcggcaatcctcctggcggcgatggtggtacgaatcctcctggcggtgatggtggctctaatccccctggtggcgagggtggaggcggcggtggtggtggcggtggcggcaataacccctgccaaggccatgtag

SEQ ID NO: 357444 - DNA, 1194 bp, Pseudomonas aeruginosa
gtgcggccaatatatttgatcaggaggaggggccgaaaggcccctttttttatgtctcggttcatattgttgattgttacgttgttatttggctctgtggctcatgctgaatattattactggttcatgggttattttaataagaaagttccatctccttcggctggctgtgatctttatttcaacagtatttctgacaagtccggtctgtcttttgctatggagccttccccgaacgaccctggcaaaactttttattgcgttgcaagggctgtatctaccgggcgagcaatatttactactgatgtctatttgaaaggcgataggtgtccggaaggcactgagttagataaagaaacaggtgagtgtaaggagaataagtgcaagatacttgcgggctcgctatatgaaaagggtggtcatcaggccccgatttcgcgattcatcaattatctcgggtgcgagattgcgattagctcggttcatagctgcataagtcctggggaagggcaggccggtgcgacgtattgcacggctgtcggctcgttcactgggaacttctttacgtcgaatggttcgtgtgccttcggttgcgacgtgggtccaggtgatggtccgccccctggtggcgacggtggagacaatggtggcggcaatcctcctggcggcgatggtggtacgaatcctcctggcggtgatggtggctctaatccccctggtggcgagggtggaggcggcggtggtggtggcggtggcggcaataacccctgccaaggccatgtaggcagcgattgcggctcaacgggtggcgatggcaacggcggtgatggttcgggctctggcggcagcggcagcggtggcggctctgacggcgatggtggcggcaagggggaggggctgaagcgacctaaacagggatcgtttgataaaccaattgaagagtggagcaagaaagttattgaaagccagggggattttaaagagctttctgaaaagttcaaaagctcgcttaagaatgtctttgatattcggctttcttcgggtggcggctccttgccttgtaaaaccattagcgcattgggtatgagctatagcttctgccttgaggactatcgtgactcgctttctcaagttgcaattgcgctacagcttatggcgttgattatctcggcatttattgtcatgagggactag

SEQ ID NO: 357445 - DNA, 6672 bp, Pseudomonas aeruginosa
atgagtgatgaggttattgagcagccaagtagcgagctgccccaggattcgcaggccaccgcagaagtgatcgagccggaggcgataaaaaccgtccgcattcaggccacgctggtcgccaagctcaacctggctgacttccagaactcggtaccggtgatccgagagctgcgcctgatcaacgacagtgatcagaagtacagcagactggaacttcagctcctttccgcccctctcgtcttcaaacccaagacctggcatatcgacgcgctgggccctggtacattccttcccataccagggctcgaccagcagatcgatggtgccctgctggcccgacttactgaagcagagagcgtggccgtcacctttgttctgacgtccctgagcagtggtgacgaagagcgccaagaagtcgcccgcctcgagcttaccctggaactgctcccacgcaatcaatggggggggttatcccatcttcccgacatgaccgctgcgttcgttcagccgaacgacctcgcagtggagcgcctgctgaagaaggccgcggagttgctacgcgaccaaggcaagaaccccgcattgaacggttactccagtggctcagcgcacgcttgggagattgcgtcggcgatctgggccgcggttgcggccctcaagttggattacgccctccccccagctagtttcgaacagttcggccaaaaagtgcgcagcccaagccacatcctcgagagtggtctggcgacgtgcttcgacttgtcgttgctgttctgtgcagcgctagagcaagcaggtctgaacccgctgctgatcttcacccgcggccatgcattctcgggtttctggctcaaagccgaggagttctcaaacagcatcgtcgacgacatcaccgcgctgcgcaaacgcatgaagctcaacgagctgaagctgtttgagaccacactgattactcaacccaacatcccgtcgctgccctacgccatagagcgtggtgcccaacacctggcggagggacaggagcaggaatttgaactcgccctggacatccggcgtgcccgcctacagagaatcaaaccactggccagcgcagaggcaactcctgctctgggcgccgccagtagcaagcagaacttagtaggccaggaactgctcatcgacgagccacccgagctgcctgacgaagcctcggtagaagttgatgttgcctcgctagatcccaaagatcgtctggcccgttggcaacgcaagctgctcgatctatccttgcgcaacaacctgttgaacttcaaggcgggcaagaaagccgttcgcctggaggcaccagatgcctccgcgcttgaggacatcctcgccagcggacagtacctgaagctgcagacacgccccgacctaatggatggtgcagatccgcgcgaccaggccttacacgaagaaagggaacgcgaagaccttcgacgtcagcatgctttggatgcactgaagcgcaatgaagtgttcgtgggcctgccggtcgcagagctcgatgcccgactgaccgagctctatcggggagcacggacgaacctgcaggagggtggctctaacaccttgttcctggcgctgggcttcttgacctggacacgcgaggacagagcaagccagcgctatcgagcgccgctgatactggtacctgtgacgctcgagcgaaagagcgctcgggcgggcttcaccctcgtaattcacgacgatgagccgcgcttcaacccgaccctgcaggaaatgctccgtcaggactttgaactgagtctgggcatcggagaaggtgcgctaccgaaagacgactcaggtctcgatgtcgcgttgatctggaaaacggttgcgcacgcgatcaaggatatcaagggctgggaagtcagcgaagatgtcgtcctgtcgatgttctccttcgccaaatacctgatgtggaaggacctctcggagcgctctgatgtgctgcgccagagccccgtggtcaagcacctgctggatactccacgcgatgcgttcaacggcggcaatggcggtagcagtgcattcccggaagagcgggagctggacgcgcactacagcccacagcaggtcttctgccctcttccctcggactcgtcacaactctccgcggtgctgtcggccgcacagggtcgcaatttcgttctgatcgggccaccaggcaccggcaaaagtcagactattgtgaacatgattgctcagttcatcgcacagcaaaaacgcgtgctcttcgtctccgaaaaaatcgccgcgcttgatgtcgtctaccgccggctacgcgaagtagggctgggtgaattttgcctcgaggttcactcgagcaagtcgaaaaaaaccgaagtcctggcccagttgcactcggcctgggaggcacgcggtagcgctgatacagaaacctggcaggtcgaggcccaacgcctgcaaggacatcgcgacgtcctgaaccggtatgtcgagagacttcacaagcgctaccccaatgggtacacaatttatgatgccatcggcattgtcagcacgaaccaggatgtcgctccgattaacctcaattggctatctcacacacagcatcagtccgcggatctactcgctatgcgggagatcgctgatcgcctggaagtcaatgctcaagtggtcgggttcggcacgctgaatcaacacccgctacacctgattggtaacaacgattggtctccgacctggcagcatcaggtgatcgaggcggcacgtgagctgggccctgccatccatatggtgcaaaagaccagtgagcgttacatccagatgtccggcctaccctcgttaccggccaatatcaggacgctcaaaggtctggcagcgttggcaaaggttctacccactgctgcgggacagaactggcgcttcgtgctccgccccgacgcccgcgcaatcgggcaacgcctagatacgggggtgagactcatcgagcaacaccgcacactcaatcaggcgctccccgcattttggacatccggtacgctggaggaatgccaacgtggactgggattgctggcccgatatgctgaactcagatccggccttccccacccctggccagtggcgagcatgattctgctcaaccaaggtttggagacccttgccgaagtcgcgcaagtcacgcagtcgctgtccgttggatactccgatgccattgaggcactggatgtcaggactctgctgcaagagtggaatcaagccggcaagtcgatgtggccgaaatcctggcttgtgcaacgcagaatccgcgggcaagtggtgagcactcaatcgacgccggcgccaacgaccatcgcggaagatcttcaacgctggatcgctattcgtgaactccgcgctcgcctcgacgccattgatccagggccctcttccagcgctatatggaagggtcacaacactgatccagccctactggcggtggtcatgcgcctgcaagcatccctcgccgcatgcgttgaaggccgcgcctggtcagacgacaacttcgatctcatcagtcaggggcaagcgggcctcgccctgaaggaaacgctggagcggatgagagacgtccgggcgctcgaggatgagatttccacactcaatccactcaaccctgcgacaggatcgctttgggccggactgcagacccaaaccaaagcactcaatgctgcggtggcattccaatgtgcaagacgggctatccagcaggaaggacgcctggaggacgagcatgagctcgtcgctagcggcgcctgtggagagtcgctccagagtgagctgaaaatgctccagcaacgagaagccatcgaacgaaagctgagtgacctgacagacctgcgagaactgacctccggtctgtggctggggctgcatacgaaggaagacacggtctcccgcgtactcaagttccacgctcaccttaccggcgccatctctgccctagttcaaacaccagagcatgtcgaggggatcaaatcagcactggggcgcttgctgggtgatgccaataccctgctcgagcccgagggtcagttggcccaggccggcgggcagttgctggagtcgcttgataagtacgtcgcgcatacgcagaagctcgtcgacgccgggcatatcttggccgaggatgccgccgatttcacagaacaggaactgagtcagcagcgcgtgcagtgcgagcaaatcatccaatcgggcaacggcctgcacgcctggtgcgcctggaagaaagcatgcgatgaagcatccgctctcggcctgcttcccctggtagaggccctgaaagcagggcatattccgcaaggctccgtgcgcaaggcattcgaaacgaactatgcccgttggtggttgaacacggccgttgatcacgagcctgtcattcgcacattcgtgagcgtcgaacacgagcagcgcattcgagacttccgtgcgctggacgaccgcttcaccgcgctgacccgtgatttgcttcgcgcacgcctgtgtgctgagctacccactcaggtctcggtgagcaagaactcggaatggggcgtccttcggcacgagatcacgaagaaaacgcgccaccttcccctgcgcgagctgatgtcgaaaatccccgacgccctcaccaagctgacgccgtgcttgctgatgagtccgctttccatcgcccagtacctggcagcgaactccagcgtctttgatgtggtgatcttcgacgaagcctcacagattccggtatgggatgcgatcggcgccatcgctcgtggtaagcaggtggtgatggttggagaccccaaacagcttcccccgacctccttcttcgatcgtgccgaatccacccaggatgacgttgatgttgaggccgacctcgaaagcattttggatgaatgcatcagtgccaacctgccaatccgcaacctgaactggcactaccgtagtcggcatgaaagcctcattgcgttctcgaaccagcgctactacgagtccaagctggtgaccttcccctcccctgttacaaatgatcgtgccgtcagcctgcacgtcgtcaacggggtgtacgaaaaaggctctgcccgcaccaacccggcagaagccaaggcattggtcgctgacctgatcggccggctacgcagccctggattcagagagagcaagctgaccatcggcgtcgtgacattcaacggcgaacagcaaaagctgattgaggatctgctcgacaccgaacgccgaaaagaccccgcgttggaaagctacttctctgagagtgagcttgaacccgtattcgtgaaaaacctcgaaagtgttcagggtgacgagcgcgacattatgtacttctcgattacctacggccccgatgctgcaggcaacgttgccatgaacttcggcccgctcaatcgcacgggaggtgagcgtcggctcaacgtcgccgtcacccgggctcgccatgaacttcgcgtcttcagcaccctgcgagccgaaaagatcgatctggcacgcacacaggccttgggcgtccgcgatctcaagcacttcctcgagtttgccgaccgcggtgctcgcgcacttgcaggagccgataccgggagcctaggcggatacgacagcccctttgaggaagccgttgcgaacgcgcttcgtcgcaagggctggcaggtcgtcacccaagtcggcgtgtcgtcgttccgaatcgacctggcggttgtcgatcccgatgcgcctgggcgctacctcgccggcgtcgagtgcgatggggcgacctaccaccgcagcgcaacagctcgtgaccgggacaagctgcgcgagcaagtactccgaggtctaggctgggagattctacgcatctggtcgaccgactggtggatcgaccccccgggcactgcacagaaaacccatgagcaccttgaggccctgttggttgaaagccgccagcaacgtgccgcccgtgaagccgaggagcaattggtcgcgaatgccgcgcaataccaagcttcgctgaacgacaacgttatagagcttcctctcgaccgcccccagctcaaaacgcccgatgagtctgatgaactcgacgccgagaccgaggcgatcgaaataccgagcgtgcgctacgccgatacgcaggcagacgccacacgcacctcgactaccttcccttactaccgagggagcgacccgctgagcgccgtggaaggtgtggatccggatgcattcttcgatgcgcgctatgacactgtcctggcgatgatgatcaagcatgtggtcgacgaggagggccccgtcctcgatacctcgcttgcccgccgaatcgcccgggcacatggctggactcgtactggcgcacgcattcgtgatcgtgtcgtcagcgtggccgatcgcgtacaccgcaaggttgaagaggacgctgggcacttctattggcccagccgcttaccaaactgcgaagccgtggtgtatcgccgaccggcagacgccgataacactcggcccgtcgatgagatctgcaacttggagctccttgccttggcacgtgcattggcagaccagagcctcgtcggcgaaggcttgctctacgccatggcacgagagctcggactgagcaaagtctcggcatcaacccgaaccaggatccaaggagcgatcgaccagctgttctcctga

SEQ ID NO: 357446 - DNA, 2268 bp, Pseudomonas aeruginosa
gtgtataagagacaggtccttgatcgacagcttgatgcggccacggttgtccacgtcgagcaccaggaccttcacttcctggccttcctgcagcacgtcggtgaccttgtcgatgcgcttgtcgctgatctgcgagatgtgcaccaggccgtccttgcccggcaggatgttgacgaaggccccgaagtcgacgatgcgctccaccttgccgacgtagatcttgccgatctcggcttccgcggtgatcgccaggacgcgcagcttggcggcctcggcggcttccttggtttcgccgtagatcttcacgctgccatcgtcctcgatgtcgatcgaggccttggtctcttcgcagataccacggatggtcgcgccgcccttgccgatgacgtcgcggatcttgtccgagtcgatcttcatctgcagcatggtcggggcgttctcggacagctcggcgcgcggcttggcgatgacctggttcatctggccgaggatgttcaggcgagcttccagggcctgacccagggcgatctccatgatctcttcggtgataccgttgatcttgatgtccatctgcagggcggtgacgcccttgtcggtaccggcaaccttgaagtccatgtcgcccaggtggtcttcgtcaccgaggatgtcggtcaggacggcgaacttctcgccttccttgaccaggcccatggcgataccggcgaccggcgccttgaccggcacaccggcatccatcagcgccagggaggcgccgcacacggaggccatcgagctggaaccgttggactcggtgatctcggaaaccacgcgaatggtgtaggggaactcgtcctgggtcggcagcatggcggcgacgccacgacgggccagacggccatggccgatttcacgacgacccgggctgcccatgcggccgcactcgcctaccgagaacggcgggaagttgtagtgcagcatgaaggcgtccttgcgctcgccttccagggtatccagcagttgggcatcacgcgcggtgccgagggtcgcgacgaccagggcctgggtttcgccacgggtgaacagcgcggaaccgtgggtcttgccgagcacgccgacttcgatgcgcagcggacgcacggtacgggtgtcacgaccgtcgatacgcggcttgccgttgacgatgttctcgcgaacggtgcggtattccagcaggccgaatacgtccttgacctcggaagccgggaacttgccctcttcctcgccggcgaacagggccacggcctggtcgcgcagctcgcccagacggttgtagcggtcctgcttgatggtgatggtataggcctgggagatcgcttcgcccagctctgccttgatggcgttgaccagcacggtgttttccgccggggctttccagtcccaggccggcttgccagcttcggcggccagctccttgacggcacggatcaccgcctggaactcgtcgtgggcgaacagcacggcaccgagcatctggtcttcggtcagttcgtcggcctcggactccaccatcagcacggcgtcttcggtaccggccacgaccatgtcgaggctggaactctgcagttgctcgtaggtggggttgaggatgtagccgatttccgggtggaaaccgacgcgggcggcgccgatcgggccggcgaacggaatgccggagatcgccagggcggcggaggtgccgatcatcgcggcgatgtccggatcggacttcttgttggtggaaacgacggtgcagacgacctgcacttcattcatgaaaccttcggggaacagcggacggatcggacggtcgatcaggcgcgaggtcagggtttccttctcggaaggacgtccttcacgcttgaagaaaccaccggggatacggcctgcggcgtaggtcttttcctggtagtgcacggacagcgggaagaagtcgcggccttcggccggcgacttggcgccgaccacggtgaccagcacgctgacgtcgtccatggtgaccagtacggcgccggtggcctggcgagcgatacggccggtctcgagagtgacggtcgactgaccgaactggaattgcttggttaccgggttcacggtgtctttaccttctatgttgccttgggggaaatcggtggaatgccgggagtcggacccgaatcgattcctagaaagcgcgaagctggaagcccgacgccgatacccgcctcgtgtgcgggtatcgacgccagacttccagctccttgcttcaagctgccgaccggcgtcgcttag

SEQ ID NO: 357447 - DNA, 1170 bp, Pseudomonas aeruginosa
atgaatacagccgtcaacgtcaacgtcgtgcacgaatccgaagcccagcgccagttcgcccgggtcaagctgccggcgcgcatccgctacatcggcgccaaccgcgaaggcgtcgacgcacgcctgctggatctctccgccggcggcttcgccttcaccgcgagcggcgcaccgatccagcccggcgacctgtacaagggcaagctgctgttccaggtcgacagcatcagcttttccctcgaagtggagttccaggtgcgctcggtggaccccgccagccgccgcgtcggctgcgagttccagaacctcaagccgcgcgaggtggcggccctgcgctacctgatcacctcctacctggccggcgaggtgatcggcgtcggcgacatgctcaacaccctccagcgcgagaacttcaccaaggcccgcaagcagggcggcggcaacggcgggatgggcttcttcggccgggtccgggcggtgaccctgagcaccgcgatcttcgtcgtcggagtcggcgccttcgccttcatcctcaaccagatgtacaacctgtacttcgtcacccatgccgattccggcgtggtcagcgtccccaaccagcagatcaccatgccccgcgagggcaccgtgcagagccttctcgggcccaacgcggaagtcgccaaaggcgcgccgatcgctaccttctcggccaacctgctggacatgctcaagggcaacctgaccgaggagcagctcaacccgggcaacatcgagaagctcttcggccaccagatgaaagggaccctgaccagcccctgcgactgccgcgtggtccagcaactggtagccgacgggcaatacgccaacaagggccaggtgatcttcaccctcgcgccgcgcgacagcgtggccagcatcgaggcacgcttcccctaccgcaacgccgccgagctggcgccgggcacccgggtgaacttccaggtcgccggcgacggcgtcaaccgcagcggccgcatcgtcaacaccgcgccggtggacggcgacctgtcctcggaaatccgcgtgcagatccagcccgaccagccgctcgacgcccagtacgccggccgcccggccgaggtcagcatcggcggcctgcccggccgcaccctgctgaacaaggccgtgaccctggccaccgctcgctga

SEQ ID NO: 357448 - DNA, 1884 bp, Pseudomonas aeruginosa
ttgcaggccggaatagctggcgacccaccacttctcgcggctgctgcggcgggtttcgcgggcctgcccaaggccctggccgcgccctgcgacatagcgttcggcgtccgcctcgggggccggctcgacgacaatctcccggcactcgccgcgcaacgcggcgaggcattgtccgaggccatcgctgccgatggtcgcgccgccggcaagcaggtagcccagggcccccttgtgcaactccggcgacttgctgttgctcgccaccagcggcgcgatgcccagccacaccgaatggcgggcgcgggtcagggccacgtagagcaggcgcatgtcttcgccgaggcgctcgtcgttggcctgctcgtaggcccgcgcagcctgctccttgcgccgcgccagctcgatgacccgccctgcagcgccatcctcgtggaaactcgccggcgcgccgctgttgccgtccagctccctccagctgcagatgaagggcagcagcaccaaggggtattccagccccttggacttgtggatggtcaccaccttgatcaggtcggcgtcgctttccaggcggaggatctcttcgctccccggactctgcacctgctcggccagatggcggatcagcgcgtgctcaccgtccagctccaccgccgcgcgctgcagccactcggccaggtgcagcaggttggtcaggctgcgctcgccatcggcatgccgcagcaggcgcgccggcagttcgaagtcggcgagcaggcgccgcagcatcggcaatacgccctgggcctgccaggaccggcgatagtcgcggaagcgcaggaccatccgttcccagaacagttcgtcctggttcaatcgttccagggtcgcccagtccaggtgcaggctgcgggtagccagggcgacccgcagcagcgcatcggcgccggggtcggcgcaggcacgcagccaatgcagcaggtcggcggcttcctggctgtcgaacaccgagtcgcggtcggacaggtagacgctggccagtcgtcgcgccgccaacgcgctgcggatcgcctcggcctcggcgcgaccgcggacgaggatggcaatatccgccgggcgcaacgcccgccagccgccctgctcgtcggcgaagccggcgcggcccaggtcggccaggctcagccagcggcggatggcgctggcgctgcgctcggccatttcctggcgatacgccgcggagccgagcacgccggcttcgacatcaaggttccagaacgtcatcgctggcgcctcggcaccgtcgatcaacaaacgttcggcgcgcccctgggcgtccaccgcatggaacggcaccgggttttccagcccctcgcgggcgaaacggaaggcgccgcgcggatgctcttcggcgaaggcgaagcagcggttggcggccgccaccatggcggcggtcgagcggaagttcttgccaagggtgtaatgccgcccgcgagtggcctcgcgggcgcgcaggtaggtatggatgtcggcaccgcggaaggcgtagatcgcctgcttggggtcgccgatcatgaacaggccggtttcccgcgcctggggctcgtcgggatcggcggcgatccggtagatgcgctcgaagatccggtactgcaccgggtcggtatcctggaactcgtcgatcagcgccaccgggaactgctcgcggatcaattgcgccaggcgctcgccaccaggcccctgcaaggcgcggtcgaggcggctgagcaggtcgtcgaagccgatctcggcacgccgctgcttctcgatctccagttcgtgcccgacttcgcccaacgcgtgcaacaacaggtggggagcgagatcgggacgctcttcctgatgcgcggcccaggcgtcgatggcccttag

SEQ ID NO: 357449 - DNA, 1626 bp, Pseudomonas aeruginosa
atgttgtcgtcctgccttgccaatgccgccccggatgcggggcaggcgctgcgtgacgtggaaagccgacgcctgaacctgcccgcgccggtggaactggacgccgagcgccccagccccgaggacggcgtatcacgggctgccgaagagggcggcccgacggtgctggtcaagcgcttccaactcagcggcaacaggcagttcgacgatcgacgcctgctggcgctcctgcacgacctgccgggccaggaactcaatctgagccaattgcacgccgccgccgcccgcatcggcgatttctatcaggaaaagggatatgtgctggcgcgcgccttcctcccggcacaggaaatccaggatggaacggtacgcatcgaagtgctcgagggacgctacggcaggatcgaactgcacaacacgtcccgaacgctggaccgcgttctactccgccccttgagcgcactcgaacgagataccgcggtccagggctcggagctggagcgtgcgcttctgctcctgagcgacattcccggcctccaggccaaaggcaccctgctgccgggccaggcgcagggaaccacggacttgcgcgtcgaggcccgccccggcccgctggtcggcggcaggctggaggcagacaactatggcggccgctacatgggggaatatcgcctgggaaccaccctcgacttcaacagcccgctgcgactgggcgaccaggcgagactgagcctgctgggcagcgaccggcaccaacgctactaccgtgcagcctatcaactgccccttggttcccgaggcacgcgcatcggactggcccacgccgagacgacctatcgactggtacgcgatttctcgcgcctggacgcccatggccgggccattaccgacagtctgttcgtcagccagcccctgctgcgtagccgcagcttaagcctgtccacccagttgcaatatgaaaacaagcgacttcgcgataaccaggagcgtaccgggaggcatagccgcaaggagatccgcctgtggaccgccagcatcagcggaaacgcccaggaccgcttgttcggcggtggacagagcggcttctcgctggcctatgcccacggccagctcgccatcgactccggcgaagagcggctgctggaccgctacaccatcggtaccgccggcagcttcgacaagatcatgctcaacgccgtacgcctgcagcacctgggcgaccgcctgcagttgttcgcccaactcaacgcccagtggagcggcggcaacctcgacagcgcggaacagttcgacatgggcggcccctacggcgttcgggcgttccccctgggcagctacaagggctacggcgacgaaggctggcaagccagtgcggagctgcgctacagcctggctccgggctggcagctgagttcgttcgtcgaccagggcgcggtgaaattcctcaagcaccccaacaccacggaaggcaatcgcaaccgcatggccgccgtcggcagcggcgcaacctggtacggaacggatcaccaggtcagcctgaccgccgcctggcccctgagccaggaaaacaacatcgagcccgagcgcactccccggctgtggttgcaagcgacccgctacttctga

SEQ ID NO: 357450 - DNA, 504 bp, Pseudomonas aeruginosa; identical to SEQ ID NO: 324250

SEQ ID NO: 357451 - DNA, 624 bp, Pseudomonas aeruginosa
atgattgacaagaaaattgaggaaatgaaagccgcgccaaacgacgttcacaagcaaatctacctcaaaaccaactacaaatttgagattgaaattgacgtaagaccgaagctgtacggctacctgtatggggtttacaacggcctcaaaccagaagcttttgcccacatggagcaggcgctaaaagacaccccaagggacgttttaaagtcagtgattgacgacttccagctatcagagacgcttaccgatgagaacctagccatcatcctagctgactgtcatatcaacctgaacgagccgactacacctgtatacacgttaccgaaagcccacaacccggaatcagggccaaagccaacgtcacagcaagcaccaggagcagaagccaagccagcgaagccaacagagccaacacctgtacagccaaagccacagccagagcaggagccaaaacctgttgtcacctaccctactggaaccaatccaacccagcagaacggcacccagcagaacagcacaccggcacagcagcaagcgcaggaggacaaacagaagcaggagcaggaacgagacaaggcgttaggacgcgaggcattgaagaagctcaaagagaagctttaa

SEQ ID NO: 357452 - DNA, 1509 bp, Pseudomonas aeruginosa
atgcgccaggtcgcgctgtacctgcggcatcagttgctcctggcccaggcctttcatcatgtcgtaggtggtcttcgaggcgtcgctggagtcgggggtgttggtcacgacgaacaggtacaggtcgccgggcacgccccgggccttgcgcacctgcgcagtcttccgcaggcgctcggcgaagccggcataacggaagtactggttttccatgtagacgtagtcggtggcattgcccagggccttgagatagtgctccaggatcgagcgctcgtcgtcctgcggctgggtccggcaaatctgcgcgacgctgttgctggtgggcgtggcgatcttcggcagcggcaaggcgtcgcgctcggcggtcagcgatggcgtcgagaaccagcgcttgtaccacggcgtctcgaggtcccaggcctcgctgaagttgcggctgaggtcggccagcaccggtccctggacctgcatggagatatcctgccagggcccgaacccgggatcgcgaccggcggcgcggtcgtcgaacaggtgggcgctggtgtcccagtagttgcggtgcatgttgtgacccatgacgaagccgatggcctgcgggctgccatagtcgaccaggaccatcttctggtgatggctggcgaactgggtgagtaccagcaactggccgatgcccaggtcgtcgatgccatcggcgcgcagcaggtggatcaggctttgcagtcgcccattgacgaggcgcacttgctcgccgttcatcaccggtctggccgtctgctcgaagtcgcgggtacggaactcgacgttctgcaacccaccgccgcgtaccgccttgaaccagtcgcgggtgaatatctgcccccagggatcctggcgggtgccgccggaaccgcgcttgccgccgtagccctgggcctcgctgctgtcgagagtgcgctggatctcggcgttctccgcctccagctcggcgatgcgcgcccgcgcgtgggcggcgccccgcgggtcgaagctcggcagcctgccttcgcggtgcagccgttccgagcgctccagggcttcctgctgccgcgcgatgaggttgaggttatgctggcgccgctgctccagtcgcagcacctcgttgtccaccgcgctgccgctggcgacgcccgagcccgcccaggtgccgccggaaccgccgacgccggccccggggatggtgttttccttgagcctggcgagttggttgctccaaaccagcactcgcgcctgcactccttcgcggcccttcgtctgcagcaattcgccgattcgcggtccgtcggggcgtttgaaacgcatggccgggtcgaagccccaggtgatgatgtcgatgctgtgccgggccgcctccatcgccgcatgcaccgcgtcgaaggccgcctggccattgatcagcggcttgatgtgcacacccgcgcgcggcgggtagaaagccttgttggcgaaccagtcgagggtcagccggacgctgccggcctgttgcgcgtatag

SEQ ID NO: 357453 - DNA, 1719 bp, Pseudomonas aeruginosa; identical to SEQ ID NO: 330916

SEQ ID NO: 357454 - DNA, 678 bp, Pseudomonas aeruginosa
gtgctgtccagcaagcagcggcgcaagggcccgcgctcgacctacgtcggcagcgagaccttcgtcgccctggtcgacgccaaccaggcgccctatcgccacgacctgcgccagctcggcatcgccgcgctgtgcaccaaccgcgacctgccgctgttcatgccgatcggcgcgcacaagagcgacttcaccctggaggacagcgcgccggtcatgcaggtgcgctgcctcgccggaccgagccggccgcgcgccagccgtgcccacgatgccagcgcctggcggctgatcagccagctgtcgctgaactacctgtcgctggccgagcgcggccagggcgccgccgccctgcgcgagctgctgcggctctacggcgacagcggcgatccggcgctgcaattgcagatcgagggcctgcgcgaggtcagcagcaagccttgcacgcggcgcctgccgatgcccgggccgatcgtcttcggccgtggcctggagatcaccctggacttcgacgagaacgcgttccgcggcaccggggtgttccttctcggcgctgtgttcgagcgcttcctggcacgctacgtgtcgatcaacagctttaccgagacggtgctgcgcaccggcgaacggggcgaggtgatgagatggcaggcgaagccgggcagccgtccgaacctctga

SEQ ID NO: 357455 - DNA, 2709 bp, Pseudomonas aeruginosa
atgagtgagatcagtcgcgttgcgctgttcggcaagctgaacagcctggcctacaaggccatcgaggccgccacggtattctgcaagctgcgcggcaatccctatgtcgagctggtgcactggttccaccagatcctccagttgccggactcggacctgcaccagatcgtccgccagtccgggatcgacccggcgcgcctggccaaggacctgaccgaggccctcgaccgcctgccgcgcggctcgacctcgatcaccgacctgtcctcccatgtcgaggaagcggtggagcgcggctgggtctacggcagcctgatgttcggcgagagccaggtgcgcaccggctacctggtgatcggcatcctcaagacgccgagcctgcgccatgccctcaccgggctgtcggcggaattcgccaagctcaaggtcgaggcgctcaccgagcgcttcgacgagtacgtcggcgcctcgccggagaacggcctgtcggccagcgacggcttcaacgccggtgccgccccgggcgaggccagcggcgccctggcgccgagcgcgatgggcaagcaggaggcgctcaagcgctttaccgtggacctcaccgagcaggcccgtagcggcaagctcgaccccatcgtcgggcgtgacgaggagatccgccagttggtggacatcctcatgcgccgccggcagaacaacccgatcctcaccggcgaggccggcgtcggcaagaccgcggtggtggaaggcttcgccctgcgcatcgtcgccggcgacgtcccgccggcgctgaaggacgtcgaactgcgcgccctcgacgtcggcctgctgcaggccggggcgagcatgaagggcgagttcgagcagcgcctgcgccaggtgatcgaagacgtgcagagttccgagaagccgatcatcctgttcatcgacgaagcccacaccctggtcggcgccggtggcgcggccggcaccggcgacgccgccaacctgctcaagccggccctggcgcgcggcaccctgcgcaccgtggcagcgaccacctgggccgagtacaagaagcacatcgagaaggacccggcgctgacccggcgtttccaggtggtgcaggtggacgagccgtccgagcacaaggccatcctgatgatgcgcggcgtcgcgtcgaccatggagaagcaccaccaggtgcagatcctcgacgaggcgctggaggcggcggtccggctgtcgcaccgctacatcccggcgcgccagctgccggacaagtcggtgagcctgctggataccgcctgcgcgcgcaccgccatcagcctgcacgcggtgccggccgaggtcgacgatagccgccgtcgcatcgaggcgctggaaaccgagctggcgatcatccgccgcgagagcgccatcggcgtcgccaccgccgaacgccagcgcaacgccgagaccctgctggccgaggagcgcgagcgcctggccgccctggagcagcgctgggccgaggaaaaacgcctggtcgacgaactgctggagacccgcgcccgtctgcgtgccgccgccgaagcggtggacgccggcggcgtgccgctgggcgaaggcgaggtgcgtctcgacgaggaacagcgccaggcgctgcatgcgcggctggcggagctgcaggcgcaactgagcgcgttgcagggcgaagagccgctgatcctgccgaccgtggactatcaggcggtggcctcggtggtcgccgactggaccggcatcccggtcggccgcatggcgcgcaacgagatcgagaccgtgctcaacctcgaccggcacctgaagaagcgcatcatcggccaggaccacgcgctggagatgatcgccaagcgcatccagacttcccgcgccggcctcgacaacccgagcaagccgatcggcgtgttcatgctcgccggcacctccggggtgggcaagaccgagaccgcactggccttggccgaggccatgtacggcggcgagcagaatgtcatcaccatcaacatgagcgagttccaggaagcccacaccgtctccaccctcaagggcgccccgcccggctacatcggctacggcgagggtggcgtgctgaccgaggcggtgcgtcgcaagccctacagcgtggtgctgctggatgaagtggagaaggcccacccggatgtccacgagatcttcttccaggtcttcgacaagggcgtgatggaggacggcgaaggccgggtgatcgacttcaagaacaccctgatcctgctcaccaccaacgccggcaccgagatgatcgccagcctctgcgccgatccggaactgatgcccgagccggaagccatcgccaagtcgctgcgcgaaccgctgctgaagatcttcccgccggcgctgctcggccgcctggtgaccatcccctactacccgctcagcgacgacatgctcaaggccatttcgcgcctgcaactggggcggatcaagaagcgcgtggaggcgacccacaaggtgccgttcgagttcgacgagggcgtcgtcgacctgatcgtctcgcgctgcaccgagaccgagagcggcggccggatgatcgacgcgatcctcaccaacacgctgttgccggacatgagccgcgagttcctcacccgcatgctcgaaggcaagccgttggccggggtacgtatcagtagccgcgacaaccagttccactacgacttcgccgaggccgagtga

SEQ ID NO: 357456 - DNA, 501 bp, Pseudomonas aeruginosa; identical to SEQ ID NO: 341455

SEQ ID NO: 357457 - DNA, 720 bp, Pseudomonas aeruginosa
atgcagactgatggactgggcctgctcaagtaccatgctcgtaacatccgctggcaactcaagccgttgtacatcccgcgcgaattcacccgcaaaccagctcttgagctcgctcagggcgggattttcggctggcttgccgttgaggatattgcagaccaaccggtagcggcgctcgaccaactcagctgtggcctgcaattgtccatgctcctcctcaagacgctgatgcgcggcttgcagctgtgcatgtgcgtcctccagagaggcatgcgcgcgctgcagttgctccagctcacctcgctgcaatttatgggcttgcgccagtgccgcataagcgtttgtgcgctcacgcaattgctgcgtttgtgcggagtgctctgcctgcaactgtccgtgcagggcctgcaactgctcaagatcactagtggtcgcacccagctcggcactgacccctgccagctcggcctcgatgcgctgacgcagcgcctgcatgcgcagcgtatgctcatcggcctcctcgacatgctgccgaagttgctcgatcagcgccttgcgcccccacggccagatgcgtttcagacgcgtgagggcaggctcgagccggggaacaagcaacagatcagacatggcgttgcagctccttcagctcggccagcagctcatcgtagcgctgcagggtcttttccttctcctggatctgcgcccggagtccgttga

SEQ ID NO: 357458 - DNA, 645 bp, Pseudomonas aeruginosa
atgctcctgcgtcaattcaataaccgtgttgcactcagctcctgcaaccgccaagttcacattggcttccgagcagttgcagataaccgatatctcccaactggtcttgccgatggcgcaccactgcaacacttccttctcccggctggtcagaaccaccggtttgctgaccggatgttcgaaggccagtccggcaccgctctgcagtgcgtagtccttgagcatccacagggtcggcaggaccgactccatgaaacggttggcctcggcccggttttccgcttccacgctgaggctcagcgcgccgagttcgccgcgagcaccatgcagcggcatggtcagcccatacaccaggccggcggccgaggcttcctcgaagaactcgtgctgctttcgcgtctggtagatggacggttcccagaaaatcggcagtacgctctgggtacagtgactgaccgtcgggtcgacccgcgcgtagccagcccggtcgtaatgctcgcgccaggcggccgggtagttgccgacgatgaaggcgttctcgtagtcctggctgtccttaggcaacaggccgaacaggatcttcgagaatccaaggtcgctcgccatcttctgcaggatggcgctccactccaattttccacttga

SEQ ID NO: 357459 - DNA, 633 bp, Pseudomonas aeruginosa
atgtgtataagagacaggggaggcagtaagcgacccgctgtcatcggcgttgctcatgacaatggcggcgaggcgctgttccggcagcagaatcagatgggcgctgaatcctcgggtggcgctggcgtactcatagtgacggatgcctccttccagcggtgcggagccgcacgggctgaggaaccaggccaggcccacctggcagtcgaagtccagggcattgccggcgttctgctggcggaacatctcctcgacggagtgtttccggagaagctggcgctccttgtggcgcccgttggcgaacagcatgcggacgaagcggctgaggtcgaccgggctgctccacaggtcgttgaccgggaggtcgctggcggcggcggagccggggcgaccgccgccgctgtagccttgggcgcgttgcgcctggggcagggcgttcctggcgaagctggaacgagtcatctgcaaagggtccagcaggtgctcccgcatgtgctgctcgaagtgctttccggtgttgcgctcgatagccgcgccgaccagctcgtagccaaggttggaataggcgacctgggttcccggcggattgctcagccagacgccggatactttcgccggcagttggccgagtga

SEQ ID NO: 357460 - DNA, 264 bp, Pseudomonas aeruginosa
atgctggtcattcgattcaagggctggtcggtgaaactcgaccaccaggtgggcagcgctgggaaacatggcatctggtcgttccattgctccgagagcacgttcgtgcctggcatggatagcttgctgcggcatgctgccattcgtccggctgagccggctgaagggaagagcaccgaggtagagatggccatctgtcggcctggtgatccggaggagaagtggattccagtggggaagggggccgctgcttacgagagttga

SEQ ID NO: 357461 - DNA, 351 bp, Pseudomonas aeruginosa
gtgtccgatgttctgttcgccttcgactcggttccggccgtaatcgcggtgagccgtgaacccctgatcgtctactcggcaatgttgtttgccatcctgggtctgcgtaccctctacttcgttcttgaagcactgaagcgctatttggtgcacctcgagaaggcggtcatcgtgctgctgttcttcatcgctgccaagctcggcctgaacgccaccaaccacctgttccatcacggcatcagtatcgacccgaataccagtctgcttatcgtcctggcagttctggcagtcggcatcctcgcaagcgtgatcttcccggaaaaggaagaagcgcaagtcgaaaaccagtaa

SEQ ID NO: 357462 - DNA, 1890 bp, Pseudomonas aeruginosa
gtggcaccactcgatagcacttcccccgccgggccgctacaggatcaatccctggcccgctacagcgagcggcagctcgccgttgccaacacctgggcaacgcatttctccctcgcagggacagctcgaaccaagttcatccgtcactacctgcgcagcacctctacgaccaggtgctggtgcatcaccgtcgctgcggataatggtgtgcgttacaccatcatgcgtgcagggccactgctccaggtattcgacggtcaactaatcggtgcgtgggagtgcaggcctgcccatcgtatcccggcaagcacgccgtccccagcaggggcgttgaagctgctacagcgccttcaaaagttcgacgacgcagttgctgtactcagctcatacaccagacgagcgcacgacctagccacacagatggccagggacgatctcggactgcaacgtcgcctcgtgtatccgagccacagcaacaagcgctactacgcaccaaggcgccagttctacttgaagcagatcggagcggtcttgcgaaccttcaggcaggtcctggaccaagacctgctgttcgctatccgctcggttcggtgcctctcgccccagctctacaactggctggctcaaggcaaccaggcgcgccggctgcagatgctgaaggctcagccggtcttgacgccgctactggtggattgcgaggagggagtctggcctcacacgacgaccaacgacaacggcgagagcatctgccatttccttccttgccctttttccctgcttgtcagtgaacgaccgcaggccgccgccgtgccatgcgacttgtacctcgatatgggccgtattcttgggcaggtcgcggacgaagggatttcggtcatcaactttttcgcctggctatttcaggcgccacgggcctcgattcgatttcttagtcacgtcagtcccggccgtgcgggaggagctctcttccatcgcaaacgggaaggccgatattcgggatggcatactctccttatggcagcatcgctaggtaaccggcggccgatcactcgcgctcaatggacagcattctatgccgcctacaatgcgatcccttggcaagttcacaacgccaagcccgactacaaccgtctcttcaacggctgcccgtctgattggcaggatccggcatggcttgcaatcactgcacggctgagagatatcaaggagttctataccgccctcaaccaggggaactcacaggttgttcggcaggcgcgtagcgtcctgcaagcgtatctgggtcattgtacctaccgacaggctggcaacctggtggacgactaccaccaggtccagagggaactgcgcgccacagtacagagcagcctgcccgatctggtcgacaccgacgagtacaccacctgggagggaatgctgcctgtcagccttatcgattgccccaatggcctggagatcgtcgagctccgctgccctgccgatctctatgccgaacatatcgcgctggcccattgcatcgatagctacgaccaggccgcctaccgaggagactgccgactgctctcagtacgtgaggctggccgtccactggcctctgccgaattggagcttaggcgtgaacatggcgagcctctaggtaggccctggaatccccagcacctttccacggtgcaattgcgcgaattcgataatgcccccgtgccggccgactcccctgctggccaagcataccgctggttcatggaacggattcgctctggagccatagcgacgaacctgaactggcccgacatgaccgtccacatgacgcgcttcgccgatggtcgctggaaggcgggcctcgccgaagccacggcgaagtggctgctcactcggttggaaaaccgatga

SEQ ID NO: 357463 - DNA, 687 bp, Pseudomonas aeruginosa
atgtgtataagagacagggttcagacccttcgggcaaacgttcacgcagttcatgattccgcggcagcggaacacactgaatgggtcgtccagcgaagccaggcgctcttcggtcttggtgtcacggctgtcggccaggaaacgataggcttgcagcagtgcggccggaccgaggaacttgtcggggttccaccagaaggacgggcaggaggtcgagcagcaggcgcacaggatgcactcgtacagaccgtccagcttctcgcgctcttccggggtctgcagacgctcgatggccggggccggcgtatcgttctgcaggaacggcttcaccttctcgtattgcttgtagaagatgctcatgtccacgaccaggtcacgaatgaccggcaggcccggcagcggacggatcaccagcttgccgcccttcaggccggcggccgacagcggggtgatgcaggccaggccgttcttgccgttgatgttcatgccatcggagccgcagacgccttcacggcaggaacgacggtaggagaagccctcgtcctgttccttgatcagcgccagcacgtcgaggaccatcacgtccttgccgttggtgtcgacctggaaatcctgcatgtacggcgcagcatctttgtcggggttgtaacgataaacactcacttgcaacatggcgggcacccttag

SEQ ID NO: 357464 - DNA, 1248 bp, Pseudomonas aeruginosa
ttgagagttgcgatcaggctctgtttctccgataacttcagcactctactgaacaccaaaccttgcgtgcacgaggttctgaaagacgctcaagatgcggccagagtgatatttagatcttggcgatacactccagtagaatgctggatgccggttgatacacgccgagcccccgttatcgccccttccaccataaacatggctgatcgccttttttgcccggccgcagccaccctgaggatgcatatcttgatttggtttcttgagggacagtccagccagcgggacatcattctgggagcgcgtgaagccctcccgccggaagtgaggatttttgcttcacatcgccaagacaggcccgaaatcaccggaagcgccgatgtaagtttccttgagccgaaggacaaccaggaacgaatcgactgggtgatcgagaccgccctaaggcatgggatcaaagtcatcctagtcggccgcgtggggagtgtctttgaggctcagcgccaccgattcgaggccgctggcctggttttggttaccggcggcgcgagcatgggtacgttcgagttggtagacgacaagagtaaattcacggcggaagcagaacgtgcaggccttgcctgtgtcccggcgatcacggcacgtaatgcgaaggaactcatcgatgcctacgagtcccttcgtgttctcggcgacgtctgtgtcaaaccagcggtaggtatatatggccaggggttctggcgcttcaagtctgaagcggattcgtttcgttgcttcgccaaccccgattctcgggaagtccagtttgagacataccttaatgcctaccgggctggagcggatcgttccgccatgctggtcatgccgtacatgacaggaagcgagtgctcgatcgacatggtttgcgaatccggccgccccgtggcattcgttggtcgccggaaagaagggctgcaccagaccttcgagaatgactcgccagcggtagagctcgctctgaaggctgccgctcacttccagtgcgatggcctggtcaatgtccaaacgcgggatgatttagacggtgtcccacatctactcgagatcaatccgcggtactccggtggcatcggctacacccgacatacgggagtgaacctgccaggcatcttcgccactagaaggcttggtctggctgagccggtgagtgattggataccgaacatcagggtgaaagccataaccgttgcggtgccagtgacaacttga

SEQ ID NO: 357465 - DNA, 1128 bp, Pseudomonas aeruginosa; identical to SEQ ID NO: 328139

SEQ ID NO: 357466 - DNA, 138 bp, Pseudomonas aeruginosa
atgaacccacgccgcacagcaatctggctaggcagcctcttcggaggcttgatgtacctgttcatcctggcagccggcccgatctggggcggaatcatcaccgcagaatctacgcacctgtccgcagcaggccggtaa

SEQ ID NO: 357467 - DNA, 1008 bp, Pseudomonas aeruginosa
atgaatgtcaccgatgtcgaggagaaggagcgcctgattcagaccaatcagaagcactattcggagatgatcagccaagaacacgcgcctaccgacgttcacaagtccttgtacgctcgcgcgctagtgctgaacggtgctcgcatggctgaagatgttcaatctctggctttggcgttgagtgccgtctgcaccggctccagcatcgcactggtttccttcgtgcgcgccggccttccccttggcgtcctgctccgtcgggcactggtcgagatgggccgtgacgcccaccactatggcgtaagcattatccgtgatcgtgggatcgatacagtggccctcgaagcgatcatccagttgcacggtgctgagaacattgtcttcgtggatggctggaccggcaagggagcaatctctggcgagctcaagcggacgctaggtgccgacaagcgtttcccggaagagccccgactcgttgtgctagccgacccctgcggccgcgcatggctcgccgcctccgcagaggactgggttatcccgtccggaatcttgggcgcaaccgtttccggcttggtgtctcgctccatctggccgactcaaggtgggcttcatggttgcgtggtctacgaccacttgagtgaacacgacgttactcgtgaattcatcgacaagatcgaggctgagcgccaagcgctgagtagcgtccaaaccgcatcgccctggacgcacgagcagagcctgaagctccaggccgcggccgaaaacgtggttacctccctggctacccgctttggcatcagcaacctgaatcgcgtgaaaccaggtattgccgaggccacccgagcagtcctgcgccgagtgcccgatcacgtgctggtgcgagatcgtaatgacggcgacgtgcaactcctactgcatctcaccgagcgcgcaggggtaacggtggaggagaccggcgaggctcttggaccttatcgtgcggtaaccatcatccggagtacgaactga

SEQ ID NO: 357468 - DNA, 1131 bp, Pseudomonas aeruginosa
atgctgctggatgccataaagggtggctcttccgacctgcacttcgagccctacgagaagatctaccgggtgcgcttccgtaccgacggcatgctccacgaagtggccaagccgccgatccagttggccagccgtatttccgcgcgactcaaggtgatggccggcctggacatttccgaacggcgcaaaccgcaggacggacggatcaagatgcgcgtgtcgaagagcaagtccatcgacttccgcgtcaacaccctgccgaccctgtggggcgagaagatcgtgatgcggatcctcgactcctccagcgcacaaatgggcatcgacgccctcggctacgaggaggaccagaaggaactctacctggccgcactcaagcagccacagggcatgatcctggtcaccggccccaccggctcgggcaagacggtatcgctatacaccggcctgaacatcctcaataccaccgacatcaacatttccaccgccgaagacccggtggagatcaacctggaaggcatcaaccaggtcaacgtcaacccgcgccagggcatggacttctcccaggcgctgcgcgccttcctgcgccaggacccggacgtgatcatggtcggcgagatccgcgacctggagaccgccgagatcgccatcaaggcggcgcagaccggacatatggtgatgtccaccctacacaccaacagcgccgccgagaccctgactcgcctgctgaacatgggcgtgccggcgttcaacctggcgacctcggtgaacctgatcatcgcccagcgccttgcgcgaaaactctgttcgcactgcaagaaagaacacgaggtgccgagggaaaccctgcttcacgagggctttccggaagacaagatcggtaccttcaagctttattcgccggtgggctgcgaccattgcaagaacggttacaagggccgtgtcggtatttatgaagtagttaaaaacaccccggccctgcagcggattatcatggaggaaggcaactccatcgagatcgccgagcaagcccgcaaagaaggcttcaacgatctgcgcacctcaggcctgctgaaagccatgcaggggatcaccagcctggaggaagtcaaccgcgtgaccaaggattaa

SEQ ID NO: 357469 - DNA, 288 bp, Pseudomonas aeruginosa
atgagcatccagcgattcaccccggaattcaaggccgaagccgttaggcaggtcatcgagcgcggatactcagtcgcggaaatcgccgcgcgcttcggcgtctctactcacagcctctacaaatgggtaaaggctgtgacccccgacaagtcggagaaacaggccagcgaactgttggaagccaagagcgaaatcctgcggctgcgggcccaaatgcgtcgccttgaagaagaacgggacatcttaaaaaaaccgagcggctcatcacatactgcatggcgtccttga

SEQ ID NO: 357470 - DNA, 888 bp, Pseudomonas aeruginosa
atgaatgagcaaacatcgaatcccaatgcgacgaacgaaggaataaacgaacaggccgcggtaagcagccttcctgtcagtccagaggccaagcctgaagtcgtcacggaggtacagcctgaggttcagaaggaaatggactcgcaggcggcagacaaacgtaaacaagtcctcgatgaggccgtctcggccttggcgctgaccaaatcagcgctggccgcacttgacggcaaggacgctgcacgcgcattggcaacgctggccgaagtgacgggaaagctggagctgatcgttgcgcgcgaacccacgctcgccctggcccccgttgatgtgcgcaccatcgtgcacgacttgttcgccaacacggaaaccattgaggcgatgaccgacgaggcgctggatgccctcaaacatggcgaggtgcaacaggctcgccacgtgctggctttgctggccagtgaaatcgtgatcacggtcaccaacatccctttggcgtcctatcccgcagccgtgaaggcagtcgtgccgctgatcgatcagggcaagatcgaagaagccaaagccgcgctgcaggcagcgctcagcacgttggtcgagacgcgcagcgtgcatccgctgcccgccctgcgcgccaggctgctcctgaagcgcgccgagaccttggtagaagatggtcagcggagcgaagcgtccaatgagcgcctggagacattattgaacgaagcgcggcagcagttggaaatggcagaactgctgggctatggaaagaagaaggactttgagcccctgtatactgaactcaagaaagtcaagcaaaagacggctgggggaggcggcggaataggctggctcgatgaaatcaaggcaaagctgtccaagttgttctga

SEQ ID NO: 357471 - DNA, 342 bp, Pseudomonas aeruginosa
atgaacgacagcatccaactgagcggcctgtcccgacagctcgtccaagccaatctactcgacgaaaagaccgccgtgcaggcccaggcgcaggcgcagcgcaacaagctgtcgctggtgacgcacctggtgcagaacaagctggtaagcggcctggccctggccgaattatccgccgagcagttcggtatcgcctactgcgacctgaatagcctggacaaggaaagctttccgcgggacgccatcagcgaaaagctggtccgccagcaccgggtcatccctttgtggcggcgcggcaacaagctcttcgtaggcatctccctgtctcttatacacatctga

SEQ ID NO: 357472 - DNA, 1533 bp, Pseudomonas aeruginosa
atgagcgagccaccgatcgttctcatcggtatcgtcggtaccggtgccatgggccagggcatcgcccagctcgctgcctgtgccgggctgtcggtgctgctctacgacagccgccagggggcggcgctgcaagcgcgcgagcagatcgccacggtccttgcccggcaggtggagcggggccggctggaggcggaggctgtcgagcgcgcgatgggcaatctgcgggtggtcgaggacttgtgggtcctacgcggctgccagttggtgatcgaggcgatcgtcgagaacctggaggccaagcaggcgttgttccgccaattggaagaggtggtcggcgacgaagcgatcctcgccagcaatacctcctcgctgtcggttaccgcgatcgcctcggcctgtcgcgatcccggccgggtcgccggtctgcacttcttcaatccggtgccgctgatgcgtctggtggaggtgatcgacggtctcgccacccgcaccggcatcgccgagcgactgtgcgccctggtggcgaccttcggccaccagtcggtgcgtgccacggacagccccggcttcatcgtcaaccatgccggacgggccttcggcaccgaggcgctgcgtatcctcggcgagggcgtggcgccggtggcggcgatcgacgaagtcctgcgcgagggcgccggcttccgcatgggcccgttcgagctgttcgacctggtcgggttggacgtcagcctgccggtgatggagtcgatctaccggcagtactacgaggagccgcgttatcgtccgcatcccttgctgcgccagatgctcgccgccggccgcctggggcgcaagagcggccagggcttctaccgctacgacggcgctgggcaggtgcccgccgccgccccggcggttgcgccaggcgcggcgttgccgccggtgtggctgggcgtcgacgacgaacatgaccgcgcgccattgctgacgttgctacaacgtctgggcgccgaggtggagagtggcgagcgtccttccggggcggcgttgtgcctgcttgcgccgctgggcgccgacgtcagcgccgcagcgcggcggttcgccgtcgatccgacgcgcagcctggccatcgacgtgctgtcggacctggagcgacaccgctgcctgatggcctgcccggcgacccgagcggagctgcagcaggccgctcgcaccctgttcgcacgggacggcgtgggcgtcacgctgattcgcgacagcgccgggttcatcgtccagcgcaccctcgcctcgatcgtcaatctcgcctgcgacatcgcccagcagggtatcgcttcggtggagcacatcgacctggcggtgcgcctcggtctcggctatccgctggggccgctggagtggggcgaccgactgggcgccgggcgcgtgctgcgcatcctcgaacgcctgcatgcgctcagcggcgacccgcgctatcgccccagtccctggctgcgccggcgcgcccaactgggcctttccctgcgccagccggacagcccgttggcctcctga

SEQ ID NO: 357473 - DNA, 414 bp, Pseudomonas aeruginosa
atgtacacgcgcttcctgctggccattgccgtcgccttgctctcgatagccggcgcgtctgccggcgaccggctgccgggcaaggtgacggtggtgttcgaccaggccctgccgaacgttcccggcaagagcatgaaggtcgtgctcgtcgactacgcgccgggtggtgcctcgccatcccacacccacccccgttcggccttcatctacgccacggttctcgaaggcgcggtgcgtagcggcgtcaacggctcgccggccaaggtctacaagaccggcgagcacttcatcgaagagcctggctcgttccacgacgtgagcgcgaacgccagcgacacggcgccggcacgcctgatggcggtgttcgtgctcgacagcgacgagggggcgctcgtcacccccgcgggcaaatga

SEQ ID NO: 357474 - DNA, 195 bp, Pseudomonas aeruginosa
atggataaggacctggatacggcaacggaaacattggtgctcttgtctgatcagatgactcaggcggagattgaagtacgcctggccatagccggctacctgatccccgacttgctggaactccggccgggcgcgaagctttcaatgcactggtcaccaagtttcaagatcgctatccgcaccacaagctgctaa

SEQ ID NO: 357475 - DNA, 1041 bp, Pseudomonas aeruginosa
gtgggcaagagcttcatctaccgaagggacatgggggccgcttgttacgctggatacctcattcgcgcgcgtctatttgtatcaagagtcttgcctaggctcttctggtattacactcaatcaagctattactggagcttcattgcaggcagcaatattcaggcaactatccagaatgtaagcggcgagaaatactccaatctttggttagtagttccgccgatcactgagcaggagagcatagttttcagtctcgaccacgaaaccgctcgcatcgacgcgctgattgaaaagaaaacccgctttatcgaactgctgcgcgaaaagcgccaggcactgatcacctatgccgtcaccaagggtctcgaccccaacgtgaagatgaaagactccggcgtggagtggctgggggaggtgccggagcattgggacgttttgcagctacgacatacggcacggttggaatcaggccacacacctagtcgctcaaagccagagtactgggttgactgcactgttccgtggttcacgctcgcagatgtctggcaggttcgtagcggtgagcagaagtacgtatcggagaccgctgagaaggttagtcagctaggcctggagaattcgtcagcccgtttgctgcctgccggctccgtattcttgtcacggactgcctctgtgggctttccgggcattatggcggtcgacatggcaacctcccaggacttcgcagtgtggacatgtactagtgagctatttaacgagtacctctactacgtactgctgggcatgaaaccggattttgatcgcttgatgatggggtcgacccacaagaccatctacatgccggatatcgaggctattcgaattgctcgtccaccagtcgatgagcagcgaggtatcgtcagtgcattgagtggccagcttggtcgtttcaagaccgtcattgataagaccgagcgcagcatcgagctcctgaaagaacgccgctccgccctgatcaccgccgccgtcaccggccagatcgacctgcgggaggccgtatga

SEQ ID NO: 357476 - DNA, 291 bp, Pseudomonas aeruginosa
atgaaaatattaaaaattgagaacggccaaggttactttgcaaccgccgagggtgagtatgaaactatcgacaagattgacaagactatcctgttgaggttagttaactctgctttggaagatggatttaagatagacgagtacagcgagatagaactacaaaaccaagcgcatcaaataatatataagagcatcagtgaaaaactcttggatctccaccaaaaacgtagacagtttcgcgacgaatcagaccgactatatctagatgcttatgagaagtacaaatcctaa

SEQ ID NO: 357477 - DNA, 2004 bp, Pseudomonas aeruginosa
atgcacaccatacctacgtttagtgattctcactttactttctccctggaaaaactcagagagtatgttgtttcagttgggcttgacgccattgcaataactaatcacgacatgttcgatctcggtcaattcaatgaaatatcaggcgcactagattgcatagtatttccagggatcgaaataaacctcgaaagtggccatgtgcttataatatccgagaatgaaaatctagaagactttcagatcaaatcaaatctagtgtcaagtaaggtaaaaaaagttggggattttataagtttcaacgaacttattcagatatttggtgacctaaacagatatttggtaattcctcactacgacaaaaggccatcccttcacgcagaaacaataaagaaactcaaggaatttatctctgctggcgaagttgatagccccaaaaaattcgttcgtctagctaaagataacactgagctaacaccagtaatatttagcgatctacgcatatctgatagccttaagagattcccaactaggcagacttacatcgattgtggcgacctgtctttaaagtctttaaaattcagcctgctcgacagaaccaaagttgccttatcagaatcagatggaaactctctcttccagatatttgaggatggtcaaaaactatccaccgggctgaacattattctaggctctcgatcatctggaaaaaccgtaacattaacccgaatcaatgatgactacgagaacgtaaaatatattcgccagttctctcttgtgcaaagagatgacgcagagtacgaaaaggactttaatgctgatatcgctcgccaaaaaagtatatttgccgacaaccatctggcgccgttcaagtccgttatcgacgacgtcataaatattgatatagaggttaaccggcgcaaagtcgcggactatttagaaagcctcctaaaatcagctgaagaagtgcagaaatttgatgccttctctaaggtggcgctattcaacgagacactatatgaagttggtgaagacctggctcttagcgatcttataaaatctacagttcaactaattgaaaacattgaatacagagatatcatagataaacatataaatattatctcgctaaaagctttggcttgcgaactaatagagcttctttgggttaaagcctacgagagaaagaaaagaaattttgccaatgacctgattaaagatgttagaaacaagctccagctaagaacctccgccacccaagttaaagacgtcgatctttacaagatcatgtatgattacaagaagatcaaaagatttactaaaatcaccgaatttattcagagggagaaaattatattcgaagaaagttttcaagggttcaaagttgtaggaaagcagagggcatttgccagggccggagaagtcaagactgtaagcggacgcaatattgcatttagcactgcatttgaatcatacagccagccttataagtaccttggagcgttaaaaaataacgaacagctcaccccttcagagctctacaaatatttcacctgcattgagtatgaaatattaaacaaggatggattcaaggtgtctggaggagagagatcagaattcagactactgcaggaaataaaaaacgctcagaattatgattatttattaatagatgaaccagaatcttcttttgataacctcttcttaaagagtgaggttaaccaaatgctaaaagagatatctaaaatgatgcctgtcgttattgttacgcacaatagcgtagttggggcatccatcaaggcggactacattatttttacatccaaagaagccagcaaagatggaatcatttacagaagatattcggggcatccctctgacaaagagctaatatcaactgacggtaaaagaatcaacaacttccaggcaactatggactcactagaagcgggcgaagccgcttacatagacagaaggaacggatatgaaaatattaaaaattga

SEQ ID NO: 357478 - DNA, 330 bp, Pseudomonas aeruginosa
atgaagcaaaagcccgtcatcccgcgtgagctagcaaacagagacgtagacagcgccattgcctactacctcgaagaacaggccgagaaggcagcactaggcttcattgacgtcctggaacgagcgtacaaacagatcggctgtcacgccgcctctggctcggcacgctatgcccatgaactggatcttcccggcctacgctcctggccactccagcgctatccctaccttgtgttctacgtcgagcaagatgcccacatcgatgtttggcgcgtactgcatgaaatgaaggatcttcctaggtggttggccactactcaagatagctag

SEQ ID NO: 357479 - DNA, 237 bp, Pseudomonas aeruginosa
atgagtaccatgaacatctccctgccggatgccctcaaaagcttcgttgatgagcaagtgaatcagcgcggttacggcaccagcagcgaatacgtgcgtgagctgattcgcaaggatcaagaccgccaacacctgcgtggcctattgcttgctggggctgcatctgctcctgctgctcctgccgatactgactacttcgaatcgctccgtgctcgcgtgcggaacgctcaaggatga

SEQ ID NO: 357480 - DNA, 1302 bp, Pseudomonas aeruginosa
atgctgatcatcatccactccgagaccaacaagaccaccatccggcagaacctcgggcgcccggagtacagctattacttcgtcctcaaggaattccgtccgctgctggaagagatcggccaggtggtcgaagtcagcgatcccgacgaactggtggaccgcctctaccacgactgccgcaagcgcggcgaaccctgcgtcttcctctccttctcgccgccccatcgcacgccgatccaccatgcctgcccgaccatcccggtgttcgcctgggagttcagcaccctgcccagcgaaacctggcacggcgaaccgcgccacgactggcgacacgtgctgcgccacagcggacgggccatcacccactccagcttcacggtcgacgtggtgcgcgccgccatgggtcgcgactacccggtactgagcgtgccggcgccggtctgggatcgcttcgccaaccgcgcctcgcagcaggcgggccgtcccgaagcccgggatgtgcgcctgcacctggacggcctgctggtggacagccgccagttggacctggccgtccatgccgaccccgagccgtcggcggagatcctggccctgccggaccgcgcggcgaaacaggtcgagctgagcctcgacggggtcatctacacctcggtgttcaacccctatgacgggcgcaagaactggcaggacatgatcagcgcgttctgcgccaccttccgcgacgagcccgacgccaccctggtgctgaaactgacccaccacaacgtcggcgaagcgctggccgacatgcttcaccacctgtacaagaaccagtcctaccgctgccgcatcgtgctgatccacggctacctcgccgacccggactacgagcggctggtcgaggccaccagctacgtggtgaacacctcctacggcgaaggccaatgcctgccgctgatggaattcatgtccagtggcaagccggccgtggctccgcgcaataccgcgatgatcgactacatcgacgccgacaacgccttcatcgtcgactcctcggaagaagccaccgcctggccccacgacccgcgcgcggcctaccgcacgctgcgctacatcaccgactgggagtcgctgtgccgggcctaccgggccagtttcgaggtcgctcgccaggagccggagcgctacgcacgcatgtccgcgcatgccagcgccagcctcgaacgcttctgcagccgcaaactggccgtggagcgcctgcgccgcttcctcgacgaagcggcacaaggcgaccccgccgccttgcaaagcatcccggcatga

SEQ ID NO: 357481 - DNA, 816 bp, Pseudomonas aeruginosa
atgggcgaggtcgccgatctcgccgatctcggccatccgcgcaccgcccttgagggtatgcaggtcgcgctgcaaggcttccagttcgatggtgttgtcgacgtcgtcgatccagcgctgcaacgcggcggcagcgctgtcgaggatatcgaagccttcctcgaggaagatctccaccagttcgggatcgcgctcttcgaacgcctccgcagcgggcggctgcgtcgcggcaggcacggcgggctcctcgacggccggtgcaacgagttcctcgacggggctttccgcctcgcccggtgtcgcggcctcggccagcgggccctggcggaaccggcggatcgcctggataaggtcgtccgggtcggccaggggctggccggcgctcaactggtcgagctgttcggccaggcggtcgtgacaggcttgcagcaatccggccaattgcggggagtgctggtaacggcggtcgaccagtccttcgtagagggcctccagctcgtgggccaggtcgccgatctcggcgatctcggccattcgtgcgccgcccttgagggtgtgcaggtcgcgctgcagggcgctgagcgaagacagcgcgcccggctcggcctgccattgggccagtgcctggccggcgctttcgaggatgtccaccgcctcttcgaggaagatcgacaccatttcctcgtccagctcgcggccgggagccggtgcaggcgctgccggtacggtctcctcggcaggcgtcccggcctcttcgaagaccgcctcggggagggccagctcttcgtcttccggggggaaatcgtcggcgcctag

SEQ ID NO: 357482 - DNA, 1008 bp, Pseudomonas aeruginosa
atggcggccgcgcacttcggcgatcagccactcccagaacggcagtggcttggtgtgcgggttgtcgacgcgaaacagcgtcacgccctgctcgacccagcccagcaccacatcgcgcaaggcttcccacaggctcggcagggcctgttcggcgtagaagtcgacgttgacgatgtcctcgtacttcttcggcgggttctccgcgtagcgcaagctaccgtccggacgccaggcgaaccagccgggatgctcgcgcagccaggggtggtcgggggagcactggatggcgaagtccagcgccagttccatgccgtgctcacgcaccgcaacgagcagccggcggaaatcctcgcggtcgcccagttcgggatggatcgcctcgtggccgccctcctcgctgccgatcgcatacgggctgccggggtcgccggcctcggcacgcaaggaattgttgcggcccttgcgatgggtgcggccgatggggtggatcggcgggaaatagagaacgtcgaagcccatcgcggcgatctgcggcaggcgccggatcacgtcgtcgaaggtaccgtggcgtgtcgggtcgccgctttccgagcgagggaacagctcgtaccaactggcgaagcgcgccagcggtcgctccacctccagcgggtattcgcggctgcgcaccaggtgctcgcgcgggccgaccagacgcaacagttcgccggtctgcgccgccagccacagcgccacccgctcctcgacgctctggcaggcctgcaggcgttcggccagcggcgcacaggcggcggcgatctccggaccgccgcgctcggcgcagcgctgcagcagctcgtcgccctcgcgcagctccaggtccagcggcaggcgtgcgccatgcttggcacgcaattcgcggcggtagccggcgaaacggtcgatccaggcctcgatacggaagtacaggcggccgcagggcggcgtgcgcagctgcgcgctccagaaatcgttgccttcgggcagtag

SEQ ID NO: 357483 - DNA, 1299 bp, Pseudomonas aeruginosa
atggcctggaagatccgcttctacagcgggctgaaccagggcgccgaagtctcgctcggagagggccgggtggcgcttggcagcgatccgttgcaggccgacctggtgttgctcgacgagggcatcgcggcagtccacctggtgctcgaggtcgatgcccagggcgtgcgcctgctggagtgggcggagggctgcgagcctcgccaggacggccaggcgcaagtcgccggagcaatcctgcaggcgcttgccgggcagacctgcggcccgctgcgctgggcattctgcgacccgcagcggcgttttcccgagcgtttccccgaagccgaggcgcagaccgcgccagtgcgccgcaagccgtccgcccgtgccggcggggcctggctgctcggcatcagcctggcgctggccctgtgcctgctgggcatgctcgtcgaaccctggtcggcccgccagcacggcatggctggcgaggagcccctggcgaaggtgcgcgcctacctgcgcgagcagggcatgagcgaggtggatgtgcagcgccagggcgacagtctcctgctcggcggctacctggaggacaacgctcggcgcctggcgctgcagcgctacctcgatggcagcggcgtggactaccgactggaagcacggagcatggaagacattcgccagggcgtggatttcatcctgcagaaattcggctatcggcagatcctcagcagcaacgcggacaagcctggctgggtccggctcaacggcgaactggcggaacaggacgaacgctgggcgcggatcgacgcattgctggagtccgaggtgccgggcctgctcggggtggaaaaccaggtccgggtggccggctcgcacctgcgccgcctcgaacgcctgctggcggacgccggcctcgaccggcaactgagtttccgcgagcgcggcgagcgcatcgagttgagcggtacgctcgacgaggtccagctcagcgccttctaccgcctgcagcgcgagttccagcaggagttcggcaaccgcccgagcctggagctgctcagtcgcggcaagcgcgccagcggcgacgaactggagttcacggtgcgctcggtgtcgctggggcgggtgccctatgtagtgctcggcgacggccagaaatacccggtgggcgcctcgacatcccgcggtgtgcgaatcctcgccatcgagccggagtcgatcctggtggcccgcggcaagcagcgtttcatcatcaatctcaaaggggaggtgctccatgatgacagccttggaaacgcgactgtcggtcgctga

SEQ ID NO: 357484 - DNA, 339 bp, Pseudomonas aeruginosa
atggccgcggcctatgcctgggccgacctggtgatctgtcgcgccggcgcgctgaccgtcagcgagctgacggcggcgggtttgcccgccttcctggtgccgttgcctcacgcgatcgacgatcaccagacccgcaatgccgaattcctggtacgcagcggcgccggccgcctgctgccgcaaaagtctaccggcgcggccgaactggccgcgcagctgtccgaggtcctgatgcatcccgaaaccctgcgctccatggcagaccaggcacgcagcctggcgaaacccgaggctacccggacggtggtcgatgcctgcctggaggtggcccgtggttaa

SEQ ID NO: 357485 - DNA, 216 bp, Pseudomonas aeruginosa
atggcagcccatgcagtagttggcgaaggtacgcgcgccatcctgcatggccgccttgtcggtcaggtcgatatcgacatgatccagttgcggcccatggccgccagcggcgaaacccaggactggcagtaccgccagaatcagtgcagcgaattgctttttcatcagccagtcaccctttccggaaccggtttggtcttctccatccgggtgtag

SEQ ID NO: 357486 - DNA, 684 bp, Pseudomonas aeruginosa
atgaccgatggcgccgcgatggtaggtgccatggttgacgatatggaagaggatctcctggcgcgtcatgccgccgtcgcggccatcggcgaagcggaagcgcagccattcgccgcgacgctccagcggcagctcggcgacatagccggcgaaccaggcggccgaatcctccagccggcgacgcaggacgtcgtagccaggcaccacctcgctgttggtctgttggtggggcgccggctcgcccagcaggcgcgccctgaacagttcctcgacgatcgccatgtgattgagctgttgcaaggcgaaggccagcgaggccgggaacgcctcggcgtcgatccgggcgatggcatcgagggtgcggcggtcggaccaggccttgtagttgaaggactcgaccagcaggtcgacttgcagggtgggtcgggacatgtggcgggcttccgtgtccattcgctgagggagccggatcatagcccggagacagtgctcagcgctcgccctgcaacccttccaggcgtgcatcgcagaggtcgcgcaggcggtcgcggagggtgcgcccggcgctgtccagctcgggccgcgcgtagagcgccagctccaggccagcgatgggcgggaagccggcctgcgcgccaagcaggcgatgctcgggcccgacgcagcccagcggcagcaggctga

SEQ ID NO: 357487 - DNA, 378 bp, Pseudomonas aeruginosa
  misc_feature (259)..(268): n is a, c, g, or t
gtggaactcttcaaagaattcaccttcgaatccgcccatcgcctgccccacgtccccgaaggccacaaatgcgggcgcctgcacggccactcgttccgtgtcgccatccacatcgaaggcgaggtcgatccgcataccggctggatccgcgacttcgcggaaatcaaggcgatcttcaagccgatctacgagcaactcgaccacaattatctgaacgatattccaggcttggaaaaccccaccagcgaaaacctctgcnnnnnnnnnngcggcttgagttgttgccagatccagcggcagaggttttcgctggtggggttttccaaggtccgcgtccacgaaacttgcaccagcggttgcgaatatcggggcgattga

SEQ ID NO: 357488 - DNA, 1284 bp, Pseudomonas aeruginosa
gtgcgggattgccccgcgccgggccggcgcagggacggaatatcgggtgaacgtacaacagagcaagttcaggctgagccgctgggcgggcgcgacactggcgctcggactgctgctgtccgggctgggcgcctgggggctggcgctggtcaacgagcaacaggcgcggatggcgctggaacgcgaggcggaactgctggccgaggcggtgacccgccgcgtggaactctaccagtatggcttgcgtggggtgcgcggtgccttgctgacggcgggcgaggcgcacatcgaccgcgaactgttccgccgctacagcctgacccgcgacatcgatcgcgagtttcccggcgcccgcggcttcggcttcatccgccgggtggcggccgccgacgaggccgggttcctgcgccaggcgcgggccgacggccagccggagttccgcatccagcaactgactccgcacgatggcgagcgctacgtcatccagtacatcgagccggtggcgcgcaacggccaggcgctgggcctggacatcgcctcggaagccaatcgccgggaggccgcccgcgccgccctggagaccgggcaggtgcgcctgacggggccgatcaccctggtccaggccagcggcttgcgccagcaatcgttcctcatcctgatgccgatctaccgcagcggcatcactccaccgccggggccccagcgcgaactcgaaggcttcggctggagctatgcgccgctgctgaccggcgaggtgctggccgggttgcccatcgacaatgcggcgatccacctcgaactcagcgacgtcaccggcgacggcgctgccgtacccttcttcgtcaacggcgccgcggcgccggctcaacgcctgttcggccacatgctgcggcgggagatctacggtcggcactggcagatggcgttcagcgcactgccgctgttcgtccagcgcctgcaccagccttcgccgcgcatcctgttcctggccggcagcctggtcagcctgttgctggcggcgctggtcaacgccagcgccctcggccgccagcgccggcatcgggaggcggcgacccaggcgcggctggcggcgatcgtcggcaattcggcggacggcatcatcggcgtcggcctcgacggcgtcatcagcgactggaatcgcggggccgaggcgttgttcggctaccgcgaggagcaggcggtcgggcggcgggtggtggacctgctggtgccgccatccaaggagaacgaggaactcgacatcctcgcccgcatcgcccgtaa

SEQ ID NO: 357489 - DNA, 381 bp, Pseudomonas aeruginosa
gtgatctacctgcatggcgacctcggcgccggcaagaccaccctctcgcgcggcatcctgcgcggcctcggccatgccggctcggtgaaaagcccgacctttaccctggtcgagccttacgaaatcggcgagctgcgcgcctaccatttcgacctgtaccggctcgccgatgcggaggaattggagttcttcggcatccgcgactatttcgacggcagcgcactctgtctgatcgagtggcccgagcgcggtgcgggcgttttgccaaccgccgatctggacattaccattactgcccaagcgggtggacggacactgcgcctggtaccgcacggtgcgcggggcgaagcctggtgtgccaccctgaccatgggagcatga

SEQ ID NO: 357490 - DNA, 1053 bp, Pseudomonas aeruginosa
gtgttcgcccagcttgtacggcgagatgccattgtagccggcgtgcagcgggctgtccggggcgggggcgagggtgcgcagggcgatcagcaggtggcgcagttcccaactggtggggttccagttggggaagaaggccagggctttcttgccgtcggcctgggcggcgaagttctgccggtattcggcgatgtcgcggatgaagaacaccggctggttgaacatgacgaagtcctgctcgccgtcatggccgcggccgggcaggagtttttcgccgggcacgtcgagcagcttgatggccatgccgcgcgcgtcgttcttgctgtcgaactgtgggtaggcgttgccgttggagaagcgcacccaggcgttccagctcttgcccggttcggcgaacacgccgcgacgcagggtcgggtcgaggtcggcgcgtaccttgaactcggccttcacgcagccgtgggccttggcgtgggcatcgcgcaggacgcgggtgttgtcgcggtgctgttcgaccacgcggatggcgtcctggatgatcgcctgggtgatgcgggcttcgtccggggcgatctgctcttccgcggacaccgggccggagaatttccaggcgtagtagaggctgccgatgacccagccgccgaggccgacggccagcagcaggaggagcaggcggccgagccatttgccgaggaacagccaggcgtgggtgaggagtgcgcgcatggagtgggtgtccttggtggtgtgcgttggctgtgggcttttattcttcttgggcggggagtgcgccacgattgcttctccccgtcctctggccaggcgtcccccctgaagggagaggggctgctcggggtggagaggggcggcggcgccatgcctcgcgcttctccatttcccaggttcagcgttgcgcggtccgttgctccggcgccgggcatttcgggccgggcgtccagggtggggtctgggccgggaccaggcggcgctcgaattcggggttgccgagcaccttcaggtattccaccagcgcccagcgttcttccgggctga

SEQ ID NO: 357491 - DNA, 969 bp, Pseudomonas aeruginosa
atgcgggttggccaggaccgctcgcgcgctgggccagtccggcggcagctcgccaccgagcgccgcgagtacgctgcggctgctggtggcgcgcaccagctcggcgccacgcccttccagcaacaggtcgcacaggcgttcgagcagcgcctggtgcgcttcgcccaggctggccaggcagaacagcccggtgaccggttgcccctggtgctgcaacggttgcgccggagtgacgaaggccagcccggggcgcttcaccaattgttcgctgtgcaaccagcacagcccgtcgcccagcggcaacggttcggtctgctggagcacggcggcgaagccgttctccacgcagccggccttcttcaacaggcgcgcgccgagccaggccagttcgtcgaggtcctcggcgttctggccgaggccgaccagttgtgcgtccagcgccagttcctgcggcgcgccctgcaacaggccgaggacttcctcggcgctggcggccgcgctcagcgccggtcccaggtcggcctcgccgagggcgcgggtgagcaattgcaggagctgcaggtgttcgtcggacttcgccgcgatgccgatggccaggtagacctgctggccatcgccccagtccactccctcggggaattgcagcaggcgcacaccggtgctgaagaccagctcgcgggtatccggggtcccatggggtatggcgatgccctggccgaggtaggtggagccttgtgcctcgcgcgccttcaggccctcggcatagccgggcgcggccaggccgtcggcgaccagcgccgcgccgagcaggtgcagggcttcggccttgtccgcggcgcgctggcccatgcggatctgccgggtatcgagttcgagcatggaaacctcctcaggagcgaacggctccccgtctcacgtccggatcgtcccgccgcgccgaggcgcgggcgcgggatgtgccggcggtag

SEQ ID NO: 357492 - DNA, 1287 bp, Pseudomonas aeruginosa
  misc_feature (1199)..(1208): n is a, c, g, or t
atggcaaggaagcgcagaggaaggaagtcgaacgcatctggcggtttggttttaggcgccatcttcgtcgtgatccttgcatcgattcccaagactgtatggtttctcatcggcatcgcgctggtattggggggaatcatttggctgattgctaagcttgtcgctgactcaaagcctcttgctaatcgcgcccctcctgtcaaggttgatcaggtcgcgtccactaagcctgtaaagcttgcgaagcctgccaagccaactaagcctcctactccggttgccgcagcccctcgtgcgacgaagccagccccggcagtcggtcaggcgcaagtatccccttgcactgaaatcgatctttcggcgttttttaatctctcgctcgatgaaccggagccagtcctcgaggctttgccagccgcagccgagagcactaagaacgaaaccaggacggtcgaagcacccacttctgaggcgcctcctcgcgtggttcaagctgcttctgcccccgcacgggttagttcaccggcgccggcagtgaaagccctgtctcagctcgccaccagcccaatcaaaaccaatacaccagcaactcaaacttctcctgttcaggcggccgaaatcactcggagcgaaactagcaagcgtgaaactccgattgctgtgacgcctctacctgtcgttcgggctgcttcaacgcccgcacggtttgatccgccaccgccgcccgagaaagacctatcgcacttcttcacgatatcgattgggtctagcaaaccaccgtcgtacccgattcctgatcgaccagcagagtttgaggacatagagccccattgggtgccggcaggcgaaacggtcgaagttgcgggcgagaagattcctggagggatgttctacctaggaacaaccacgggtctgtcgtatggtgagacggagccctcgatgatcgacccaagccttcccgtagcgcgtcgaatcgttgatatcgccgagcgtctgacccattactggccgagatacgacagtctctctccggaggcgaggcgtgcatacttgcagtggctgtccagtggcaggaaggcgccacacgcgaacatcggttatgtcttcatcttcttctatggactggagcggcgggcccttattgacgcgaaaagcgatccggtagctgcaggggaagtgccagcaatcattgctgaggnnnnnnnnnngaggtttcgcggctgcaatccatttatcacgacaactattccttccaaggctatgccaaaaggttcttggaatttgtga

SEQ ID NO: 357493 - DNA, 2043 bp, Pseudomonas aeruginosa
atgttcgcagcagccaaccagacccatttcagcctcgccatcgatggcctcgccctcgacctgcaggtgctctccttcagcggccgcgaagccatcagccagccgttcgccttcgacctggaactggtcggcgaacgccccgtgccggacctcgaaagcctgctgcacaaacccgccttccttaccctcgggcccgccggcaacggtatccacggcctggtgcgcagcgccggacagggcgactcgggcaagcgcctgacccgctaccgcatcaccctcgtcccgcaactggcctacctcgcccaacgcaccaaccagcgcatcttccagcacctcacggtgccgcagatcgtcggccgggtgctggaggaacacggcatcctcgccaacgcctaccgcttccagctcggcacccgctaccccgagcgcgaatactgcgtgcagtacgacgagagcgacctgcagttcgtccagcgcctgtgctgcgaggagggcatccactttcatttccagcacagcgccacggcgcacctgctggtattcggcgacgaccagacggtgttcccgcggctcgcgccggtggcctaccagcaggactccggcctggtcgccgaccgcccggcggtcaagcgcttcggcgtacgcctggaaacccgcaccagccgcgtcacccgccgcgactacgacttcgagaaaccgcgcctgacgctggaaagcgccgcccgcggcgaagcccggccggacctcgaggactacgactatcccggtcgcttcgtcgaccgcgagcgcggcaagcacctggccaggcgtgccctcgaacggcagcgcagcgactaccgcctggccgagggccgcagcgaccaaccgttgctgctcagcggccacttcctgccgctggccgcccatccccaggcgggctggaacgacctctggctgctcaccgaggtgattcacgaggggcggcagccgcaggtgctggaagaaagcatcgtctccgacgcctcggcgagcccggacgacttccggcagggttaccgcaaccgcttccaggccacgccctgggaggcgttctttcgtcccccgccgacgccgccgaagccgcgcatcctcggcacgcagagcgcggtggtgaccggtccgaagggcgaggaaatccactgcgaccgctacggtcgggtgaaggtgcaattccactgggatcgcgagggccaggccgacgacagcagcagttgctggttacgcgttgcctccggctgggcgggaaggaactacggcgccatcgccatcccgcgggtcggcatggaggtgctggtgaccttcctcgaaggcgatcccgaccagccgctggtcaccggctgcctgttccacagggaacatccggtgccctacgaactgccggcgcacaagacccgcagcgtcttcaagagcctcagcagtcctggcggcggtggctacaacgagctgcgcatcgaggaccgcaagggccaggagcagatcttcgtccatgcccagcgcgactgggacgaaaacatcgagcacgaccagaagatccgcgtcggtcaccaacgccacgacaccgtggaggcgaacagctacagcgagttcaaggccgaggaacaccgcaccacccacgccgagcgcaaggtggaggtccgcgccagcgaccacctcaccgtagccaacgaccagcacctgaagatcgccagcggccagttcgtcgaggccggccaggagatccacctgagcagcggcctgaaggtggtgctggaggccggcgccgaactgaccctgaagggcggtggcagcttcctcaagctcgacgccagcggcgtgaccctctccggggccaacgtccgggtcaactccggcggcagcccgggcagcggcagcggcgcggcgccgctgttgccggggccgctgcggcaggccgacagcgacaaggccggcgccctcctcaccccggcccagatcaataccctgaagcgcaacgcgcccttctgcgaagagtgcgagaagtgcaaggacggtgcctgtgacctctga

SEQ ID NO: 357494 - DNA, 741 bp, Pseudomonas aeruginosa
gtgacctctgacgccctctccccgcgaacctggctggcccgacatccgctgcaggcaggcgaatgcctgtacgcggtcttcggtagcgccagcgatgccgcgcccctgcaagcctactaccgggaagacagcccacccccaccgctccctctctggaacggcacgccatatgccgactggcaaccagtgatgccctacctcgcgaagctgtcccccagcagcgtattcctcgattgggctgccagcgaaaagtctcgcgactggggttggctggcagtttccacctggtcgacagacgcaatcctagagcacctacgcagcctcacccaggtacgcatgccggatggcagcgaagtgttcttccgtttctgggacggccgtcacctgctaccgatactcgcccacctcggcgagaaagcgcacgaagtactgccgatgttcggccgttacctgatcaatggcaaagcactcgaaaccgaccagggccatctccatgccgcccgtccctatccctggtgggaggttccgcgggcactggtcgacacgctgcatgccgacgacccgactaccgcgatcgacaacctgctgcagtggctgcgcgagaaccacgcagatctgtacttcgcctatcccgagcgaagcctgcaattgcgcgccagacgcctcatcgcgaaagccgtcgccatggatgagatcggcggcctgttgttgaaccagttggaaaaggacctgaccccatga

SEQ ID NO: 357495 - DNA, 1212 bp, Pseudomonas aeruginosa
atggctccagccgaagcccagaccattgtcgatttccgccgcgctggtgcggtacaggcgcgtccaggcgaaacgcagcggaccgtccagctcgcagtcggtcagggtcagcagctcctcgccggtgaccatcgaaacgggacagtccttgacgcaggtctgggcgacctggtcggcgggtttgccggcgggcgtcctgccgggtgcggaggcatcgggcgtcgcctgactgctggagagcgaggtgttcgcgcgctttcctcggctcagcggcagggtgtcgggctcggtgcgggcgatgccttgggcggtgctctggatctgtgcggtgatcttgttggagctgttggccatcacttcaccgcggacggccagaggtttcagcttttccgcgtgcaactggagggaatgccgacagctggtatcgatcagcacctgcatggctttgcgcagcagcatcgcaccttcggaggccttgatcgctttcgagcccttgacggccaggcgaacggcgagaccggctccgccggtcaggatgatgccgagcagaatatcaaggagcaggccggtggagagttccgcgaccatttccgcggcagtcgtgggcggcagcaactgggtccagcacacgatggcgctggcatagatgaacagaagcggttcgtcgctggcgatcagcaaggcggtaccgaggagttccttggcctgagtcttgagcttttcgaaatccgcttcgttgatgaactcaaggagtttcgccgcgtgctcgtcgaggttcgcgaggatgccgaacagctcgaccacatcatcccagagattgaccagcgctttgcccatgccgtccagataggcgtcgtttatctgctccatccgcctacggtcgccaaccggcgcgagccttttccattcggcggaaagcgggccgttccattgctccagaagccattcgttcagcttggcgattacgtcgccgtaggagcggtagagcgcgtcgatctcctggatgcttacctctgggtagaacttgacctggtacagcgtattgggagcgcagccgcttatgctcgccatcccatctgcatccagtacgcccttgaactgcggtgtcctgctgcctatccgagtgatttcgtaaggcgtgttgccgatgggcacgaaactggtcgattcgaaagtatgcagcagtttcagttgaccgttgaccggacatga

SEQ ID NO: 357496 - DNA, 1041 bp, Pseudomonas aeruginosa
atggcggttgtagtgcagcccggtctcggcgtcgaaatactggccctggaagcgcagtgggttatccacttcggcgatgtccagcttgagcacattgccgtaagcccggtagcgcgccgaccagcagaggcggccatcggcgcgggtcagttcctgcggggtaccgaggtggtcgagttggtagtagcagggttcgacctgttccgggccttcgccgtcgagcagggccagcgggcggaagctgtcgggttcgtagagataggtgcggtagtgtcggtcgccgctctcggcgagcaggcgttcgccgagccagaggaactcggtattgcgcccgtcgacctgcttggcgatgcgtcggccgaaggcgtcgtagcggtaggcgacctggcgcccgtccggcaggctgacgccgatcaggcggtgttggcagtcgtagctgtattcggtgaccagcttctgcccggtgccgcggcgttcgcgaacgagattgccgtgggcgtcgtagtcgaaatgccggtcgccctgcgtcagcaggcgatttccgcgaacctccatctgtcgcgcgtcgaattgcccgccctgggcgagcaggttgccggccgggtcgtgcacgaagctttccggggtttcaccgcgtacgccgagcaggcggtccagcgggtcgtagtggaagctgcgaatgcccttgcggctgtcctcgatggcggccaggttgccgctagcgtcatagcggtactggcgctggtagagatggcgctgccgctgactgacctggtgggccagcaggcggccctgctcatcgtagtggtattggctgagcagttcgccctgctggcgctggcgttcgcgaccgctaccgaactggtgccgggtcagggactggccgttgagatcgattgccgagagggtgccgccggtctggtagcggtagtcgacgcggttgccgtcgggcagtcggcagtggatcaactggccgagggcgtcgtaggcgtagtgaagggtggcccagccctggtgctcgcggaccaggcggtcccgtag

SEQ ID NO: 357497 - DNA, 987 bp, Pseudomonas aeruginosa
atgctcccagtcaagaacctcttcgtgctctacaccggcggcaccatcggcatgttgcagaccccgcagggcctggccccggccggcggcttcgaagcgcgcatgcgcgaccacctgcaaagcctcggcgacgccccggacctgcgctggcgcttcgccgaactgcaaccgccgctggacagcgccaacatgacccagggcaactggctggcgatgcgcgacgccatcgtcgccgcgctcgacgccggccacgacggcgtgctgctcctgcacggcaccgacaccctggcctacagcgccgcggcgctgtccttcctgctcctcgacctgccgatcccggtgctgctgaccggctccatgctgccggccggcgcgccgggcagcgatgcttgggacaacctggtcggcgccctgcgcgtcctccaggagggccacgcgcgcggcgtacaggtctatttcaacgatgccctgctgcacggcgcgcgagtcagcaagctgcgcagcgacgcgttcgacgccttcgccgaactgccgcgaccgcgccacgccgagcctgcgccggtgcctgcggcgctcggctaccgccagccgcgccgggaagtgaacctcgccgtgctgccgctctatccagggctgcgcgccgcgcacctgcgcgggctgctcgacagcggcgtggaagcgctgctgctggaatgctatggcagcggcaccggcccgtccgacgacgaggagctgctggcgaccctgcgcgaagcccacgcccgcggcgtgctgctcgccgcggtcagccagtgcgcctacggccaggtcgagttcggcgtctacgccgccggcagccgcctgcgcgacgccggcctgctctcggctggcggaatgacccgcgaggcggccctgggcaagctcttcggcctgctcggcgccggcctcggacgcgacgaagcgcaacgctggttcgccctcgacctgtgcggcgagaacgccgactga

SEQ ID NO: 357498 - DNA, 3270 bp, Pseudomonas aeruginosa
atgagcggattccaggatcagagtatcgacgaaggcgtgcgcaagcgcaccgcctaccagaacgatcggcgtgcacgactggcattgaacgtcgagcgacaggacggcggtatcctgcagattccggtggccagcgatatgctcggccatgaggagcacgagcgtatccagcagaacaccttcctggccgtgatgccgctggtccgcctgccaacgctgggtaaggccggttatggcgaccagctgcccgccggcgcgctaccgcgggcgggacggatctacctgttccaggacggcaagctgtggcgcgaactggagtgtgatggcaagggcaacctgtttgaagtcgacctcctgcaggggcgcagccagcgtgcggacaagcgtccggccgtaggcaagacacaagcgctgatcctggtgccggtgctggtcaaggggcagttcgtgatcccacgctacaccatggcctatagcgaaactccctggccttggtcgtacatcgactggctggaggaggacccgcagcgggtcaaccggcgctgccagcagatggcgtccgcttggaacgcctcggtggccaaccagcactggaaagcctccatccatcatcccgcgctggtcattgatcatcacgcccagggtttgcgacctcgcgacttcaacgtcgagagcgcgctggaagacccggcggaattcacacctgcgttcgccgcctttcgcgaagagtcgctggtgtgccagttgcagcgacgccagcaggaattggcgcccctgctgaagcaggctccgccctctgcgctacctactctggaggccggagaggacgtactggaaaccctcaagctgcgtggccatcccaacctcatcgggctgatgctcgacgactcgctgttcgccttgcgccacgctgcggcgcaggcgcgccactgcgctgcctacttgcgcagcctcaatgcactgctgccgcaccgtcccaacggacgctatgcacaggtgctgagcaacatgctcgacggcccgctcgccaagctcaggggcgaggtcgatcaggccgaactggaagaggcgatcttcgccgaggagcgacagtcttgccggatccacctgacgcatcaggtcgagcatctggtcgccctgcttgaaggccccttgcacccggtgttgcaggactggacccaccagtgcgacgaagccctgctggagccctacagcctgatgagcgaggcactggctgcgctgaaccagcttcccgaccgctgcgacgcactgtacagcggtaccgcctaccgggcgctggcggcccatgtcgagcgggtggtcagcacggttctgcaggccagccacccgcttggtgccatgctcctggccaaggacgaaggacaacttcccgagccggttcggcgcctgcaggcgttgcgcgatagcccacggacaccggaccccgacgcgatgggcctcagcacgctgatgctgggagccagtctgctgggcgaggtcgaccagcccagcgccggcaagagcctcgcctactttctcggcgacctgctggacgtgttcggcgccagcgtagtcgagcaactcggccggctgtcccagggcgccacccagatccagctcgaccgcttgttcgcaccgaccttcaatactctcagcgccctctcggtgaagatgaaaggtatccgcctgctgcccgacggtcaggtaccgctcgacatggttgtcgtcggcgtgcgcggagccggcctgcgcaacggtctgaccgaggtcgagcgccaggaactgaggcgcaagagctatcggcgcgccatcgtccaggacggtgccggcaatcccctggccggcaccagtccccgcggcaccggcatgagtcgcgccaacctgcgcaacgtcatggtggtggcggtacccaaggatcacccggacctgcttgcctacacgaaattccgtacgcagttaggcacgttgacccaggtgatggagaacactcgcatcgtgccgacgatgatgctggggtttgcgatttataacttgaatgtgcaggtgcaggcacacagtggctttatagacagtggagaaaagcacagaggaacgatcggggctgtcggtgcagtaatcgatttaacagccgctggaggaagccatgcaaagctgcttttcggaccatctactgcaaagtatctagaaaccccacgtatatcggtagcccaaatatcccctcggtgggccaggaatctagaagttcaaaccggcagccctaagttagggttgctacgtgggcttggtggcgcagccacactatttggtgcaggcatcagtgtatgggatggctaccgagctttgaggcagggagatagcgatgcggctgcagcctacggtgtggccgcagtgggtgggggcctgtggggtgcctacgtcctaggatggatagtaaacccttatgctttgctggctggtgcggttttggcgatcggaggcactgtggtcgctaatctactgactgacagcgatgcggaaaccatcgtcaagaaaggccccttcggccggcaattcgccgaggctggcctgctcgattcgctgatgggccaggaccagcgcttcgtccatctgaaagacccgcaaacggcctatcgccaattgctgggagtcctcggccatccgcgggtctttgtccatcgcctggaagactggcgcaaattggcgccggcggcgcatcgatctgtcttgcaggaagcggaacggggtcgccaagcggtcagccgcactgcgctatcctgcatcgaccccaagttgcaggcgctggaggcaaacgattgggccgtggtgctgagttccccgctcctggccatgttcgagaatggccagcaggcgttccgcctggtggcccaggagtttctcagcagcttgccgatcgatccgggcaccctgttcggcgtcaagcgctaccatcgggtccccgcgggccccgccaagctcgaagccttgccgttggatgctgccagcgtgctctacgtgctgccggccagcctaccgattccgcagttgtctcctcgggcccgctatagcgtgcgcatgacccagggtttgaagatcagcgcacagttcgaactcaatgccgaccagcctgaggagcggcttgtcctgcctcaacccagcccgaagagttggagtgcattcacatccgccaatcggtaccttcccccggatgacttgggcccacatgctgcgccaccttattggttgatagagaacagtgagttcaacgtatga

SEQ ID NO: 357499 - DNA, 249 bp, Pseudomonas aeruginosa
gtgctcgacttgactaagcaactgcagagccaagttgcgagcgctccggtgcgtaataaagggaaccactgggattacaaggtcgaagaatttcgtgcggttggcacgtatagcctcgacctgtgcaggatcgtcagtcgtaagcacttctgtattacgcactcgcccctcagtttccaggccgatgcgatcgaaaatgctatctttgatggcatagatgaatcggatcggtttctctatctggggtga

SEQ ID NO: 357500 - DNA, 639 bp, Pseudomonas aeruginosa
atgacgatcccgcaaacgccagaacacacgcacaacacccagttcaccaccccgaccgccctgatgctcgatgcccgcctgacgccgctggagcgcaacggctggcaggtgctgcgcatgctgcgggcccctgatggcatcagctcgctagccagcctcggccagctgcgccgctacctcacgtccattccgctgggccagaaagccggccatgaaaccacctggcgcgtgctggtggtactgcgtctgaccggctggattagcctggtcggccagcagcgcgatccgctgaccggccatgtcctgagcgagcagtaccaggtgcatgaccaggcgcagcgctttgcccgggcctgcgtccttgacccgatgctgccgcagctgctgcaggaggccacggggcacgacaacaaccaggtggcgcgcgtggcggcacatattcaggcggagctggcaaaggcctcgtccggcgatgacgacaccgacgatgcaggcccgacgcctccggggatgtcggatgaatcagcagccacatcatcaccggacacgccggacaatacctcgcctgtccagtgcgcttccgttctgccgcagaacacggcgatgactgccgtaacggacgatgctgaccctacgtaa

SEQ ID NO: 357501 - DNA, 180 bp, Pseudomonas aeruginosa
atgacagaccatgccgaggtaagtcgctgcccgggttgcccccacatacaggaaccgttcgaacagcgtaggtttcgcttcaacgagttcatccagcccgatgaagaacactgcttcgaactcgagccctttgatgtgctggacatcgaacacccgaatatcggattggttacccaatga

SEQ ID NO: 357502 - DNA, 135 bp, Pseudomonas aeruginosa
atgctcggccattctcaagcactgaagaacggtgctcaagccaagggagaggacgtgatgtttatcctgcagcgcaaagatgagttcgtcatggcacaggctcccgctgtcatccccgttttgctcttggagtag

SEQ ID NO: 357503 - DNA, 225 bp, Pseudomonas aeruginosa
atggacgaggtgcttagacggaggctgcgggcggagctgcttgaggtggggtttctcaaccagtgctgcctcgatctgatggaagctatggattccgagttcagtctcaccgaggaccagcgcgaatgcgtcgagcagctcggccgattcctgcgggagggcatcggcaagctgaccgctctgtctgagcgggtggccgatggcgatattgtcgtcctgtgctga

SEQ ID NO: 357504 - DNA, 591 bp, Pseudomonas aeruginosa
atgacccgcatgctcagcaccgtccgaaaacaacttctcgccctgcgtgcacgcgacgagcaggttcgcgccgaacttactgccgatggctccttgtacgagggctaccaccctcggatggaaaaggtgcaccagggcaatgccgaagagcttcgctccatcatccaagagcacggatggccggatgaagagcttgccggacccgagggtgcggaagcagcttggctcattgcccaacattccatcggcgaaccggaattcctgcgccaatgcaggacgctccttgatgaagcaagctccctcgggcgcgttcccaggtggcagttcgcctacatcgacgatcggattcgcgtcttcgagggaaagcctcagcgcttcgggacacagatcgaccttcggccggaggggccgaagattcacgaactggaagatccatcgcaagtcgatgcttggcggaaggagatcggcctgccagcgctcgcaagcactcttgccagggcgcagtccgatccactccccacgccggacgagtacgaggccaaggaggccgccgggctctcgtggcgtcggaaggtaggttgggtgaagtga

SEQ ID NO: 357505 - DNA, 948 bp, Pseudomonas aeruginosa
atgaacgacatggtttaccgaagcgcggaagcagcggcagccgtcgaaacgcaatacaagcgagtcttggagcgatggccggttccgaagaccgagttgcatgtgccgactcattatggctcgacctttgtcgtggcctgcggcccggaaagcgcaccgcccgtcgtgttgctccacggctcgctggccaactcggccgcatgggtgcctgatgttgcgttgtggtcaacgaagttcaggctgttcgcgatcgatatgatcggcgaggccggcttcagtgcacgggtccggcccgatcttgccggggacgcccatgcactgtggctcgacgacgttctcgaggggctggggctggggctgggatcgggacgggcgcgcgtcgccatcgtcggcacgtcgctcggcggatggctggcactcgactatgccaacagaaggccagcggccgttcgcgcgctggcgttgatctgcccggccggcatcggccgtcagaaaaactttctcctgaaggtgctgccgcttctcctgctcggcgcatggggcaagcgtcgggtgtgggagctggtgttcggccccgctcccaaggtattgccgccagaaatgcagccgctcgcggaactgatggaaattgtaggacgagccgtcaagccgcgcgtggccagcattccgcaactgactgacgctcaactgagtgaactcggcatgccgatcctgacgatcatcggcgggcgggacgttttgttggactctcggcacacgagggaaaggttgcaacggagcgctccgcaagccgagatatgtttcattgaagatggctatcacttccttccggatcaggcgccacgcgtcatggattttctggagcgaagcgcgatattcgctcctgcttcacgggcaaccggaaaagagatcaaggccgaacaatcgtccgtagcgtcttggagatag

SEQ ID NO: 357506 - DNA, 429 bp, Pseudomonas aeruginosa
atgggaatgtctgtcagccttgtcaccgtcgagcaggcggctgagcatctacacctgcaccccaagaccgtgctgcgctacatccgtgacggacgactgtcggcaacgcgggttggaaagtcctaccgcatcgcacgcaccggactggacgcctttagcggcgtcgcgagcgctcaatcagaatcggcagcaggcatacgggcaacatgcatcgttgacatccccgatgtctccgtgggcacggcggaacgactggcaacgttcctccagtccgctgctatggccagcccggctaacacgccaccgctgcatcttcaaacggcgttcgacccgctcgccaagagcatgaaagtggtggtgatcgccagtccgtccaacgcggccgagctgttggaaatgttacaggtgaagatgagtagcctcttatga

SEQ ID NO: 357507 - DNA, 633 bp, Pseudomonas aeruginosa
atgaacctcatcgctgctttgaccgctgagaacggctcgacgcggctcaaggccgctctcgtgatcggctccaatgctgacccgggtctggtcgacaccgttatagcgcggtgtgcgatcgagccagatttctacgtgcgcgacatgctcacgtgggcgttgacccgtttcccgaacgagatcactgtgccgagactggtcgcggagctgcattcggaaggtgcgcaggcccggagtcaggcgttgcacacactgtcgaaaatcaaagacgccggcgcatggccggcgatcacgcgatccctgctgcgcgactcggacgacgaggtcgcccggagcgcatggcgtgctgcggtcgtcatggtgcctgatggacagaagaaggacttggccgaggaactcgccgtgcagttcggtcgcggcaaccgggaagtgcagctcagtctgagtcgcgccctcatcgccctaggagaagaagtggtcgagccggttctccggaaggcgatggcgagcgacaatccaggtgttcatgcccatgcgagcgctacggagcggatcctgcgcgacccgaacgccagtttcgagttcgccgtccaagaggcgaggcggatatttgtgctcggcaaggagcggtag

SEQ ID NO: 357508 - DNA, 1998 bp, Pseudomonas aeruginosa
gtgcaagcgaacatcaaaggtctggtggatcggctggagctttcccagggcaaggcaatgatgcctctttacgaggctatctcgaatgccgtcgatgcaatcgaggagcatcaggacggcttcagcaatcattcgattcgcatccggctggtggcctccaacgacctcgcccatcaagctggggacgggactctggtcgtggacggcttcgatgtcattgatgatggcgttggcttcaacgacaagaacctggcttcgtttcaagaggcgcacacgctttcaaaggtcaaggtcggcggccgaggtgtcgggcgcttcactttcctgaaagtcttttcatccgtacacatccgcagtgtcttcaaacgcgacggcaaggctttgctgcgagagttcgacttcagcatccaagatgaactgaaaggtgcggacaccacgtctgaagtcaaagaggcatgtggcacgcatacctctttgcggggcatggatgaaaagtttcgggctggatggcctacccagcccgaaaccatcgctgaacgcatcattgcgcacttcctgatccggtttgcggctcgctcctgccctcctatgactctggagtctccgggacacgcttcgattgacttgcacgccctgtttcagtcaacagtgctggcgcacatccaagaacagttcttcgaggtttcggggcatacatttgccttgcaggcatatcgtcaccgagacggacgctcgcgccacgaactcaacttgtgtgcgaacgggcgcgaagtcaccacgagcaagctgcgagacctgcttccagagcttcccgaaaagctgattgacgaagaccaagcgccgtacaccttgatcgtgctggtcaccggggagtacctggacgaccatgccaaccaagagcgcacgcgcatcgccttccaaagcgatgaggagcccgagcttgagcagaccctcgtctcccgacgcgccctgaaccagggtgtcgcaggggcgttgcggccgctgctcctggacgatttgaagtcaacgaacgaagaaaagcgcgcccagatcgagaagttcgtggagcaagcccccgagtacagggcgctcacgcaccctcgctacaaggagatgatcgagcagaagattcagccaggcctgtctgaagacaagctggacgaagcgctattgcacgtcaaacgagaaattgaagatggagtacgcaaggatttgcggcacgttgcggccaacttcgaaagtcagtcgttcgagcagtacgcagagatgtttcagaagctggccgaacaagcaaatgagcttggcaaagctgagcttgcaaagtacgtcacccatcgccgcaccattcttgatctggtatcgcttagcttaaaaaagaggcggtcagacgataagtatccgctggaacgcgtacttcacaagatgcttttcccgatgggcgtcacttccaaagatatcttctttgagcagcagaatttgtgggtgattgatgaacggctttgctatcacacactgctaacgtccgataaaaagttgaactccatagacggccttgaagatacgtccggtaaggagccggatatttgctcctttttctacgacaccccgatcggggtgcgggagcaggaagattccacgggctcaattgtcgtgatcgagttcaagcgaccggggcgtgacgattaccaagcggaccctgcccagcaagtcattaagagatttgttgaaattcaagagagcaagctggacgacgttgatggcaggccgattaatgcacgcggaattcgcttctttggctatttgatagctgacttgacgccatcgctcaagcgggaaatgcgaatgaactatcacgagtccattgatggcgaaggctatttcaaaacgctcacgggcggaaatggctacgtagaaatcatctcttacgacaagctcctcaaagatgccgcgcgcagaaaccgcgtgctatttgagaagcttggcctgcacaagaattaa

SEQ ID NO: 357509 - DNA, 225 bp, Pseudomonas aeruginosa; identical to SEQ ID NO: 327671

SEQ ID NO: 357510 - DNA, 789 bp, Pseudomonas aeruginosa
gtgctcaacgccctgatcaacatgcccgactcggccaaggccgccatcgaccacccggtgcatgccatggtcgccggcgccgcgccaccggccaaggtgatcggcgcggtggaagagatgggcatccgcgtcacccatgtctacggcctcaccgaggtctacggcccggtcacggtctgcgcctggcacggcgagtgggacgacctgccgctggagcgacgcgccgcgatcaagtcgcgccagggcgtgcgctacccgaccctcgaaggggtgatggtggccgacccgaagaccctcgagccggtgccgcgcgacggccagtccatcggcgagatcttcatgcgcggcaataccgtgatgaagggctacctgaagaatcccagcgccaccgaggaagccttcgccggcggctggttccataccggcgacctggcggtctgccatccggacggctacatcgagatccgcgaccggctcaaggacatcatcatctccggcggcgaaaacatctccaccatcgaactggagggcgtgctctaccgccacccggcggtgctggaggcggcggtggtggcgcggcccgacgaaaagtggggggaaacgccctgtgcgttcattaccctgaagagcgatcatcaggggctcgccgagagcgagatcgtcgcgttctgtcgcgaacacctggccgcgttcaagattccgcgtaccgtggtgttctcggaactgccgaagacctccaccggcaagatccagaaatacgtgctgcgcgagtgggccgccgccctctga

SEQ ID NO: 357511 - DNA, 231 bp, Pseudomonas aeruginosa
atgaaacaactgaaacaactgttctccctgggcaagcgtgaagccgttatcggtggctcgttgctgatgacgtccggcctctcgatggccgccgagggcgatatcgacactactaaggccctggcctatatcgcgggcggtctggctgctgcggcggctgtgactggtgccatgttcggcctggtggccctgatcggtgcggccaagaaagcgatgcgcgcagggacctaa

SEQ ID NO: 357512 - DNA, 1467 bp, Pseudomonas aeruginosa
atgaggattaagacatgtatatcagccctgaagatatcgctttctatggcgtgcttattgccatcgttattctttgctcggggcgctagtgcggcggattattattggatgattcaatcgttaccggatcactttccgtcagctcgtgcggcatgttctgcttgggcgccagctactggcacgcccggtgatttcacttttactgggaggatggtggctagggatgccacctcgttttggtgcgagttcacgaacaacaagaccggaaaaactgctgctgggtatggtcctgcggggcgatatggtgattcgtgcccggcaggtacggagtacgacaaggctttaggggagtgcaagtcgccgcctaaggagtgcgaagttggtacgcctaacttatttcgtagttcgaactatccgattatcgtgattaatgggaagaacacggttcctagttctccgccgtccggctgtttgagtggctgcgcctatgaggcagatagttctcggccaacatcctgttatcgcactccaggctctacaactgaggggttctgcaactacacgctcaagagcaacggtcagaactgttcagcagactccggcaacctgggcggcaccggcccttcgctcagcgagccgaatcagccgccggtgaccgacccgccttcggacccgaacgatccgggctgtccgaagggctacagctggtccggcactacgtgcgtgaagacgccgaccgatcccacggacccgaccgacccgaaagaccctggtggtgatggcggtggaactggtggcggcggtacgggtggtggcggcgatggcggaacgggtggcggtgacggtgggaccggtgggggagacgggaagtgcgaccctgccaaggatccgaacaagtgtcagggcaatggctctggtggcgggggagacgggaagtgcgatcctgctaaggaccccaacaagtgccaaggcactggtggtggcggaaccgggcagtgtgacccggcaaaggacccgaacaaatgcggcagtggctcctcgatctccggcgacggtgactgcaaggtggcgattcagtgcaacggcgacgcgatccagtgcgccatcgttcgccaggaaaagctcgcacgctgcgcggatgaagagttccgtacggtcgatgacaagaagattcaggacctgaaaaacacgctggccggcgagttctccgggcctgagtacgaacccatcaaggccaccggcgagaacacccatgacctgtcgaagctgatcgacaccagcggtcgcttctccaaggcctgcccggtcattcctgacgtctcgttcccctggttcggcagtactcagacggtttcgctcagtagcgtgtcgtccgatctgtgcacgtacctccagtggttcgggtatctgctggtcgcgttcgctatgcgctccgcggctgaaatcattgcgcgagggttgaactga

SEQ ID NO: 357513 - DNA, 312 bp, Pseudomonas aeruginosa
atgccgttactgatcggggtactactgcgggccatcggctggtcgctgatcccgctgggttggaagctgctgcgcggcctggggttcactgctgtggcctttgttggtgtcaaggcggtgatggatcaggccaaggactacgtattcagcaacctgggtggcgtgcctgctcagtggctccaggtcctggggcttctgcaagttgacgtgtgcatcaacatcctgttctccgcgtacatcgctcgcgccgtgctgtggggtatggacaagtctggcggcaagtctggcatgcgctggaccgggccgaagtaa

SEQ ID NO: 357514 - DNA, 1281 bp, Pseudomonas aeruginosa
  misc_feature (776)..(776): n is a, c, g, or t
atgctctatctgcgcaccggcctgccaggcgctggcaagaccctgaacgcgattcgggaaatcgacattgaacaccagccggacccggacgacccgaccaagcggttgcacaaggacccggacaatccagacctgccgcccaggacgatctactactacggcatcccggatatgaaacttgaccggctcaagtcgaagtgggtcgagttcgatacgcccgaagagtggtacaacctgcctgatggctcggtgatcgtgattgacgaagcgcaacgggtgttcggcaatgatggctccagggcgcgcccggagaaagtcacgcgcttcgagacgcaccggcaccagggcctggacattcatctgattactcagcatcccagcctgctgtgcacgccagtgcgcaagttggtcggcaagcacatcaacttcattcggccctatggccgggagaaaggcatcttccggcatgagtacgagttctgcatcgacaacccggagcggcgcagcaacttcaagcaggcccaggaagagcgggtcacgctggataaggcgtatttcggcgtctacaagtcgtcgacggtgcacacgcacaagccgatcacgcccagctacatgaagaaaatcccgctgatcatcgctctgatgctgattccgatcggcgtgcttgttgggcttgtcgtgaccgcgatgcgtcaagggaatgaggagaaagaagcggctctggcgaggagccaagcggctgaggcgtcagcaggtgttctgcctggggctggaantgctgttcaggcagcccccaggccctccagtgggccgaaatcggccgatgagttcatcggtgatatgtcgcccagggtgcccgatctggtggcctcggcgccgcgctatgacgatctgaacaagcccagggatttccctcggccggtgtgtgcggccagctcggacccgaatttgatcggcaaggctcctgagcgtcggattccgctgggcacgtacaatggccgggtgatggtctgccagtgctacacgcaacaggtcacgcggatgcacacgacgttcgagttctgcatggacgtggtgaacaacggctatttcgacgacacgcggatgccgccgacctatgccagcggcaacagcacgcgaggcttgatcaccagtccgtcagttgacccggcgacggcgattgagcgagggcgcgcagcgacatcgccgacgccgggggatgcgttctcgacacgagtaaccatcgtgccggacagcagcaggatgcccaggacgctatga

SEQ ID NO: 357515 - DNA, 312 bp, Pseudomonas aeruginosa
gtgcgcaatatcggctatgcccgtttcgccaacggccggccgggccgtcgcgatatccgcatcgagctatacgacggcacggtctatcaccgccgcatcctcaccagcaccgagctggacgccgacaccgagcgcttggccatcgatgccgccctgggccggctggtcgagcctggcgaagtggcgcgcatttgtttcatggcgctctgtagcgccgccaccgacgtggtcgagatcgagcacgtcactgatagcgagggcgtagcaactgccgccctgacgttcaagggagttcgtgacgatgagttttaa

SEQ ID NO: 357516 - DNA, 957 bp, Pseudomonas aeruginosa
atggccaccgaattcggcaccgccgtcaaccacgccgacctggtcgagcgcctggtccagttcctcaccgcgagcccggacctggtcgcagctgggcaggcctacgagaaggttttcgacaacacccttcccgcgtcgggcacggccatcgccgtgcgccaagtgaccctgcgcgcccccggcctgggcggcaccgacagcatcttcatgggcatccagtcctacggcgataccgccttggactactacaacgtccggctcatgggtggcacggcgttcaatcctggagcgatcccgcccagtggcgactactggaccgcgtttgctaactacagcccgcgagttcaggcgctgctgtggaaccagcccatgccgtactggtttttcgccaatggtcgccggttctggatggtcgtaaaggtcagcacgatctacgagtcggccggcgccggcttcatcctgccaccctgtccgccgtcgcagtatccgtacccgcttgccgtcgtgggctcctaccgtggtgacgttgcaactcgctggtcagacgtcagcgaccggcaccggggcatcagcagcccggtggagcgaagctgctatgtccgcgacccggcgggccgttggctgggcttcaccgtcgcatcgaacagcaacaacgaatccgactacaacaatcggaccctgctgccgctgggctgcgcccgctatgcgggtagtagcgacactgtgatcaaccagctccgcgactctttcagcaagttcccgctgaaagctttgcagttcgtcacccgcgaaaccgaggggcgccgctacttgggcgatttcgacggcgccttctacgtgccgacgctcaactccggcgccgaggacgtgattgtcgaggacggagtggaccacgttgttttccaaaccgcctggcgctcgggcaacccctggctctacgcaatcaggaaggactga

SEQ ID NO: 357517 - DNA, 924 bp, Pseudomonas aeruginosa; identical to SEQ ID NO: 356531

SEQ ID NO: 357518 - DNA, 687 bp, Pseudomonas aeruginosa
atgaccaccgtcgcccacgcgcccgcgttgaaaacggtcttactgccgttggagcagcacagataccgcgtaaccccatccgcgccggccgagccagttgttgtctgcgatcccgccgtcagaactgtggtgaagaactcgacgccgtaccttgaaaccgatgtcaaggtgcggcccattgccgtgagaagtgcctgtaccctcgcattgagcgccggccccgtcccgccgttcgtgctgttgtcgaacgagaacttgcccccatctgcgaggatcgcgccgttccagccattgatgaaggtgcttggagtccatgacgttgtgaatatcgtagccagcgggttggctgttgttcccgcgaagcggcccatgtcgggcatcaggttcatgaacggcagaacgttgagcgccgatttcgctgccgatcccaactccgcccaagcgccgctttcgcgggcatatggctttccgtcgctcggcgcgtcggccatcccgcccaccagttccgtccagccactggccccgaactcatacgtcttgacctggccagcaggcgtggcctcgttcgccacctgcacccgccagcccagcctgggcggcatgtactcccaaataggcgtgctcgcaccagtcgcccaccagcgtgcaatgcggttctggttcgcaccgctgccggtaaaaatgtaa

SEQ ID NO: 357519 - DNA, 288 bp, Pseudomonas aeruginosa
atgatgaagcgggttctctacaaaggggcgttcttcactgagtgggacggcccgctggcggccatcgctgaaactgccggggtgagcctggacgatcttacgttccaccctgacgacgcgctggctgaggtccaggagctgcgccggcaggcataccgggaagaggctgacccgctgcgcttggaggccgagtatgacgccatcgctaccggtacagagccggacctgtcggcctgggtcgaagctgtcaaggcgatcaaagaacgctatccgctcccccagtcctaa

SEQ ID NO: 357520 - DNA, 528 bp, Pseudomonas aeruginosa
atgatcacgatgcacatcgagatgatcgcggcgacctggaaggtcggcatgccgaagtggaacggcgtgggaaacgccaccagcgggccttcggtgaccttggagaagtcggccatgccgaggaacaccgcgatgacggtgccgatgaccatcgccaggaggatcgacaggcgcgagatcgaggcgctgccgagcttgctcagcagcagcacgatgaccagggtgattgccgccaggccgatgttggccatgctgccgaagtccggcgcgtggctgttgccgcccatcgcccagcgcgcggcgaccggcatcagggtcaggccgatggtggtgatgacgatgccggtcaccagcggcgggaagaatttggtgatgcgcgaaaagatcggcgtgatcagcaacccgatcagcgaggccgccatcaccgcgccgagcactgcgggaatgccgccgctgccaccgctgccgatgatcgccaccatggtcgccacgccagcgaaggacaccccctggaccagcggcaactga

SEQ ID NO: 357521 - DNA, 402 bp, Pseudomonas aeruginosa
atgaccgcaacagtggaagcaaaaaccagcgaattggctggggcagccttggattgggctgtggctaaggccgatggtgagaaactggttgaggttgaaggcaagcactccgtaatcaccggtttccgtctgaatcctatccatgttccaggtggttacacgccgtccaccgattggaatcagggcggcccgtttatctttgagtaccgcgtgaatttgatcgaggtaaacgaggactgttgggaggcgtgggtttctggtcaagaagatcgacgctaccagggtggcgattgtcctctggttgccatctgtcgtgctgtcgtggcttcgcaactgggcgataccgttatggtaccagaagcacttttcggcacgacagtgactgacagcccaatcatctag

SEQ ID NO: 357522 - DNA, 363 bp, Pseudomonas aeruginosa
atgaaaccttcgcaatggacgcttcgctgggtgacgctctgtggctgcgggatgctggcagcttccgccgccgccgtggagttgccagggactgtacagccatcccagctcgatgaacgcttcaagccccgcagcgagccgcaggccaagcccgaggcgccgctggtggtgcccaagcaggtcgcgccgcaaggcagcgaacagatccgcttcgaactgcgcgagatacgcattgaaggcaacacccgctatgacaaggcggtgctcgagtcctattaccagcatatgctcggcaagcaggtgtccctggccgaactggtcgacctggccaaccgcctcaccgccaagacggctacctgttga

SEQ ID NO: 357523 - DNA, 261 bp, Pseudomonas aeruginosa
atgcctgacatgagagaagagtttgaagcgtggtggaatttgccggcgcaatcggaacttcgcaaatcctgcgcaaggggatgggccgaggtcatctggaaagccagccgcgcggctctgaaggtggagttgccggagcgtgctgttctacctgaatacaccgagcacaggcttctctactgcgagcgcacaggcttcaacgactgccttgagcgcgtgaaagaagccctccagcaagccggaatcgaggtggcgccatga

SEQ ID NO: 357524 - DNA, 615 bp, Pseudomonas aeruginosa
atgaacaacagatctgttctggttagcggagtaggaataaacgacgccgattacacagtaacgataaatgaaacggtctctggtcgaaaaaaacaggtgtgggtttgcccgatttattcgacatggaagcatgttatcgagcgctgctacagcagggagttccagaagagatgtccgacatacgcgggctgtgaggttgttcccgaatggaaagttttctcagggttccggtcatggatgatgacgcaggactacgcagggaagcagctagataaagatcttcttgtccctggaaacaagatatatgggccagacacatgtgtgtttctgccttccgaagtcaactcatttctgaccgaaaacaaatcaagccgaggaccctgggcggtaggtgtttgctggaataagtggcgaaaaaaattccatgcgcgctgcaaaaacccattcagcgggaagactgaaaatctcggttacttcgacagtgaacacgaagctcactcagcatggaaggctagaaagaatgagctggcatgcgagtacgcctcgattgagaaaaaccccatcgtagctcgtgcactgcggactagatacgcaaattcatatttaacttcctaa

SEQ ID NO: 357525 - DNA, 357 bp, Pseudomonas aeruginosa
atgacaacccctatcgtgcaatcgatcagtgatgagcaattggcggagttggaagagtactgccacaagagggcattcgtctgttgtggcaatttcaaatccggggccgaatacatgagcgcgcgcgaggaagtctgctgtaacgagccagtgttgacggatgtaaatatcaacactccagcagaggagatacttggcctgatcgctcgcctgcgcgctgctgaggctgatgccaagcggtatcggtggctgcgcggatttgagagaggcggaatagctgtgcgcgacctcaaatcgcatttgcatgttgagggcctggacgcagccattgatgaagccatggagcacacgccatga

SEQ ID NO: 357526 - DNA, 582 bp, Pseudomonas aeruginosa
atgaaaaggatcatcgcagcagctggtgctggagccttgctagtgagcgcaggagtactggcgagtgagtacaccgtgccccaggagaactgggagttcatgcgcgggtataaatacgattacccaggctgctcagtcagatggcatgagaggactgcgtcattccttgttgcaggcgaaggatgcgagaagatcagcccacagaaaatgagggctgacgcgctcaagtcgattgcgtacgttaagaaaaacagcagcgcctcggacttcgacgactactacgacctggtcgaccaagctaacaagccctatacgattcaggacgccaaccgagacgcccagcagatatggctatccggctgctctgacttcaagagcggcatgaacgccggaaattttcagggatggttgcgcctggatgatgccgagaaagcccatccaggcatcaagaaaactgctgttactaggctctacatggacggctggagggttgcgcatgggctgggcggggtcgtcaattgcaatgatctagccccatatcgcgctgctgattacgtatctggggtcgacatcaggaattga

SEQ ID NO: 357527 - DNA, 684 bp, Pseudomonas aeruginosa
atgagcacactccaagatcgattgcggcaaatcatggccgggcctccgaaaatctcgcaggccgcattggcgcgggcgtgcggtatcaaaccgccatccgtgaatgattggctgtcaggaaaaaccaagaccatcgaagggcagaatctcttgcttgctgcggaattcctgggggtagcgccaaagtggcttgccactggccgcggacctattcgcaagagcgcgggattggctgaagggtccaacgtggaggcggcactgcaacccaccagatcattctcctacccagagataagctgggtgcaggcaggcaccgcaagggaggcggttgagatgggtaacgttgcgctatgccctcagcacacttctgacgtttgggctggggaggatgctttctggcttagggtgatgggcgactcaatgacagtttcgtctggcagcccttcattcccagaggggttccttatcctgatagcgcccgacatcgagccaaggcctgggcagttcgtggtcgccaggatgaccagcaccaacgaagcgactttcaaacagcttgttcgcgatgctggggagctttacctgaagcccctgaactcagcttacccgaccagagctgttgatgacgcatgggagatcgttggtacggtcgtcgacggcaaaatgcccaaatcggtattcctttag

SEQ ID NO: 357528 - DNA, 225 bp, Pseudomonas aeruginosa
atgaaccccagcgcaattatcgaagctctgggcgggacatttcgcgtagccgagctgtgcgaggtgcgcccgccatcggtgagcgattggaaaaagcacggcattcctcgtgcccgaatgatgttcctgcgcgtagctcgcccggaagtctttaaggccctggaggaagaagcccaggaagacgcttcccggcccatcgctagcgcaaataaaaccgccgcctaa

SEQ ID NO: 357529 - DNA, 204 bp, Pseudomonas aeruginosa
atggcctatcaagaccccgcacacaagcgcagcaaagatcgcaaggttcgcttcaacgacaccctggaccgaatcctcggcagggccgcgcagcgcgctcagcgtcagcacgctacctacctgttcgaggtaatcgagtgggcggtggagaacggggtgatcgaggcgctgagcaaggaaggcgaagagtctagcgcggcctga

SEQ ID NO: 357530 - DNA, 612 bp, Pseudomonas aeruginosa
atgagcctatccgccagccagctcaaaccgaagaaatgccagaaccctgcatgcggccaggagttcacccctcgcttcagcagcacgcaaaaggtctgctccccagcctgcgccctggccaccaaggacaagcaccaggctccggccaggaaggccatcgccgaccgcaaccgccgggagatcaaggcgcggaaggagaagctgaagagcagggcggagcacctgaaggaatgccaggccatcttcaaccagtacatccggctccgggacgcggacaagccctgtgtgagctgcggtcgtcccgccacctgggatggccaatggcacgcgtcgcactatcgcagcgtcggttccacgccggccctgcgcttcaacccgctcaacgtgcaccgcgcttgttccatctgcaactcccacctgagcggcaacatcatgggctatcggcccgagctggtgcgccggatcggggaagaggcagtcctggcgctggaagggcctcatgagcccctgaagctgaccatcgaggacatcaaggcactgaaggccaagttccgggcctgggtgcgcgaactgaaggccgctacggaaaactacaggggagagactgcatga

SEQ ID NO: 357531 - DNA, 126 bp, Pseudomonas aeruginosa
atgaagctgcgttgcttgatcttcggatgccagtggaagccggtgacctcctggtggagtgatggagagaagctgcaggtgtgccgctgtgcacgttgcggggcgaacaagacggaggccgtatga

SEQ ID NO: 357532 - DNA, 591 bp, Pseudomonas aeruginosa
atgaagctgaacagcgcgcgacaggcttggcacgactgcctgtacacggcctgggatagccagggctcattcatcgaacagctcggcctgctgggggcgatggtgcagaccacggagcggcagcgccacgcaggtcacgctgcccaccaggtcattgctggtggtgtgcagtcagcgatcgacaagctcaaacctcacgtcaaagcgttcgggaacttcatgtacgcgccgcacctggacgtggacgacaaggaaacttcggaggaggtcgtattcttcatggtccagcagcgttcgccacgcatgactgcggccaagcgcgaaaagcttgaatacgtggtcaagggcgtcatggcccggtaccggtacatgcaccagggcggccagtcggccaatgacgatcccctggagtcgcctgagggcttccgtgcgtggatggtggcccattacgatgtgaagcttgagtcaacaaactgggagcgggattgggccggattcgtccggctggccttcgattgctgtgaggatctggacaaggaggcactgagcccggtagccgccgcaatctacgaaatgaaaagggccgcttga

SEQ ID NO: 357533 - DNA, 312 bp, Pseudomonas aeruginosa
atggcagaaccaacgagcacgactgccggcgtcctgctggtgaagtacggcgtgattattggtggcttcgcaggggcgatcctttccctgacgttcctgcgaggcctcacccggggccaggcggtcgccgccctcttcaccggcttcgcatctgcaatcttctgcaccccgctcgccatcagctacttcaaccttggcaccagcggagaaatccaatacggcgtggcctttctcataggcctactggcaatgaacatcatcccagtcctgaagtcggtggtgagtcagttcggagccaagggggctacctga

SEQ ID NO: 357534 - DNA, 270 bp, Pseudomonas aeruginosa
atgagctctaccctgattccagtcctgatcggcgccaatgccttcctgagcgtgctggtggtgatcgctgcgtgcgactaccttcgccggatcaggccaatggatagcccgctgctggctgtcgcgttctacctagtcgccataggcgcgttcggctcgtttgtcctggccatgagcggccatgtgccaaccctttacggcgtgatcctcaaagcgggggtcgtcctgtacgcagtcgcccggagagggcatgtgttccaggcgggatag

SEQ ID NO: 357535 - DNA, 429 bp, Pseudomonas aeruginosa
atggcattgaccccgaagcaggaggccttctgcctggcctacctggagacgggtaatgccagtgaggcttaccgacagtcgtacagcgcaagtcggatgagcgacaagcaggtgtgggaagaggcgagcaaactgctcaagaaccccaaggtcgcccaaagggtggaagagttgcgtgctccggtacgtgcgaaagcccagttaacgcttgaagggcacttagcgcgtttggatgagctaagccgaaaggccgaagaagatggccagttcagcgctgcgattaccgcagagacgaatcgcggaaaggcggccggcctctacaccgagaaggttgaccacaccagtagcgacgggaccatgagccctgtcacgccacagtcggttgacgcctctctggtcaaggctctggtagacaagctggtggactga

SEQ ID NO: 357536 - DNA, 1551 bp, Pseudomonas aeruginosa
atggctatcaaacctatcgagtgggacgcgctgagccacgctgagcgctccgccttgatagcggctggtgagcacagccctctggccttcacgtctctgtggttcaacatcacccagggcgacagcttccgcaccaactggcaccaccactatttcgactacgccgcccgaaagatgcttgcaggtgaggcgcagaacatcatcgtgaacatccctcctgggggcaccaagaccgagttctggtctgtccacctgccggtctacacgatggtcaagcaccgccgggtgcgtatcctcaacaccagctattccaagaacctggtggacgagaacagcctgcgcagccgcgcgctggtcaagtccgccgagttccgcgagttctaccctctcgaaatcgagaaggacaaagttgacgactggacactggctcgggacgggaagcgtatccaccagctgttcagtcgctcaagtggcggccagatcacgggtgtccgtggcggctacatgggtgatggctacaccggtcacatccaggcggatgactgggacaagatcgacgacctgttcagtgaggcgaagcggcgcaagtcgcacacccgtctcgtgaacaccttgcgcagccggaaggcgcacagcggcacgccgttcgttgccattcagcagcgcgggcacgtcgacgactcgaccgccttcctgctgtctggcggcatgggtctgaagatcgatctgcacatcaagatcccagccctggtcaaccaggagtacatcgacagcctgcccgatggcatccgcgagcgctgcatcaagagcgtgtgcgggtctgaacaggttgacggctactggtcgtactggccggccaaggagagcgttcacgacctgatcgcgctccgcacggctcacccgtacaccttcagcagccagtacatgcaggacccagacacgctggacggcgggatcttctcggctgatgactttcagtactacggcgacgtggatgccggcgcggatctgccggtgccggagaagttcgactaccgcttcgtcaccgccgacaccgcgcagaaaaccaacacctggaacgactggactgtgttcggggagtggggagtggccgagggccgcatctaccgtctgggcctgaagcgcggccggatggatgccaagaccctgcgccgagagttcgaggctttcgtcaaaggctgctgggccaagaacggcaagcagtacggcatcctgcgcaaggtctacgtcgaggacaagtcgagcggtaccggcttgatccaggagatggagaagcgtctaccgctcaaggtgacgcctgtcccgcgtgaccgcgacaagctgacccgggcgctcgacatccagggcttccacgctgccaagctggtgtgcctgccctacgacgacccgcagaactacgagttcgtgtgcgaggtggcctcgttcaccgcggacgacagccacaagcacgacgaccagacagacgtgatgattgacgccctgtccgaggtttacatcaaaggcaagcgctctatccgcgaactcctctga

SEQ ID NO: 357537 - DNA, 1866 bp, Pseudomonas aeruginosa
atgagcaagaagggcttagcgccggccgacaagaagctgggcaaagcccttgtgaaggccgcgaagcagtacgaggcgacgatccggtcttcgtcggatggcctggtcaacgtcgtgtcgggcctcggcacccagaaggccaagcgctcgcacaaccagttccaatacgcattcctgaatgacttccagcagctggacgcggcctatcagaccagctggctggccagggcgattgtcgattaccccgccgaggatatgacccgtgagtggcgcaccctcaagtgcgacgatgcggacgtgatccgagccgaggaagaccgcctgcagctgccggcaatggtcagcgaggcgaccagctgggccaggctgtatggtggggctggcatcctcatgctgaccaatcagccgctggacaagccgctgcgccccgaccgaatcaagaagggcgacctgtaccgcctgctggtggtcgatcgcttcgacatgaccgcgatggaccttaaccagaccaacatcctggccgcgaactacctgcagccggagttctacaccatctccgcaggcgcacagcagatccactggacgcacttcgcccggttcgcgggggccaagctgccgcgccggcagcgggcacagacacagggctggggtgattcagagctgcgcaagtgcctggacgacgtgatggacatcgtcgcgagcaaggacggcattgccgagctgctgcaagaggcgaacgtcgacatcatcacccgtgaaggcctctcggatgagatggcgagcgaccaggacgatgccattaccgcgcgctacgccctgttcagcatgatgaagtccagcatcaacatggcgctgctcgacggtgacgagaagtacgaccgcaagaccctggagctatccggggttgctcctgtgctcgacctgctcatgacctggatcagcggcgcagccggaatcccggtgacccgcctgttcggtgagtctgcaaaaggtctgggcaacaacggcgaaggcgacgacaccaactactacaaccacctttcctcaaggcgtttgacgcagatcgacccaggcctgcgtcagctggatgaggtgctggtccgctcggccaccgggcgctggatcgaggacttcaactacgtctggaacccgttcaagcagcctgacatcgtccagatcgcccaggcgaacaaggccaaggccgaaacggacatcctctacaaggacggcggggttgtgaccaccagccagattcagcgacgcctgcaggccgaagagctctaccagttcgacgacgagaagatcgccgcgctggaggaggacgaggacctggagatgttcaacgatccggtgggtggcggcgatgagggcggcgatagaaagccgtcctctgatgcggcacctgctccactctatgtgttcaggcctgtactgaacgctgacgagcttatcagttgggccaggtcgcaaggcttcacgcagaccctgccggccgacgatttgcacgtgaccgttgcgttcagcaagtcgcctgtcgattggatgaaggccggggaagcgtatagctcgcgtgatgatggcggtgtaactgttcgccctggtggccctcgcatgattgagcaattcggtgagggagctgtcgttctggcgttcaacagctctgacctgtcgtggcggcacatgtcgctgcgggagatcggtgcttcttgggattacccggaatatcagccgcacataaccattacctacaacccgggcgatgttgatgtgagcaaggtcgagccataccgtggacagatcgtgctcggggctgaggtgttcaagccgatcaagctgaactggaaggccgatgtcagcgaggagtaa

SEQ ID NO: 357538 - DNA, 816 bp, Pseudomonas aeruginosa
atggatatgatcggcatccagtacaacgccaagctgcagcggctggtgaagcaggtcaaggcgtcgatcaacaaggaaatcatgcctctggttcgccatcttgcgccggagtacacgcaagacgccgtggcgacgaacgatgcatggtctgacctgatcctcaacgccatgggcttccttttcagcaggtggcgctccgagggtgtcagtgctggcgccaaccgcatcgccggggagttcgtgcagtccgctctcaagaagtccgagcgcgacctgaagaaatctgccggcatcgacgtgttcagtggctccaagcaaatgcaggactacctgcacgcctctgcgcagcagaacgctcagctcatcaagtccatcccggccaagtacctcgaagaggtgcagacgctggtgatggccaacatgcgctccggcatgcgacctggctacatcgagaaggccctgaccgagcagtacggcatcacgcagcgccgcgccagggtcattgcccgcgaccagacaggaaagatccagggcgagctggccgagaaacagcagcaggacgccggcttcgagtatttccagtggatcgactctgaagaccgccgtgtccggcatcgccaccgcgagatcgctgacaaggtaaccgcctacggcaagggcatctaccgctgggacaacctgccactgagcgacaagggcgtccccatcaagcccggctccgactaccagtgccgatgcatcgcccgcccagtgagcgcgcgcgaggtcaaggccaaccaagacgcagggaagaccaatccaggcgtgtatcgataa

SEQ ID NO: 357539 - DNA, 1167 bp, Pseudomonas aeruginosa
atgaagtgcacggtttttgaccgggctgggtaccgcattacccaaagggaatacaccgacgaggggttcctcaaggtgccgggccgcgtggctaggaccgggattcaggagtacctagcccgtgagctgcaactcgacggcgatccgaaccacatcgtccgcgtttaccggccgcccgaagaggtgttcgcccaggcgtcgcttgacacctacgacgccagcgacatcaccaacgaccacccgaaggaactggttaccgcgctgacctacaagggcgtggcggtcggggttgtgcgcggctcaggccggcaagacggagacttcgtggtctgcgacctaatcgtcaaagaccagaagaccatcagtgacatcaacgccggcaagtgcgagatctccgccggctacaccgcagtttacgagcattcgccgggcctcaccgctgacggccaggcctacgactacatccagcgcgacattcggatcaatcacgtcgccatcgtagatagagcgcgggcaggtgccaacgctcgcgttttcgacaccaacccaggaggcaacaagatgcctgtacttatcaccaccgatagcgggcgcagcgttgatgttgctgatcctgcgaacgcccagctggtcgccgactcgttcgaccgcctgctgaagcgtgctactgatgcagaggccaaggtctgccaggcgcaagagtccgccgacaaggcccaggccgccgccgatgctgccaacgagaagctggaagaggcgcgcaaggcgtctggcgacgaagccattgccgcccgcgtgaaggccatcagcaccacccaggagctggcccgcaaggttgccggcgacggcttcacctgcgacagcctggacgtgaccgagatcaagcgcgccgcgatggtcgttgcccgtccgaaggtcgcatggggcgacaagtcggctgcctacgtcgaggccgctttcgacgccgagtccgaaaaggatgaggaggaagaagacggcgacaagggtgacaagaagccgaccggcgatgccgcggtgctccttgcccaactggctcagctggccaaggacggtgcgaccactgtgaccaccgtagacgccaagccgagcgcctaccagcagcacaagcaaaacctcgccaacgctcacaagtctaagggggcctga

SEQ ID NO: 357540 - DNA, 495 bp, Pseudomonas aeruginosa
atgccagttattggtggcaacgcaatcaaccacggcgccgcgtacgcgggcatggtcgccgatggcgagctgtccaacgccgtatcgaaactcaacaagggaaccgccaacatcccgttcggcctgggtgttgtgagcgacggtgacgacggcgccaagctgccgacctcggcatctaccgctgcccagttcatcggcgtggtgaagcgcgaactcaaccgcgcctaccagaccggcgatgccttcggagccgtcgccaagcgcgacatgtccgtcgagaccgtcgctccgatctgggttactgccagcgttgatgtggccaaagatgacccggtctatctggtcgtcggcgacggcaccggtaccaaccagggccagttctccaacgtggtcggcgctgccgccactctggcagtcctgatccccaacgccaaatgggtcagctcggcatcggccggcgcgctggcgaaaatctctctgaaagtcgggggctaa

SEQ ID NO: 357541 - DNA, 1029 bp, Pseudomonas aeruginosa
atgcaacgcaataaaatcaccattgccctggacgctcatatcgagtcgctgggcttcccggcaggccatcaggtcgtattcaatgacggcctgcccaccgttgacgacggcctggcgttctacatcagccagctgaccagcctggaatctcgtatttacgaggccaagtacgccaacatcaactacgccgatctggtcccggtgcaaaccgatctgccagagtgggctgatagctgggactacatcagctacgacggcgttaccctgggcaaattcatcggttccagcgccgacgacctgccgaaggtcaccgtcaatgccagcaagtcgtccgtgccgatcggctacgccggcaacatgtacgactacagcctggacgagctgcgcaagtcgcaaaaactgcgaatcccgctggatatcaccaagggtcgccttgccttccgcggtgctcaggagcacacccagcgcgtggcttacttcggtgatgcggcccgagggatgaccggcctgttcaacaacccgaaccttgccctgtcgaactcgaccctggattggttcgaccctgcaaccaccggcatgcagatcgtcgaggacgtcgacgacttcctgggtgatatctggaccaactcggccactgttcacgtgccgaacgtgctggtgctcgactctgcgcgctggaggctgatcaacagccggccaatgtcgaaagagctgccgaacaccaccatcctgcagtatctgaaggcgaacaacgtttacaccggcctgactggtcgtgagcttcgtgttgagcagcgcctgcagctgtccgccgcccagctggcagccaacggcgtgtccaacggcaacaaggaccgcatgatggcctacgaactgaacgacgagaacttggccatgcaggtgcccattccgtggcgctctctggctccgcagatgcgagggctgatggtagaggtgccttgtgaatacaagtgctccggcgtcgaggttagattcccgttctgcggcgcttaccgcgaccagttctaa

SEQ ID NO: 357542 - DNA, 324 bp, Pseudomonas aeruginosa
atgcacctgaaaaatgaagcggcgcgcttgatcaccattcgtcacatcgttgatggcgcaaaagtgtcctaccagatcctgcctggcgaaaacccggcggtcgaagtacctgatgaggttgccaagactgctttcgtcaaggccttgatccagaacggcgacctgcgccgcgtaggcgccgatgagctgggcgacgaaagcgaagatgacagcgatgacatcgatgtcctgcgcgaacaagcaggccgtgccggcgtcaaggtcaacaagacctggggcgctgcccgcctgcgcgaagaaatcgccaaggtcgccgccgcgtaa

SEQ ID NO: 357543 - DNA, 423 bp, Pseudomonas aeruginosa
atgcaaatcacgccagaaatcgtcgcgtcattccgggcgactcagctcgcgttcacggacaccaccaagtggcctgacgccatcgtacaggaatccctgtgcgaggctgattgcgagaccggaagtagccgctggggcgcgtacgaggatgattgccacaacctaaagcgccgagggctgtactacttcgccgcacactggttgtcggtcacgtatccggccgggcttggcgctaccgatccgacgaacatcccatcgactgcgcgcctaaacgtggccgccaagtcgattggcgatgagtcggtgacgtaccgggtcggagccattcaggaaaccgaaaacgactggctgtccctcaccaactacggcgttcagttcctgcgactgcgccgtcgcgtgggcatgggcgccaaggcggtttaa

SEQ ID NO: 357544 - DNA, 600 bp, Pseudomonas aeruginosa
atgatcaccctcgacattcagggctttcaggaactgcaggacgaactgtccaaggagttggcggcgctgaggtcggacaaggtcgtcactgtcggcatccacgaagaggcaggcaacgtcgagtcgggcgagatcaccatggccggcctgggtgccacccacgagttcggcgctgaggtcaagcacccgggcgggacgtcctacgggtacgccagcaaggccgctgccgaccgcgacgaggttcgattcctcaagaagggagccggatacatggagttgggcgtgaccaaggcccacacgatcaacatccccgcacggccatggcttgagcctggcgttgcaagcgccacgcctgaagtgctgctgaccatccaagacggcatggaggccgggcggtcgatggaccagatcctcgaggccgtcggcgcggtggccgcaggcaaggttaaggtgtacatgaccgacctgaagacgccacccaacgcagcatcgaccatccgcaagaaaggcagcagcaacccgcttattgactccggcgcgatgcgtcagtcggtcacgcacaaggtctcagtcggaccagtaacggagggcctggaatga

SEQ ID NO: 357545 - DNA, 378 bp, Pseudomonas aeruginosa
atgagcagcacgctgagcatggccggtcacgtagacgatacgttcgtcagtgttccggcatcgcgcactgtctcggtggacggtcagtatgtcgaaggcatatgggttcccggcacgaccgatacgaagccctacacggtcaacatccaacaggccagcgaccgtgaagtggatttcatccgccagggtggcgagcgaatcaccgatgtgcgccgcatctacatcaatgacggcgagatgcagttgatcgaccagaccgggacatggacgtttctcggccagcagtggaaggccgtcaagtgcgacaaccgatactggcgcgactactgcaaagtcatcgttatgcgcattgacgaccagtcaggcggcccagcatga

SEQ ID NO: 357546 - DNA, 546 bp, Pseudomonas aeruginosa
atgaccaacgaagaactgttcaagaagctgcgcccgattgtgatgctggcgaccggcgtgcctgagtgcctgctggccgatcagatcggccctggcagcatgcctgcacccaagggagcatacgcaacgatcacgccacggcagtccgtcagcgagcgcggccaagccaacatcgttaagcgggacattcccggcgaccaggtggaagtcgatgttcgagcccagatcatgtgctcgtgcagcgtcaacttctaccgcggtgaagcgatcatgttcgccgagcgcctgaagcaagccaacaagcgcccagacatcagcatgatgctgttcaagtcgaagatcggctggaatagcactgatgcaatcaacaacctgaccagtttgcagtcggccaacttcgagcagcgggcacagatcaccatccgcctgatgtacgaaacgagcagcctgccagcggtaaacaacatcctgagcgccacagtggcactcgagaacgaaaaagcgcaggtcatccagaccttcaccgtggaagtcgatcccacataa

SEQ ID NO: 357547 - DNA, 1143 bp, Pseudomonas aeruginosa
gtgagctatccagctaccaacatcatccggattaatgcccggatcagcccggcaggcctgggcaatgcgaactttgccagcgccatgctgttcgcccctgaagacgaattgcccgtcggctttgccgtggacacgtaccggacctatttcacgcttcccgcgctgtctgaagacttcgccgacaccaccgagacgtacaaggcggctcagcgctggcttggcggcactccggcaacccgccagattcaagtctggggtgcggccaccgccgacgatacccgtgctgccacgctcaacaaggcccggaatatcacctggtggtactggaccatgtggacggcgccgattctggcagtcaaggcggacgtgctggaaatcgcccaatggtgcgaagacaacaccagcatgttcatcaacaaccagaccggtgcatcggcaaccgagatccgtgacccggcttatgttgatgatatcgccacccaattgacgaccgcaggcttccgtcacgtatacaccgctgcgcacgccaccgacccatattccgggtctgcgctggccaagcacttcgccgcggtgaactacagcgccgaccgctcgaccatcaccggcgaattcaagaaatcccctggcgttatcgctgagtcgctgtcaggcacggcctacaccgccatgcagagcgacaagaaaaaggcggttttctataccgtggtggacaaccagggctcgacggattcgggccgctggctgaacacgctgacgcacagcacctacggcgaattcatcgatgatgtgatcaacctcgacgcgtgcgtgaatttcctgaccacgtcgctctataacgcggtcgcgaaccagaccaccaagcttgcccagaccccagtagggcaggccgtgctgatcggcgccgcccgggcaaccatgcagcagttcatcaacaacggctacctgggcccgcgcaactacatcgacccggacgacggactggagaagtacaccgccggcttcgagatcctgaccaagcccgaggacattctcgacttgtccgatgctgaccgtaacgcacgaaaggccgcaccgcttcgtatccgcctgttccgcgccggcgccatccatgtggttgacgttgatcttgacgtttattaa

SEQ ID NO: 357548 - DNA, 408 bp, Pseudomonas aeruginosa
atgtccctgaataatttctcgaacgacctgacagtcgtcaccatcaatggccggcagatccaggactggggcgaaaccgctaccccttacacggacgcgccgatcgaccctcgcagccagttgcgccgggggcagggcgggaatgccgtccgcctcgaccgccagaacccaggccgcgaggtgaacatctacctcaacccaggatcgtccgactcggcatacgtgcagggcctgctgaactcgaacgccaatatcacgctgaccttcacccagatcggtacgctggaaacggcattgggctccgaaggcgtgatcgtgaacgacggccagcgcggccgggccggatctaccatcacggacgaccagttcaccatgcagttcaacatctgggaagcgacaaggggctga

SEQ ID NO: 357549 - DNA, 375 bp, Pseudomonas aeruginosa
atgagcgtgaaatcattcaccatcggcggcgtacagtacaacgccgccatggccagcgccgtcgatcaggaccgcctgatgtcgctcctttccgccgcggtgctcgagcgattcgccactgctgccgctgccggtctggaagtcgatgaaaacgtcctgtgctcgatgttcatgtcgatgcggcaggaggccaaggcgcaagcggcacagatgctcatgggccgcgtgctgatcaacggcacagagcgcacggtatccgtcgctgacttcggcggccgcatggtccagtacaaccagttgctggccgaactgctgcgctggaacctctcggattttttcgattggctgccaagcgccgcaagaaacgctcggtag

SEQ ID NO: 357550 - DNA, 1695 bp, Pseudomonas aeruginosa
atggctagcaaagtcctcaagtcgttcctgatcggcatcggctatgacacccggtccctggaggcgggcgacaagaagatcaacgccagcctgaacggaatcaagtcgggcgccctgggcatctcggcggcgctgatcggcgccttcggtactgctgcgggtgcggtggtaggagtgtccgatcgggtagacaagctggcgatgtcgacccagaacctgcgcacgtccatgagcacggtctacagcttcggcaatgccgtgaagctaatgggcggggatgcgtccgaagcgctggacgccatcaagggtttcgaggagatccagaacagtctgcgcctgaagggcgaggctggcccgattaccgacctggccacggccggtattgacgtcagctcgctctacaagacgcagactggcgaagagttcatgcgagcgctcgcggagatgattccgcgcctcgatgaggggcagcgcgcccaggtgcaaagctcgctcggcctgtccgatggcgttttccgctcactggccggtggtgtcgaaaagctcgacgcagacatgaggcgggccagcgggctcaccggcagcgtcgaccaactgacagacaatgcccggaagcttgccgagaactctagcgagttcggcctgatcattgagggcgtgaagaacgagttggccgagaagttcctgccaagcctggttggcgccggcagcgccctgaacaactttctcaaggaccatcgcgagaacatcagcgacgcggtgagttacgcagccgaaaatcccactgctacggcggcgctgggtgggtccgctatcgcttctctcgccggcgctgcggccgcaaagcttggcctgagcacagttggcggggcagtgagcaaagccggtaccgcgggtgtcgccatcaccggcagcgccgtgggcgccaatctgctcaatagagggctcgacgagcatgttcctggatacagcgaggcatcacgcggctttgatgagtggcttaaaagcgtaactggtttgagcaggattcaaggccctctcgaactgatgtttggcggccaaggtagcactaatagcggggccggtgttccgagccctgaccatgatcaatcgagccaagaacagccgccgcagaacactggtcagggtgtcgggtacaaggatgtcgcgtctccgcagatcgatgacttagcagacaagagcgacggatacaaaaatgttgctaccccgcagatcgatgacttagcagacaagagcgacggatacaaaaatgttgctaccccgcagatcgatgacttagcagacaagagcgacggatacaaaaatgttgctaccccgcagatcgatgacttagcagacaagagcgacggatacaaaaatgttgctaccccgcagatcgatgatttagtcatcgcacaaagggcagccaggcttcgcctgcgtgatgacatctatggcaacagatcagcggccgatagcgcgccaccagttccggaaacaactaccgaggaggatcgccaggcgagtgcagatgcccttgctggtgcgctgagccgcagcccgatcaaggtgaacaacgtggtaggcctgacgatccagttggacggtcgcgagcttgacgcgaggatcattcaggtcaacgaacgccagaactacgagacgctgagcgacctggcaaccacgacggagcgatag

SEQ ID NO: 357551 - DNA, 657 bp, Pseudomonas aeruginosa
ttgagtatcgtcaacatcttcacccgccaggcgccgaccattgccggctattccttcgacgcagtacttgaggattcccttgatgtgtctgtgacggtgacatcgttcccaatcgaatctggggtcaggatctcggaccacaggatcctgaatcccttcaagtggacgatgaccggcgctatcagcaacaacccagtgaagacccagcttaccgatttcgttggcggggcattatcgaacctctcggataacccgttcgtgtcagcggtggccgggctctctgcgggctggctggccggcagcgacgagaccaggggcagcagcacgctttctttcctgatctggctgatgcaatcgtccgacccgttcgacatcgatgctggcgacatcaccctcaagaacatggcgatcacgcgcatttccagaacgaaagagccgcgcaacgagaacggccttgagttcgtggtggagttgcaggagatcattgagttggaccgcatagcccggggtacgcagtgttcagtgtctcagctgcgcgacggtgacccctcacagagcgctttggcgcgcgctgtaagcaagggccaggcgatagcaaaagaggcctctgacagcatctcccaggccgtgaacaacatccttgatggagtcgtgtga

SEQ ID NO: 357552 - DNA, 309 bp, Pseudomonas aeruginosa
atgaacgttatcccgcttcgcgccggagcagccaacgcgcaccagcggttttcagttcagctcggggatagcctcatcgacttcgaggtcgatttcatctcctacctcgatgatccggcctggtctatgaacctgctgcgcgacggcagtcggattgtttcaggggcaatgctggagcctggcagtgatgtgatccagagctatcgggctgggattgggcagctggtgttcaccggaagcgacgtaaccctcgacaacctcgggatcgacaactatctggtctgggtacctcctctggtgagcgcatga

SEQ ID NO: 357553 - DNA, 1416 bp, Pseudomonas aeruginosa
atgagagagcgagcatggtccgttgacatcaacgggcagccctacattaccgatcaggtcgggccaaggcagttccgctgtgtgttcgatatcgatatatcgcctggtgatgcgatctcgttcgccgacattcggctgtacaacatcaataaggagtcggcgatagcgcagggctcgagcatcgttttccgcgccggatacacagataacatcgacgctgtgttcaccggctacgtgacaaacgtgctgagagagcgcgagccaggcgcgccggagatcaccacgcgtctgatctgcaggtcgggccagccagcggttgaccgagcgtctgcgcagatatcgttcggtgtaggagccaggatcgaggaggttctgcgagccctggccagggcatggccactgccaatcgagatcgacaacagccaattcgctgacgcgatgccgcttgcgtcaggcctggtggttgatggcgacatcccatctgccttcacggatctgtcctacgcctacaagtttgactggatgcaggaccgcgggcggatcgtcatcaccaagccaaatcagcctcgcacagcaagcccggtaaaagtagaccagctcagcgggatgatcggcattccagagatatcccggggcccggatggtcttggggtgtttgtctctgtgcagctgaatccgtccatgcgcatcaacggcaagatcaacgtggagagcgaattcgccacgttcaacaccggtaatctctatgtttcggagatcagcggggatgccaacgccaacggcgaatacaacgtctttgccctgaagcactctggcgattcgcacggcgacgtgtggaagaccgagatcgacgggttgcgcgccggcaccacgccgccgctgacacaatcctccacacctgagaacgggaaactgatctggggcgccagggttgaccaggcattccgggtaaagacccgggagattgccgggcggcagtcgatcgacccgaactggctaatggccgtaatgggattcgagactggctacacattcagcccggcggctcgaaacccgggcagttcggcaacaggccttatccagttcatcgaggcgacagcggttggactgggcaccaccacggcgcagcttgcacgcatgacagcggtgcgccagctcgactacgtagagtcctactaccagacctattccggacgcatccgcaacctcggggatgcttacctggccgttctgtggccgatcgcggtagggcgccctgattcctatgtgatgtgggagcgagacaccggcccataccagcgcgagtacgcggccaactccggcctggacgtgaacagggacgggaagattacccgaggcgaggcagttgcctcagtgaataccgcctacatgcgaggtcagcagttcgtccgctga

SEQ ID NO: 357554 - DNA, 708 bp, Pseudomonas aeruginosa
atgcttagaacagagggccgggccaagcaggccaagatgctgcgcgatgcctttcgagaggtgatgaaaggcgtgtgcacatccatcccggggcatgtactcacgttcgacgggaagacccaactggctcaagtccaggtcggggtgatgcgggtggacatcaacggcgcggagttcacggtcccgccaatcatcgaggttccggttcacttcccgggcggtgactactgcgtcgagtaccagatcgatccaggatgcgagggcgacatcctgttctcccagcgctgcatcgacggatgggtgcagagcgggggtatcgccactaacccaattggccgcttccataatatgcaagacgccatgttcttgcctggctttcgatctcagcccaatgcacttccatccttccagaacaatggtgtcaggcttcgcaacaaggctggcacccagtttgtctggctgaagaacgacaacagtatctcgatggataacggggtggccaggttcaacgtgctggccgacggcacaaccctgatgcagaacggcgccggcagctttcagctactggccgatgggtcgttcctgattaacggcctgaagatcacgccggacggcaacgtcatcaccgccgccggcgtaaacctcaatacgcaccgccatagcggtgtaaccccgggctccgggacaagcggagttccagttatatga

SEQ ID NO: 357555 - DNA, 348 bp, Pseudomonas aeruginosa
atgaccgttcgcagactggacgacaacggcgacatcgtgacgcgcgggcagcagttcattaccgggcagtccgaggttgcgcagacggtgctgacccgactgcgcctgttcctgggcgagtacttccgggacatcaccgacggcacgccgtggtacgagcagatactgggcaagttcaccagcctctccactgctgaggcggcgctgagagccaggatcgccaacacgcccggcgtgattcggctcaccagcttctccgctgacttcaacatcgacaaccgcaaatacagcgtaaccgctgggattctcaccgaattcggcctggaagaggtaacactgaatggctag

SEQ ID NO: 357556 - DNA, 1221 bp, Pseudomonas aeruginosa
atggctagcctgacttctaccggctacgtgctgcagacgcaaaacgactggttcgcacaggagcggcagttctacctggacattgatccactatggaacctcgacccatcgacgcccgacggcctgaagatggcccacgactcggagatcttctacgcgctcgatgaaacgctgcagcaggcctacaactcgaaagacccgaacaaggccaagggcaacgacctcgatattgtatgctcgctgactggcaccatccgatcgggcggttctcgctccagcgtgcaactgaccataaccgctactccaggtacaccaatcccgtcgggcaaccgcttcgagtcggtcaccaccggcagccgctggacgactgaccagaccgtgacagctgactccctggggtcggcgaccgtcaacgcgacgtgcacagtcgtcgggcctacccaggctgacgccggcactattacccgcatcgtggacgtggtggcaggcctgtccagcgttacaaacactgcgccggcaacaccaggcactgacggtcagcgcgatgagcagctgcgcgtgactcgggcgacggcagtagggcgccccggtaacaatcagatcgactccacttacggcgagctgtactcggtgcctggcgtgcgccgtgtcaagatttacgagaacgacaccgatagctcggccgtatcagtcgacaaccctcacggcctaccaaggaagtcgtatgcggtgatcgtcgacggcggtaccaatgaagatatcgccatggcgatctatctgaagaagaacccaggcacctttctgtaccaggccgggacaccgttcgaggttgaagtcacgtcacctaaatacccgaccaacaagaagctgatccgcgccagccggcccatctacgtcgacatggtcccagtaatccacgtcgtcaatgacggatcgctcccgccgaacgctgaccagctgatcaaggaggcgatcatggagtatgccgccggcgacctgataccagcagatgttggcttcaagatcgacggcttcgatattggcgagacggttccgttcagcacgatcttcacgcccgtcaacaaggtcatcggctcttacggtgacagctacgttgacctgccttcatccagcctcaacggcggccaggccaatgtcgcaatcgcctacaaccagatgtcccggtggacggagagcaacatcaccgtagtgatcacctga

SEQ ID NO: 357557 - DNA, 642 bp, Pseudomonas aeruginosa
atgaacatcccagaccgcatttacgcgcaataccgcgacaagcccaaggctgtggcctggtacgagatcgccaggaagctcggcgggagcattgaggccgccgcacaggctgtgcgcaagagctacgacatcgacacggcggtaggcgaacagctgaacgttatcggccgcatcgtcgtggcgccgcgtagtttcgtgggctctataccgatgaaccccgctctgtttgatctcacggacggcgatgagtttggtgacgacggcgctatgttcagcgccctggcgattgatcaagacggacagctatcggacgacctttatcgactggtcattaaagccaagattatcaagaacaacggcgatgcgacgattgagagcatcctcgacggcatgaacttcctgctcccgcgggccgatgtcttgcgcgtcaccgacggcgaagatatgtcgttcagcatcgagttttacgggcaaatcaccagccttgagcggtacgcactattgaacgaaggcctggtgccgaagccgcaggcggtgagatttaacggattcctagagggattcggaatgttcgagttcggtgatatggatgccgagttcggtgacgaagacgcagaatttgcaggatatataggggtttaa

SEQ ID NO: 357558 - DNA, 918 bp, Pseudomonas aeruginosa
atggcacttaagttaaacgagcggtatccgggtcgattcaataaccctacctcagattaccctcaaggctcattcaaaaatcgcaccgcacctaatgcaaaagatggatcatatcttgagcaggactgggccaatgataaagagggcttcttccagtctttgatttctgcgtctggattagttccaagcggggtcactgacaaggttggtgcgtctcaatattatgacgctatgcttacggtactttatgcggctgctcgcaagacccctgttttaactgacaccggaaccgctggaatctataaggcggcgaacacgccagcgcttactgaattgccgtccaccggctacatgcagcgcgtgaagattgccaacccgaatccgggggcttcaacctattcgccagacggtcttgccgccaggccaatctatggtcttgggctgcagcctcttcagggtggcgagctgcctgctggggtcgcagttctgatgtatctggtacaggctggggtgaacggcggaaatggtgcatggatcattgttgaatcgctcggcggggcatctcagatccctccagccacgaaaagccagcaagccactccgcttggccaggtgcttggcgcaggcgcgacagcgatttcaagtccgacccgagtcgtcgggactacttacaccaactcgacaagtcgccccctcacagtggtcatttatgcaggcagcggtaacggtaacgggactacaggatcagggtttaaccttttgataaacggcctgatcgctgcagggatgttcgggcctgccaacaacgcgacgtcgatcagcgcaacgatatccgcaattgtcccgcctggagccacatacgttctttccagtaccggcctcaatatgggcgtagtttcaaaatggacggaatattaa

SEQ ID NO: 357559 - DNA, 654 bp, Pseudomonas aeruginosa; identical to SEQ ID NO: 350315

SEQ ID NO: 357560 - DNA, 312 bp, Pseudomonas aeruginosa; identical to SEQ ID NO: 350316

SEQ ID NO: 357561 - DNA, 150 bp, Pseudomonas aeruginosa; identical to SEQ ID NO: 350317

SEQ ID NO: 357562 - DNA, 291 bp, Pseudomonas aeruginosa; identical to SEQ ID NO: 350318

SEQ ID NO: 357563 - DNA, 165 bp, Pseudomonas aeruginosa; identical to SEQ ID NO: 350319

SEQ ID NO: 357564 - DNA, 327 bp, Pseudomonas aeruginosa; identical to SEQ ID NO: 350321

SEQ ID NO: 357565 - DNA, 366 bp, Pseudomonas aeruginosa; identical to SEQ ID NO: 350322

SEQ ID NO: 357566 - DNA, 279 bp, Pseudomonas aeruginosa; identical to SEQ ID NO: 350324

SEQ ID NO: 357567 - DNA, 1020 bp, Pseudomonas aeruginosa; identical to SEQ ID NO: 350325

SEQ ID NO: 357568 - DNA, 228 bp, Pseudomonas aeruginosa; identical to SEQ ID NO: 350326

SEQ ID NO: 357569 - DNA, 213 bp, Pseudomonas aeruginosa; identical to SEQ ID NO: 350327

SEQ ID NO: 357570 - DNA, 390 bp, Pseudomonas aeruginosa; identical to SEQ ID NO: 350328

SEQ ID NO: 357571 - DNA, 2568 bp, Pseudomonas aeruginosa; identical to SEQ ID NO: 350329

SEQ ID NO: 357572 - DNA, 129 bp, Pseudomonas aeruginosa; identical to SEQ ID NO: 350330

SEQ ID NO: 357573 - DNA, 567 bp, Pseudomonas aeruginosa; identical to SEQ ID NO: 350331

SEQ ID NO: 357574 - DNA, 507 bp, Pseudomonas aeruginosa; identical to SEQ ID NO: 350332

SEQ ID NO: 357575 - DNA, 1167 bp, Pseudomonas aeruginosa; identical to SEQ ID NO: 350333

SEQ ID NO: 357576 - DNA, 201 bp, Pseudomonas aeruginosa; identical to SEQ ID NO: 350334

SEQ ID NO: 357577 - DNA, 678 bp, Pseudomonas aeruginosa; identical to SEQ ID NO: 350335

SEQ ID NO: 357578 - DNA, 246 bp, Pseudomonas aeruginosa; identical to SEQ ID NO: 350336

SEQ ID NO: 357579 - DNA, 621 bp, Pseudomonas aeruginosa; identical to SEQ ID NO: 350337

SEQ ID NO: 357580 - DNA, 663 bp, Pseudomonas aeruginosa; identical to SEQ ID NO: 350338

SEQ ID NO: 357581 - DNA, 312 bp, Pseudomonas aeruginosa; identical to SEQ ID NO: 350339

SEQ ID NO: 357582 - DNA, 348 bp, Pseudomonas aeruginosa; identical to SEQ ID NO: 350340

SEQ ID NO: 357583 - DNA, 531 bp, Pseudomonas aeruginosa; identical to SEQ ID NO: 350341

SEQ ID NO: 357584 - DNA, 645 bp, Pseudomonas aeruginosa; identical to SEQ ID NO: 350342

SEQ ID NO: 357585 - DNA, 990 bp, Pseudomonas aeruginosa; identical to SEQ ID NO: 350343

SEQ ID NO: 357586 - DNA, 333 bp, Pseudomonas aeruginosa; identical to SEQ ID NO: 350344

SEQ ID NO: 357587 - DNA, 612 bp, Pseudomonas aeruginosa; identical to SEQ ID NO: 350345

SEQ ID NO: 357588 - DNA, 519 bp, Pseudomonas aeruginosa; identical to SEQ ID NO: 350346

SEQ ID NO: 357589 - DNA, 381 bp, Pseudomonas aeruginosa; identical to SEQ ID NO: 350348

SEQ ID NO: 357590 - DNA, 414 bp, Pseudomonas aeruginosa; identical to SEQ ID NO: 350349

SEQ ID NO: 357591 - DNA, 1875 bp, Pseudomonas aeruginosa; identical to SEQ ID NO: 350350

SEQ ID NO: 357592 - DNA, 1425 bp, Pseudomonas aeruginosa; identical to SEQ ID NO: 350351

SEQ ID NO: 357593 - DNA, 516 bp, Pseudomonas aeruginosa; identical to SEQ ID NO: 350352

SEQ ID NO: 357594 - DNA, 2013 bp, Pseudomonas aeruginosa; identical to SEQ ID NO: 350353

SEQ ID NO: 357595 - DNA, 570 bp, Pseudomonas aeruginosa; identical to SEQ ID NO: 350354

SEQ ID NO: 357596 - DNA, 573 bp, Pseudomonas aeruginosa; identical to SEQ ID NO: 350355

SEQ ID NO: 357597 - DNA, 507 bp, Pseudomonas aeruginosa; identical to SEQ ID NO: 350356

SEQ ID NO: 357598 - DNA, 240 bp, Pseudomonas aeruginosa; identical to SEQ ID NO: 350358

SEQ ID NO: 357599 - DNA, 252 bp, Pseudomonas aeruginosa; identical to SEQ ID NO: 350359

SEQ ID NO: 357600 - DNA, 318 bp, Pseudomonas aeruginosa; identical to SEQ ID NO: 350361

SEQ ID NO: 357601 - DNA, 819 bp, Pseudomonas aeruginosa
atgaccttcgccctcgagatccgccacgctgcgccgacttcgtcggcggctgagtgctgggtcgagctggaagatgctgcgcccctgtcccgccgcccgcgccgcgcctggcgcgtgccggaagtcaccctgcaggatctgcagtggctgcgcgagcgcctgatgttcgccttcctggccccgagcgactaccgcgacgacaggccgccccagaagatcctgggcgcctacgacaccagctgcacccgtgacgcttttccgcgctggcgggccgaggagctggccgagtgcccggccgacggcggccaggccaagcgcctgcccctcgactacgtggccagcctggccatggataccacccgcgtgactgtcagcgagacccgcaagaaaaagaccagctccgacccgctgccgccgagcgccttcgacgacgcgcgcctggtgcgcatcgtggccgcccaggcgtcggcctaccgccactggctgcgctatgcctacgccgactcgaaagagtgggccgacgaggccggcgcagtggtcgagctgtgggcgcgcgtggcccctgggctgggcaagatgcaggccaagacgctggccaaggccaagggcctggcgcacctcgctgtgcagcatggcaagcgctacgcgaacgccggcaccgagctgtactcggccgcccgcctggctgagctgctgggcgttaccacgagcaactacgaccagcactggcgcccccgctggaaggcgctcctcgaggcgctcgagcgcctggacgaggaggccctgcgggcggtgctgcagcagtacaacgacaagtga

SEQ ID NO: 357602 - DNA, 174 bp, Pseudomonas aeruginosa; identical to SEQ ID NO: 350363

SEQ ID NO: 357603 - DNA, 390 bp, Pseudomonas aeruginosa; identical to SEQ ID NO: 350364

SEQ ID NO: 357604 - DNA, 591 bp, Pseudomonas aeruginosa; identical to SEQ ID NO: 350365

SEQ ID NO: 357605 - DNA, 264 bp, Pseudomonas aeruginosa; identical to SEQ ID NO: 350368

SEQ ID NO: 357606 - DNA, 1674 bp, Pseudomonas aeruginosa; identical to SEQ ID NO: 350369

SEQ ID NO: 357607 - DNA, 384 bp, Pseudomonas aeruginosa
atgagtaaggtttctatgctcgaacgttttcaggaagaagtggtgaagcaaggtcgtgacactacgttaccctcaaagttgaatgatttttggcttgatgagctccagaagaattttgagaaactattcgaaagtatcggtaacgatagtggttctgatagcaatggctgcatgtctctagcgctggcagctattattcatatactttttgccaagaatggcgacttggtcatggaggtatcgatggaggatatgttcaggtattttgaagactacagaattgagttggcattggaggcacttcgaagaagaacaagtgtgcaggctgagccagccaccattgaatctattttcactaaccgagaggtttgtatcagtggctaa

SEQ ID NO: 357608 - DNA, 399 bp, Pseudomonas aeruginosa; identical to SEQ ID NO: 331474

SEQ ID NO: 357609 - DNA, 294 bp, Pseudomonas aeruginosa
atgctcagctggatctccacgccacgggccatcgccgcctcctcgctgtcgaagagggtgaagcgccgcaccttggtcacggtcggcgccttcggatcgagggtgtcgaaggagatcccgccggtgatcagggtctgtagcgactcgctcttcacctgcacgccgctgaggttgccggtcaaggtgatcccgctggagttccagaagcgcgtcgaggtattcaccaggtgcgcgtactccggctcgatgtgcacacccaccaccactcgctggcggtcgcgcgacagctggtag

SEQ ID NO: 357610 - DNA, 267 bp, Pseudomonas aeruginosa; identical to SEQ ID NO: 330012

SEQ ID NO: 357611 - DNA, 6336 bp, Pseudomonas aeruginosa
atggataagtatttctctgggctagtcgagcaggcgctttcccgtgccactgagtccaccttgagtatcttgagcattaccgatccggacttgcgtgagcacctggaaagtctgatgcgcgcggagtgcgggaaagagggtgcattcctggcgccacccgtgtttgagcagaccttcagctgggaagagtcggcgttcaccatggagcaactggcgagcaaggagcacttgctgagcaaggagatcgtggcctcgctcgatggcaaggcgaatgggcgttaccgctttggcgcgagttggaaacccttcacccaccagttggccagctggcgctcattgctagagaagaagcattcggtggtcgtcaccagtggtaccggctcgggtaagaccgaatgctttatggtgccggtgctggaggatctttatcgcgagtaccgtgacgcagctcgtcagccgctggtcggggttcgggcgctgttcctgtatccacttaacgccctgatcaactcgcagcgcgaacgtttgaatgcctggactcagagctttggaagcggcattcgctattgcctgtacaacggcaatacaccggagttgcaggcgaatgtgcgcagcgagcagagcctaaagcctaacgaaattctgtcgcgcgagctgatgcgtacgcaaccggcgcctattctggtcaccaacggcaccatgctcgaatacataatggtgcgccaggtcgatgcgcccatcgtaagaatctccagagagcagaaatcgctgcgctggattgttctggacgaggctcacacttacgtgggttcccaggcggctgaattggcattgcagctgcgacgggtgatgacagccttcggcgttacgcctaaggatgtccgctttgtggcgacctctgcgactattgccggtgaggacgctgcaggacagttgaagcagtttctctcggatctgtcgggggggccggttacgcagattgatgtctgggggggtaaccgggtcattcctcctcttgccccctgtcaacaaacgctggttgctctggatacgctcgagtccatgccgcctgtaattgcggacgatccagaggttcatccggatcgatacgaggccctggtccattctccgcaagcccgagcactgagaaatctgctggtgaccacccccaagccgttgaagctaaccgagatggtcagccagatgcgtcaggaaggtgggtggtcactgtcacaggacgaaatactacgttggttggatgtgtgttcaggcactcgtctttcagccagtgagccggcgtttctgaagctgcgggcgcacttcttccagcgcactactcacgggttatgggcctgctttgacaagtgctgctcagcaaagtccggaacggcgctgcaacaaaactggccctttggttatgtctacgccaatcagaggcaaacctgcagctgtggcagcccggtattcgagttggcgttctgcaatgactgcaatgagccgcatctgttggcgcgggataagaacggaaagctgatccagtgggaaagctctggtggcgatgaattttccctgcagactgaaacacctgttgaggaagatgcgggggctggtggctcaggggtactttcagtcaagacaccgctggtgctttgctcgttcgaaaatgccggcagcgcatacatccccgttgaggtcgataagttcgctggttcattcgcagctgtttcagctgaacgggtacggtttggggttagagatcttaatgccaagtgcagccacaacagctgtggatttagtgggctgcacggagcttctcctttccgccgcgcaatgctgggcggacccttctatgtagccaatgccgtgccgacagtccttgaatactgtcaagactatcaagaggaagatcagacgccggagcacggtccgcagtctctgcctggcagaggccgtcggctaattacctttacggacagccgccagggcacggcgcgcatggctgtacgtatgcaacaggaggcggagcgcagcaggttgcgcggacttgtcgtggagattttgagctggcaccagcggagccaggccagctctcaggtagattccagccgcatcgatccgtcggttttgcaacaattaatcgccaaggcgaaagaggaagtagagctataccgcagcgttggtatcaaggaggaagtcagggccgcggaggaaaaagttacacggtttacagccatgctagcttcagcaactggagcgaaagttaggccgacgctagtttctctagcttggtcggagctctccaatgagctcaagcagaaggcagacctgaaaggctcgatgctgctttacaacaagtatcagaagcccgagatatttcgggaccatgatggcccctacaagctggcggaaatgttgctgttccgcgagtttatgcgccgcccgaaacggcagaacagtctggaaacccaagggctggtgaaggtcgcatacgttggcatggataaggtccaagaagtgccggcgtactgggggcagaaaggtctgacgctcgatgattggcgtgacttcctaaaggtggcgctggactttcatgttcgggagaacagctatattcaggtcgatgagggctggttgagttggatcggtagccgtttttctgccaagagtctgcgtaatcccgagtcgaaagaagcggatgagatccgggtcaagcgctggcctcagatccgcaatggcaaccattcccagcgcctgatcaaactattgttgcttggcgctggtttgaacccggctaacacggccgacgttgatctggtcaatgcttggctaagagctgcctggttgcagttggccagaccgggctcagcgctgaaggctgacgaaaaccggtactacctacccagagagcacatgctgttctcgttggttgaccgggcctatgtctgtccagttaccaacaagctgttggataccaccttcaaaggctttacgccttacctacccgctcacctggatttctctcagttgactgaagagcagcgcgagagctatcaggcagagccgattgagctacctgacctgtgggagtttgaccgttctcaggacgactatgcgccgggacttgcgcgagttagaaacctggtggcgaatgatcctcttgtaagcgatctacgagcacggaacctgtggacggatatcaatgatcgggtagtggaaggtggcttctattaccgcacagcggagcactcggcccagcagtcttctgaacgcctcggctcctatgaagagatgttcaagaaggggcagctcaacgttctgaactgctccaccaccatggagatgggcgtagatattggcggtatttctgctgtggtcatgaacaatgtaccaccgcacccggccaactacctgcagcgtgccggtcgcgcggggcgaagcaaggaatccagggcgattacctacacgctttgtaagaacaacccgcatgatcagcaggttttcgccaatccgagttggccgttcgagaccaggatccccgcgccagtggtggcattgaactccgagcgactcgtacaacggcacatcaactcgctactgttggcggactttctctgcaatgtggttgggctcactcagactgagaaaaccagtctgaatacgcagtggttctacgacgatgagcacggtctctcacaatgtgaccgattcattgagcggctgggacaagttgtctccgatctggacgacgcgctcaaagacttggtgaaaggcacagctctggtcggtgtggacccggctcagctgcgccgtcgttcaatcgattcgatcaagccgctgcagagtcgttggctgaagagctatcgcttcttactttctgaggagaagcacgcgaaagccaacagcccctatctgaagcgtctccagattgaaaaggctcgccactgcaatgagtatctgttgcgggatcttgctgcgcgtaccttcctgcctggttatggcttccctaccgacgtggtgaacttcgataacttcacgattgaggattacatccgcgagcaggacgcagggaaaaagttgaagcacgatcgcgaggacaacgtatcccgctacaaggggctgccgtcacgcaatctgtcgattgccattcgcgagtacgctcctggtgcagaaatcgttctggatggccgggtgttcaggtctgccggcgtttccctccactggcataacctcaatgctgatagcaaagaagcgcagaaaatggacattgcgtggcgttgcgatgtctgtggcgctctggactatgaggaggggttgataaagaccgatgagctgacttgcagcaatgtcgactgccagtcactgatcaagccccaaaacattcgcaaggtcctgcagccctctggttttgtcaccgatgcttatgagtcggcctccaatgacatccagcatcagaaattcatcccagttgaaaccgcctgggttttcgtcaacgccaacaagactccattgccaaacccggcggttggggcaatggcttatggtgcggatggaaaggtcttccatcacagctcgggcgagcacggaacaggttatgccttgtgcatgagttgtggtcgagctgagtccatgcaaccggatagcgggttcccgcgagacctgtcgccgtctggcgagcactatccgccacgcccgaccaaagaggacaaagatcagaacaacaagcgccttccctgccagggcagcgggagcattcttcctagtgtgagccttggcgctgtagctactactgatgtgtttgaactcaccttgcaccatcccgtgcgcggggagttcattgcagactcagcgcagggaagtgcaattgccatgacgctagcagtggctttgcgggctgcgctggccgagatactgggcgtatctgcttccgaattgggttatgcaactcggccaagcaaactgccaagtggacagtccattcgcgtccttcagcttttcgacgtaatcagcggtggtgcgggctttgccactagcgcgccgctgcatgtcgaggagctgctgcgggggatggtgaagaagctcgattgcaagcattgtgaaactggctgtagtgagtgcctgctggactcccaaacacggcatgatcacgacaagctggatcgcaaggcagcgctcgactggctgggcccagacttcattcatcacgtgggtttgaccgccgaaaacaaactctcattcgccgatggccagtatgcgcctggcagcattgagagcgttctgcgccggctgatcaacgagggtgcaaagagaattactctagtggcctctggtgatgtggcagagtgggatcttcttgctccacagtttcgtaaggcgattcaggcctatgttctggccgacgagctgactgttgagctgctcgtcccggcagatatcactgatggggttcttgtgcaggatctccagcgcctgtcggaccttggagtaaacgtcgggaatgcgatcactgagccaggtgagcatctcgttgcccaggtgtttaaagagagcgaagttgtcacgctggcctcgcgcagcctcgtggcaactgttccaggccgtagctggcatcaaagtgatgagctagtcgtactctcgaagagtcagccggagtttggctggcaggtgatggacctttccagtgcagcgagcgactccttcggcaaggtagcgatcgtcgacatatcaatccacgaggaactcaatgggtcgctgctgcaattcggtgagcgtttctgggagctgcttggcgctcgagatcagcaagttgctgacgtgattgcgactgcgaagatcaacaggctgacctactcagatcgttacattcagaaccccgcggtagttacgatcctgggtgcggttctgaaagatctgaagagccgcatttctgcggatgcggttgtgcaggtgaagacgctattcaaatcaggtcggctgcaaggtcgtaaagccttcgacgactgggccaatcaggacgatttcgagttcttttcacgcaattggctgtcggcaatggttgggcatcaagttgaactgattgtggagtcgtcgaatcgcgaaatccctcatcaccgtaggttggagcttgagtttgaagacggcaggacgctgaaggtccggttcgaccaaggagtggcctattggcaggttcgctttagctcgcatagcgacatgtggtttgactttgatctggctgcccaggatcaactcatgcacatggccaggatagttgaaaccgcacggatacaaaactctgagcagaagtgggcgacggacgtgttggtcgagctaaagagctaa

SEQ ID NO: 357612 - DNA, 1206 bp, Pseudomonas aeruginosa
gtgaagaatgtccctctaggtgatattgctacattagtccgtggggttggcttttccaaagaggaaggaagcctccttcctctagatgggcatttacctattatcagagctggaagtattcaggaatcactattgctccgtgaagggcaaatctgggtgccagctggcaagataaagagcagtcagaaaattcgcattgatgatattgtgatgtgtacttcttctggaagttctgatctggttggcaagtgtgctcggtcagtggaagattttgatggatcttttggtgctttttgtgctgggataagagctgatcaggaaaaggtgtctccttcatatctgtaccatttcttatgctccccagtatttaagagttggaccagtgcgtcctccggtgcgaatattaaaaacataagagtttctgagctggccgaattccaagtccccctcccacccctacccgaacaaaagcgcatcgccgccatcctcgacaaggccgacgccatccgccgcaaacgccagcaagccatccagctcgccgacgacttcctccgcgccgtatttctggacatgttcggcgacccggtgaccaatccgaaaggattcaaaactaggtttttgggtgacttttacatagatggaaagagtggaaccaaatgcgggccattcggaagtgccttgaagaaagatgaatacacagaaagtggcatacctatatggggtatggataatattactttaagtggtgagtttattgatgcgccttctcaatgggtgagcgaggagaagtatcgagaattggagtcttactctctgtgtcaaggtgatgtaattatttccagagcgggtactgttggtaagatgggtgtggtgcggtctgttagccagtgttcgctgataagtacgaatctcataagggtaaggttcggtgctttgctgctgccagaatatttcgtctctttgatgacctactgcaaggggcgtgttgggcggctgaaagttggccctgacggtgcttttacgcacatgaatgttggtgtcttggatacattagagttcccatatcctccaattcacctgcaggagaagtacttagatgtcaggaggaaggttatcggcgtattaaaaaaggaggggaattccaagaaaagtcttgcttgcacgtttgattcgctgagccaaaaggcattttcaggacagctttag

SEQ ID NO: 357613 - DNA, 474 bp, Pseudomonas aeruginosa
gtgcaattccgtgaacagggcaagaaaatccagtgcatccgctcgacctacgacccggccagcaagcgcagccatcaaaaggtggtggcctcgttcgaccggtgggcggataaattgccatccgttggtctggaggagctgaccgacaccgagcggcaggagttggcggcctggttcgatgcgcggcaagtcaaggcgcgggccaaccggcagcagtggagggtgagcgatgccccccgcgcactgtctgacctggccgaagctatccgcgccgccgataccttggacgctgcgcatgctgccaagatttgggcaggcatggccgacgttgccaaggcgctgcggaaggccgggcacccgaagccgaagcgcgagcgcccggccccggtagccctgcccggtcaggctgatctgctggccgatgccgcagagcctgcccccgccgttttgccccctgcatcgactggcgtatga

SEQ ID NO: 357614 - DNA, 894 bp, Pseudomonas aeruginosa
atggctgaaaacgaggataccaagagcaagcgagatccgctggagtggatcaagcagaaagccgccgaagtggcggcgcaggcagaacagaaggcggcagagacgccgcgccagatgttcctgccgggcatggacgagttcatgcgagccatgccgaaccacatcgccaggtctagcctgttcgcgcctgtggcgcgtgggcggcgcaagatgcacgacggcacgatcttgcagagccgtggagacgctgaaatccggttcagcggtaagcaactggacgaggcgcaagccgatgtctggatgcaagccatgaaggaggcccagcgccagccgctggggacgcccgtggtcatcaatcgcaccgacttcctgcgggcgattggccgcacgaagggcggcgagaactacaaatggctgcaccgcaccatgcaggacttggcccttgccatgctggtgatcgaggtcaagaaggacgacggcaagccgaagctgtccattggcaaaacccgcgccctgcacctgattgcaggcttcgactatgacgaggacagcgaggaatacaccctcacgatagatccacgctggcacgccatgtacggcaaccgggagttcgccctgatcgactgggagaagcgtctggagtttgggcgcaatcaggacatggccaagagtctgcaacggctgctggccacgtcatccaacccggtgcagcggtatgcgctggactggctcaagggcaagatggagtacagcggacggatgcgcgacttccggaacgcactcacccgcgcctgcaccgagctggagcggctggagatcatcaccacccacaagatcgaggacagcaccaagggcaagccgcagcttgccctgtggctccagccatcggcatag

SEQ ID NO: 357615 - DNA, 903 bp, Pseudomonas aeruginosa
gtgggcatccgggatgccaagaccggccagatgatgaaccgggtatggagccgcgaggagcttgcgcagtccgccgcgtggctcaagcggatgaacgccaagggcaacgacgtgtatatccgcccggctggcgagcatggcctagtgctggtcgatgacctcaagccgcaggcgctggagcgcatgaaggcggaaggcttcgcccccgccgcgaccatcgaaaccagccccggcaactatcaggcgtgggtcaagctgtcggataaaccgctatccgcagacgtgcggcgcatcgcggcgcagggactggcgaagcagtacggcggcgacccgaacagcgccgacagccgccactatgggcggctggctggcttcaccaaccagaagccgcagcacgcccgcgacggccgccagccctacgtactggcccacgactgccccggcaaggccgccagagccgcgccagcgtacctagaacgcatcgagcagcacctagacagggcagcggcccagcaagagcgggaaaagcgcctagcggccctagaaacggccaagccgggcggctatggctcgcactatgacccggtgaaggagtaccagcggcaggcgcagcgcctgatgcagcgctacggcaaggaagccgacttctcccggctggactggatgattgccacggacatggcgaaatccgggcgcttcacggcgcaggacatcgagaagggcatccgggaatgctccccgcacgttgagagccgaaaggcgggccacgtcgaggactacgcccgcaggacggcgcaaaaggcatggaatgcgccggaggtgcaggcccaccggcaggagcaggagcgagagcggcaagcacagcgcagccgcgaccgggacggccccggctggagccggtga

SEQ ID NO: 357616 - DNA, 258 bp, Pseudomonas aeruginosa
atggctaagccatatcctaccctgccgatgtccgtcacggacgagctcaacaacctgaacggcgccctggcggcgtatgacctgctcatgagcgcctggatcgaacagggcgactctgcaccggcccatttcgctgctggtgtttcgtaccttctccggcctgtgatcgagggctaccaggacatcgccgaccaggtcgagatgttccgcaagatgggtaccgtctcggtactcaccatccccgacaacgacgactga

SEQ ID NO: 357617 - DNA, 954 bp, Pseudomonas aeruginosa
atggccaaaaagaaaacccccgtaagcactgcgatcttggcggacggcgtgcttacaggggtcgatgaagctgaaaacttcggcgaaagaatagcacgctacgggcagggccgaacaagggcttgcctcatgcgcgattatctccgcgagaatccctcgctcgaagccaccaagacagccgcagcactcgccacctgcggcaattacctgcacttccgggagtacttcaccgtgggcaaggtcaggcttcacaacgcgcagttctgcaagcagcacctggtgtgcccgctctgcgccatccgtcgtggagccaaagccctgggcgcctatctcgcccgctggcaggccatccaggaagaacgccccgacctccggccctacctggtcacgctgaccgtcaagaacggccctgacctggaagagcgtcagacccacctgaccaagtccctgcgcaagctgctcgatcgccgccgcaacttcaacgccggcgttgcacgctcaccctggacggagctctgcaaggccgagggcgccgtttacacgctcgaactcaccaacaagggcaacgggtggcaccctcactgccacatgatcgttttagcggcctctgcgccctctcagagcgatttgagcgccgagtggctgcgtatcactggtgacagcatgatcgtcgacgtgaggcccattacaggcgatccaagcgagggtttcatggaggtgttcaagtacgccgtgaaattctccgatctgacgctcagcgataactggcatgcagcgcaaatcctcaagggcaaacgcctgctcaacagcttcgggctgttccgtggcgtagacattcctgaatcactgctcgatgagcccctggacgagctcccgtactgggatcgcttctaccggttcatgggcggggagtaccagttcacaggcgaaagccccaaagcgcggggtgcctga

SEQ ID NO: 357618 - DNA, 402 bp, Pseudomonas aeruginosa
atggcagaaggtatccgtcgcagtcagcgtgattacacgcaggcttttaagctggcagtggtcgatcaagtcgaaaaaggcgagatgagttacaaggaggctcaggctcgctacggcatccagggccgttcgacggtgctggtgtggttacgcaagcatggccggcaggactggagtcaaggagcctccattcgatccgccaggagcaagccgatgtccgaacccaacctgccactgacgccggagcagcgcatcaaggagctggagcagcagctggaagtcatgagccagaaggcccagttcttcgaggcggtcgtgaatgtactgaagaacgactacggcgtatccgttgtaaaaaagcgtcccggcaagtcctcacgcaaaggcaagtcccagcgctga

SEQ ID NO: 357619 - DNA, 351 bp, Pseudomonas aeruginosa
atggcggcgctggccgacgagacgcggcagacgctggccgagatcgaccgcaagagccgggagcagggcgagacgttcagcgcgcaagtgagcgcagcggccaaggagtggaaggcggcagcagccgaggcgcagaaggcggccgaagccctgaaccaagccgggcagcggatggagtggaggcactacgcgctcgcggcgctgaccggggcgcttacggcggcgctcgtgaccgtattctggctttggctggccccgtccaaggtagagaacctgctggacgcgagagcggtagcggagcacctgaaacccgccgtgatcgaagccttgaagccatccagaggcaggtaa

SEQ ID NO: 357620 - DNA, 180 bp, Pseudomonas aeruginosa
gtgttcgatgccgccgtgcactacgacctcgggcgcctggacagcagcctgaacggcgcgtcgctggcgctcaacgccaccaacctgctggacaaggactacctctccacctgcgacggctactactgctactacggtgacgagcgcagcgtcgtcgccagcgccacctaccggtggtga

SEQ ID NO: 357621 - DNA, 438 bp, Pseudomonas aeruginosa
atgctcaccattaatgctatgtccgccgaggttattgataacctccctgaaagtctaaaggagctggctgtaaattttggaactgacaagataattgagctgataagcaaagttggcgggagaacttactatgtcgccgaaggcaagacggcaaagggacgggaaaaaagaaaccaacttgccgggatagtaggggtagatgtcgaggcgtttattaatgagcgctaccaggggaaagagatttacttccccaggatgaagaggctcgaaacgctcgcccgaaatagtcgaatcaaggcgaaggccgaagagatgttgggcagaggagtgtcgatgagagccatcgttgcccagctggcgaaggagtttagccttagtgagcgaagcctctggactgccctaaagcagccgcttgccccatccggcgaaggcgcttga

SEQ ID NO: 357622 - DNA, 318 bp, Pseudomonas aeruginosa
atgaacgcttccgtgcaacgtattccgcgtattgaacctgaaggctctaacttcaccgccctggatatctctagtcaacattccagcgatgaatcacgctctgctctttacgttcgtgacgatcttccctgtggtgacttgtttgacgcggcagagcggcgccagtgggccgcgcgtagcatgctgaatgcgctggcctggaatgaaatgtcggaagtagaaggcaaccacctggtgggcatcgcccaggcagcaatgctgctcgtgagcgacgccgaaagcctttaccgggctgctcgtcgcgcggcgaagaagtag

SEQ ID NO: 357623 - DNA, 909 bp, Pseudomonas aeruginosa
atgattatcaacgctgaaaatcttgaaactctgtttactgatcttcgcgccgaatatgatgccgcgttcgcggcatctccctcggtctgggaaaggattgccatgagaatcccttccaactcgggggataacctgtatatctggctcagcggatttcccaagatgcgccgttggatcggtgcaaagcacgtgaagaacattgaggcggaaaactaccaactgatcaatgaggatttcgaggcgaccatttcggtgctgcgcaagcatgtcgaggatgacaaagtcggcatctacatgcctcagtccaagatgatgggcttcgctgcctcccagcttcccgacgagttggttttcgaagcggtgaacaatggcttcgcggcgcgttgtcacgacggccagtatttctttgacaccgaccactcggttggagggcagtccgtcagcaacaagggaagcgctgcgctatcgagcgctaacctggccgaagctgaagccagcttcggggcagcgaaactggcgatgcggtcactgagggatgaggaaggccgcccgctgaacgtcacacctaccacgctgctggttggccccgctcttgaagacaccgcgcggcttctgttgagcaacgacaagctggccgacggtagcccgaacccctacaagggcactgctgagttgctggtagatggtcgggttgaatcgcccaccgcctggtacttgctcgacacctcgaaacccatccttcccttcatctaccagccccggagcgagccggagttcgttgcgcaagtcagcgacgagtctgtctcggccttctacctcaatgagtacaagttcggcgtcgaagcgaggggtacgtccggctatggcttctggcagcttgcctatggctccactggcattggcgggtaa

SEQ ID NO: 357624 - DNA, 624 bp, Pseudomonas aeruginosa
atgagcaggtatcctttcgcgagttgtgcctttgagattcgcccgtcaggcagctccatccagttgctcccgtacggcgatttcaaggccattgatgggcggccaacggatgtggcctctggctactggcgcctcactgccgacgttgctgcgcgggtcatatccaaggttgctgcccgagccactgacgtggtcattgattacgagcatcagacgctcaatggcccatcgaatggtttgccagccccggcagccgggtggattaaaggggcctcgctggtgtggcaggacgggcgcggcttattcgcggagaatgtgcagtggacggataaagccgccgcaatgataaaggcacgcgagtaccgttatatctctccggtcttcagctacgaccaccgtactggtgaagttctggatattcatcacgcggcactgactaacttcccggcgctggatggaatggactctcttactagcttggctgccgcacggttcaactctgcaaacaagtttgaggggcacgtcaaggctattgtcgatggcaggttagacagtgctgcggtgagtgcgtgccgcgccctgggcgtctccctggatgactacctgaagacgctaggcggttga

SEQ ID NO: 357625 - DNA, 1455 bp, Pseudomonas aeruginosa
atgcgtaggttattgcttgtcgctcttttgcttttgtccggcaatgtgagcgccgaagatttttactggagaattgcttatccggacgggcaggccaagcataagagcgccgaggctgcgtgtcaggcaaataatgattattacaagagtgactatggctctggttattctcgtattgaggctaggaataagccgatagatgaaactcactggagctgttatgtctatgcgtacaagctcgactctaaaggcgtggaatatcttgcgggtcagcgtggaaataacgccactcgttacggcacggaatgcccggctggtactgaatatgattcctctataggtggttgcaaacagaatgaggatgaaaagtgcaaggaaacttttggcaaggaaataactacagattttcaggttggcgctgtaaaggatggtcattttactaatcctaagtcccctccggcctctctttgccaggattcttgcctgtatacgtctccggcaactacgggctctggaaatggctatcgcttgggtcagaacttcgaggtgtttgttaagtactcataccttggcaatggttcgtcttgtgagcagggcgaaacgcctaatcctccatctgatcgctcgcctagtggttcaactgatgaaaactgcaagccggtggaggatgctgagggtcgtaagaagatgagctgtcttaagacggatagttatcagaatcctggcaatttgaactgtggtatggctaacggtcagcttgtttgcgtgcctgggaagccttcgccgaataagaacgacacaactacaaagactgatattacggagacgacgaatcctgatggctccaaggacactacgacaaccactgaaactacggtcacgacgtgttctggcatgaactcgtgtaatacgaccactaccactagtacgactaacaataagacgaattctgatggcacagacggcggaagctcgacggagtgcaaggggccgggctgcaagccgtcaggggagggcgctggtggcgactctgagggcgaagagaaagaggaggagaaagagtcaaaggtttcgggggatgaatcgtgcgatgcggtgattgcgtgcgagggcgatgcgatccagtgcgcgatgcttaagcaggaaaagaaacagacgtgcgcctgggactatgaaaaggccaaggggacaatcgagtctgagattgccaagcctgagtatcagttaactgagacaaccattaatacaggtgagctattcaatgccggtattagtgcaagccgctggttgccgtccgcttgccctgcgccgaaagttatctcgctgagttccggtcctagccagacgtttagttgggagcctgagtgtcaaatggcatcgtcgttagcgccgattatcgttggcctggcgtcgttgttcttcgcggtttatgtcggacgttccataggaggttga

SEQ ID NO: 357626 - DNA, 207 bp, Pseudomonas aeruginosa
atgcaaaagatgaaacaactcatggttcgtggcggtgtcgttctcggctcgctgggtctgctggctggccaggcgatggctgaagttccggctgaagctacttcggcgttgaccgaggccaaggccgatggtgttgccattggcggcgtcgtcctgggcgtgatcatcgcgattgcggcgttcaagtacattcgccgcgcactctga

SEQ ID NO: 357627 - DNA, 336 bp, Pseudomonas aeruginosa
atggcagtcagcgaaaacctaaggaacctcagagaatccaggggtttgagccaagaacaggtcgccgaactgtgcggccagtcaaagtcatcctggatcaaatgggagcacggcgatgcccagccaggcgctagtaagatcagggagatagcaaaaggccttcaggtatctaccgatgaaatcatcctagagccaggggagcggtcggtcaggcaagacttgcgcaagctcatgcaaaaaatcgaggcgcttccggagcaccgccaggctgagatacggagggcgctaaaaggccatctcatgatcctggagcaggaagagctcgacgaggagtag

SEQ ID NO: 357628 - DNA, 2289 bp, Pseudomonas aeruginosa
atgtccctcgatctcgaaaccaccgccgaccaggctgtgccctcagaaattcccgtccagggcgatctgcccgaagcggaatcttctcttgccctgagccttcaggacttcgtcggcgagttcggcgacgaactgctcgacgcccttaaccatgccaacccgccggtctataacggccagccgcgggcgcaccggcaactcatcgtcgccagcctgaagcgcaagttgttcccggcccaggccgaggtcgtccatgccgccgcagagctgctgattgaccagggcgaacgcgccgtgatcgtcaatggcgagatgggctgcggcaagacgaccgtcggcatcgccacggccgccgtgctcaatgccgaaggctaccgccgcaccctggttctttcgccgccgcaccttgtctacaagtggcggcgtgagatccaggagacggtggcgggcgccaaggtctgggtgctcaacggccccgacaccttggtcaagctcatcaagctgcgcgagcagttgggtgtacagcccacgggccaggagttcttcgtcctggggcgtgtcaggatgcggatgggtttccactggaagcccgtcttcacccggcggcgtaccctccacggcgacgtagcggcctgcacggactgcggcacggtcatcagcgacctcgacggcgagccggtcaacccgatcgcgctcgaagccgaggaataccgcaggaagtgcagccattgcgctgcgcccttgtggacgctgatccgcccacgcagcctgtccggcggcgaccactcctcggccgtgctcaaagccctcaagcgcatcccgaccatcggcgaagtcaccgcacagaagctgatgaaaaagttcggcgacgggttcctggcgtcgatgctgggcgacaatatccatgagttcatcaacctcatggatggcaacggcgagctggtgttttccgaccgtcaggccacacgcatggaacgtgcgatggccaacatggagttcggcttcggcgagggcggctaccaaccgtccgagttcatcaagcgctacctgccgcaaggcacgttcgacttactcattgccgatgaggcgcacgagtacaagaacggtggcagcgcccagggccaggccatgggtgtgctggcagcgaaggctcgcaagaccttgctgctgaccggcacgctgatgggaggctatggggacgacctgttctacctgctgttccgagccctgccagggagaatgatcgaagacggctatcgcccgaccacgagcggcagcatgacctcggccgcgatggcgttcatgcgcgatcacggtgtcctgaaggacatctattccgagagtactggcacggcgcacaagaccgccaaaggcaccaaggtatcggtgcgcacggtcaaaagtccgggcttcggccccaagggcgtcttacgctgcatcctgccgttcacgatcttcctcaagctcaaggacatcggcggcaacgtcctgccaccgtatgacgaggagttccgtgaagtcgcaatggacacggcgcaggccgcggcctaccgcgacctggcgggtcggctgaccgccgagctgaaacaggctctggcgcgacgcgatacgacgctactgggcgtggtgctcaacgtgctgctggcctggccggactgctgcttccggtcggaggccgtggtgcatccgcgcacgcgcaacaccttggcgttcgtcccggctcagttcaacgagttcgaggtgacgccgaaagagcgcgagctgatcgatatctgcaaggaagagaaagcccagggccgcaaggtcctggcctacacggtctataccggaacgcgcgacaccacgtcgcgtctgaaggtgttgctggagcaggaaggcttcaaggtggcggtgctacgcgcaagcgtggatgccagccgccgcgaggactggatcgccgagcagctggaccgtggcatcgacgtgctcatcaccaatcccgagctggtcaagacggggctcgacctgttggagttcccgacgatcgtgttcatgcagtcgggctacaacgtgtactcgctccagcaggcggcacgccgctcctggcgcatcggacagaaacagccggtgcgcgtgatctacctcggctacgccggttcctcgcagatgacctgcctggagcttatggccaagaagatcatggtctcgcagtccacctcaggcgacgtgcccgagtcggggctggatgtcttgaaccaggacggagattctgtagaggtggcacttgcccggcagttggtcgcggcttga

SEQ ID NO: 357629 - DNA, 246 bp, Pseudomonas aeruginosa
atgaacatctaccgccataccttcgttgccgagtgtccagcggacggtgagcagatcatctacagactggagatccgatcgcccaagatgatccgcgtcgagcacatccgtaccgccacggcgctgatcaactgcggtttccacgaagcgattgctgaccagttgcacgagcgctttggcggcgaacagcggatcacggccgtgcaccagggcgtcgaggtcgaaaccgtgaggttgccggcgtga

SEQ ID NO: 357630 - DNA, 228 bp, Pseudomonas aeruginosa; identical to SEQ ID NO: 162946

SEQ ID NO: 357631 - DNA, 1848 bp, Pseudomonas aeruginosa
atgcgagttcggctcgataaagtcgtcatcaatcacttcaagcgaatagagtcacttgaaatcgatttgcaaccagtgaccgcgctggttggcggtaatacgagtggtaaaagcagcgcactgcaggcggcgcaacttggtgtgtcaatcttgcaggctgcgcttcgaggtatccgcgctaatggagtgcctgacttcgctggcaccgtcgccaacgatgccgtgctgttccgcccaactgagcggttgctggacttgaggcgcggcgacagtgcgacgcagaatcttggctactcgatcacctactgcggcgtagatctcgacacaaacgcgaacaagcagataacggtcgagatccgccgcggaaagaacgcgaatattgccattactcgcacgggggatgacgacctcgccgccgtcctggcgaatagtgatcgcccgttctcaatatttacacccggcttatcgggaatcccgatccgcgaagaatggcgtacaaagggggcgatggacgccgcagtcatgcatggtgacgcaaacctctatttacgcaccgtgcttgatcacctcttcacacgcgatctggatgagatggcgaggattgcctggcgtcgcgatcgcgacattagcctcttaccggacagtggatggaagaccttttctcagcttcttgagcgctgctatccaggcacacgcatcatagtaagtcatgatcacctacgagatcgctacgttaaggtcgaggtcaaaacacctgatgccacagtcacgctcgacatggcttcgacagggatgctccaagtcattcagatcatcgcatacgcctgtttctatgcaccgcctctaattctgctggacgaacccgatgcgcacctgcatgccgatagtcaggcgcgcctctacgatgcgctcagaagtgtcgctgccgagacacaaactcgcattttgtttgccagccattcgcctcaactgatccagcgtcttatgtacgatcccgacgcagcagttacatggatgagtgagggcgcaaaggttcctgtcgatgacgctcaacgtcctgcgatccccattctgatgactcttggagcgctatcggccggtgccgacgccttcgatcctgcccggtctgtgatcctgatgacggaagacaaactgccgcgaccagttacggtactggcaaaagcgaacggcgcgcctgataacctcgcagtgctctcctacaacggatgcggaaatcttcctgcagcaaggctccttgcaaacatgatcaccgacatgcgccctgacgctcgcatcatcttgcatcgggatcgagacttccggaccgatcaggagatgcagttcgagctattaactgctgcctcggagcgccaacgcaacggagtgccccgtgtcacagaggtttttacgcctttgaacgacgtcgagcattcgtttgcccaggccgaacatctgaaggaggtctttaacgaacttgcccctgaactaatcgacgccgcgattgtggacgtgaccgcgttcaagcgcgatgaattcgtgaatgcagcacgcgtagctcgtgaacaggtttcgtcatcgctctacgatgttccgcgtaagcgtaagaaaccggagtgggccgagtcaggaatgccagacaaggctccgccggtccatgcgtttgtaccggcaaacggcctgaccccagtctcctttcagcattctcatggaaagatgcttatggacggcctgcgtccgaaaatccatcaccatgtgggaggggcttcgcaggcatcggacagcaggatatataccccgactgaacatcttctgacgccgacttggagggaggcgtttgatcttcagtga

SEQ ID NO: 357632 - DNA, 129 bp, Pseudomonas aeruginosa
atgccgaaccgcatcgacggagaggcccgcgtcggccagggtgacgcggacatcgcaagcgggctgttcgaggaacgccgtgagcagatgcgcaacggtcacctccgcaccgcgctggccaatgcatag

SEQ ID NO: 357633 - DNA, 801 bp, Pseudomonas aeruginosa
  misc_feature (354)..(363): n is a, c, g, or t
atgatccagccagtacttctgcagcctgcgccagtagtagaagtcgacttctcccttccgcccggggtaccactcctggaaatcggtcttgagaacgtgaccctccccctgctgggtaccatatatcgtttccagatgcctgatcaggcgactcgccagctcttcatcaagaatacttgcaagagcagaaacttccttcacatgtgtgtccagaaacccctgaggtactggaaaccgcccctgaatccgtctgtctatctccactcgcagaaagctcaagctagcatcaaagtccattcgacatcccccacttcctggccgtatttttacgaacatagctttccgtataggtcnnnnnnnnnnggtccattggcttgcaaatggctccattacggcaatgaacttcagaaagccctcgatctccggggcaccatcacagtcctgcaggtaattgatcatgcactggtcaaccagcgactcgaactcctcgacagaggtggaacactgattcacccctgcttcggcatctttcagaaacatgtcagtcggaaaataggactcaagcagccggagtaccgcatcgaaatccgcagagaagtccggctgccccaaaagccgggccaccattgggtgctcgcggttcacgcgataacgaatctggccgttctttacgtatcgtcgccagaccgaatggatctcaagccgatccagagcaacacctttattgcgatgtactcgaatcgagcgtcgattgaaacgcctcacaacctcctgcagtctgcgcttcaagactgtgggtag

SEQ ID NO: 357634 - DNA, 165 bp, Pseudomonas aeruginosa
atgcctagcttgaggaatgccgtgctcctctgccctgatgacgaaagcatgaggatctacctgctcgacatcatcccctggaccataggtttgcccgctcacgagcgaacagatgcggtacttgatgccgggctcggcatctccgagagccttgttgggatctga

SEQ ID NO: 357635 - DNA, 258 bp, Pseudomonas aeruginosa
atggctaagccctatcctacccttccgatgtctgtcaccgatgaactggaaagcctcaacggcgccctggcggcgtatgacctgctcatgagcgcctggatcgagcagggcgactgtgctccgaagcatttcgcggccggctgctcgtatttgctgcggccactgatcgagggctatcagagcatcgctgatcaggtcgacatgttccgcaagctgggcacggtctcggtgctcaccatccccgacagtgacgactga

SEQ ID NO: 357636 - DNA, 318 bp, Pseudomonas aeruginosa
atggccaagaagcccgaaaacccgttcgacaactacgtccatcaccgtcttgcgagcattgcaatgagcgaagaagaagaccgccgcgaagccaccaaacagggcgtcaccgtgcgcctgaacccgggcaccgttcggctgctcgatcagctggcgaagaacctggagcagagccgtcaggagctgctggttgagatcatcgagagcggagcgtgcggcattgctgcggcctatgccgaccactctggtgacaaggcccaggacgtctaccgccagctgatgcagctggcccagtaccaggaaggtgaccagcaatga

SEQ ID NO: 357637 - DNA, 1182 bp, Pseudomonas aeruginosa; identical to SEQ ID NO: 162923

SEQ ID NO: 357638 - DNA, 198 bp, Pseudomonas aeruginosa; identical to SEQ ID NO: 331047

SEQ ID NO: 357639 - DNA, 228 bp, Pseudomonas aeruginosa
atggtccaccgggacatggatagcgaggccggccagaacggcatcaccgagatcctgatgaccaagtgccgacacgcgccgccgggcatgtgcctgctccagcagcagggcatgtacggacgattcgtcaacttcgccggcccacgcgagatgagccaagaggaggtcgagatggggcgtagctacttcgccaacaaacacggcaagaaaaaggggaaggccgcatga

SEQ ID NO: 357640 - DNA, 231 bp, Pseudomonas aeruginosa; identical to SEQ ID NO: 326375

SEQ ID NO: 357641 - DNA, 231 bp, Pseudomonas aeruginosa
atgaccacacaaccgaaaccgggccggatcaccaccagccccagcggccgcccggtgatcgccgggccctggccgtcctaccgtcaattccgcgacttgcccgagcgtgaacgctgggtgctctacggccatgccaaggcatgtcgcggtgcgcttgaagcccaggggttccttatggccgagggatacgacgacttcgtgaagcgcattaccgaggagttagacatatga

SEQ ID NO: 357642 - DNA, 222 bp, Pseudomonas aeruginosa
atggcggctggcgagtacccccttatcctggttgagcacgtgcggcgcggtgatgcccagaccactgtcaccgacgatcttgccgccacggttgtccagctgctcagtgaggttcagcgccaccacgccctggctggcaatctcgccgacgctgttgtccacctgccgggccgtgatgtctacgccctggttgccagcgatacggccagcgttattgtttag

SEQ ID NO: 357643 - DNA, 1572 bp, Pseudomonas aeruginosa
atgtaccagagtcagttgctggccagccgaaaattctatggagagttcctggatcgccatatgagtgagctggccaaagcgtacagcgccgatatctataaggcgcaaatcgctatcttgaaacaaacgtctcaagagctggagaataaagcccggtcattggaagcagaagcccagcgagccgctgctgaggtggaggcggactacaaggccaggaaggcaaatgtcgagaaaaaagtgcagtccgagcttgaccaggctgggaatgctttgcctcaactgaccaatccaacgccagagcagtggcttgaacgcgctactcaactggttacgcaggcgatcgccaataagaagaaattgcagactgcaaacaatgccttgattgccaaggcacccaatgcactggagaaacaaaaggcaacctacaacgccgatctcctggtggatgaaatcgccagcctgcaagcccggctggacaagctgaacgccgaaacggcaaggcgcaaggaaatcgctcgtcaagcggcgatcagggctgccaatacttatgccatgccagccaatggcagcgttgtcgccaccgccgcaggccggggtctgatccaggtcgcacaaggcgccgcatcccttgctcaagcgatctccgatgcgattgccgtcctgggccgggtcctggcttcagcaccctcggtgatggccgtgggctttgccagtctgacctactcctcccggactgccgagcaatggcaggaccaaacgcccgatagcgttcgttacgccctgggcatggatgccgctaaattggggcttcccccaagcgtaaacctgaacgcggttgcaaaagccagcggtaccgtcgatctgccgatgcgcctgaccaacgaggcacgaggcaacacgacgaccctttcggtggtcagcaccgatggtgtgagcgttccgaaagccgttccggtccggatggcggcctacaatgccacgacaggcctgtacgaggttacggctccctctacgaccgcagaagcgccgccactgatcctgacctggacgccggcgagtcctccaggaaaccagaacccttcgagtaccactccggtcgtaccgaagccggtgccggtatatgagggggtgaccctcacaccgttgaagaccgagccggagtcctatccgggagtgctactggacctaaacgatctgatcgtgattttcccggcggattctggagtcaaacctgtttatgtaatgctcagtagtcctcttgatagtggtatcttcacacggaggcaactacagaaaaaatttgatagccacaaatatgattttgggctgggtgaaaaaagcgccaacaatggaacgcttgcagagtttagggataaaattcttgagcaccttgctgatcctgcaaccgtagaaaaagggacttaccactccgaagtaaaatcaaaagtacattacaatgccaggactaatattgttgttatcattggagaggatgggatgtttgtttctgggtggaggattgagcctggcacggatcaatacaatttttacatgaaaaatgaggtgctttaa

SEQ ID NO: 357644 - DNA, 204 bp, Pseudomonas aeruginosa
atggatctcaagataatcggattgcaaacgatgaggagccagtgtcaccaccatctgcaatctggaagcgtcatgcatgggactatggcgggccttgagggtttcaaggggaaagacgaatctgtcgccttcagcttcactctcgatcttggaaagaacccgttcaatctcgatcaggctgcgacatttaccaacgtgtactag

SEQ ID NO: 357645 - DNA, 258 bp, Pseudomonas aeruginosa; identical to SEQ ID NO: 354132

SEQ ID NO: 357646 - DNA, 1068 bp, Pseudomonas aeruginosa; identical to SEQ ID NO: 159012

SEQ ID NO: 357647 - DNA, 1323 bp, Pseudomonas aeruginosa
atgagtacccattacattgccggccagtggctggcgggccagggcgagaccctggagtccctcgacccggttggccagggcgtggtctggtccgggcgcggcgctgacgccgcccaggtcgatgccgccgtgcgtgccgcccgcgaggccttcccggcctgggcgcggcgcccgctggagcagcgcatcgagttgctcgagcgcttcgctgcgaccctcaagtcccgcgccgacgagctggcccgggcgatcggcgaggaaaccggcaagccgctgtgggagtcggccaccgaagtgaccagcatggtcaacaaggtggtgatctcggtgcaggcgttccgcgagcgcaccggcgagaagtccggtccgctggccgacgccaccgccgtgctgcggcacaagccgcatggcgtggtggcggtattcggtccctacaatttccccggccacctgcccaacgggcatatcgtcccggcgctgctggccggtaactgcgtggtgttcaagcccagcgagctgaccccgaaggtcgccgagctgacgctcaaggcctggatcgaggccggcctgccggccggcgtgctcaacctggtccagggcggtcgcgaaaccggcgtcgcgctggccgcccaccgtgggctcgacggtctgttcttcaccggctccagtcgcaccggcaacctgctgcacagccagttcggcggccagccgcagaaaatcctggcgctggagatgggcggcaacaacccgctggtggtggaggagggcgctaccctgcgggtcggccgcttcgacgaacagccggcgccgttcatgggcgcggtgatttcgctgagcgccgccgagcacctgctcaaggcccaggagcatttgatcggcaagggcgcacagccgctgctggcgatgacccagccgatcgacggcgccgccctgctgaccccgggcatcctcgacgtcagcgcggtggccgagcgaccggacgaagagttcttcgggccgttgttgcaagtgatccgctactccgatttcgctgcggcgatccgtgaagccaacgccacccagtacggcctggccgccgggctgctgtcggattcccgcgagcgtttcgagcagttcctcgtggaaagccgcgccggcatcgtcaactggaacaagcagctcaccggcgccgccagcagcgcgccgttcggcggtatcggcgcgtccggcaaccaccggccgagcgcctactacgccgccgattactgcgcctatccggtcgcctcgctggaaagccccagcgtgtcccttcctgccaccctgactcccgggatcagcctatga

SEQ ID NO: 357648 - DNA, 534 bp, Pseudomonas aeruginosa
atgcagtacgacggtctggcctgggcattcgcgttactggccttgctggccgccctggtcgcggtgcgcatcctcttcgaacgcacctggttcctcggctggctgcgcggcacctgcggcttggccttcgtcgccgtggcggggctgttgctggtgctcgcctgggacctgcgcagctattcgctgctcaagcccgagcagccgatggccaccctgagcttccaggccgaagggccgcagcgctaccgggtgctgatccaggagggcgccaacgagcgcagcgtggtgctggacggcgaactctggcaactggacgcgcggattttccgctggaagggactggccgcgttgatcggtctggcgccgggctatcgcctcgacgcgctcagcggccgcttcctggccctcgagcagcagtcccggggccgccgcctgggcttgtcgcagagtccgctgggggtctacggcgtcgccgggctgcttgccgagccgatgaacctggcggccgaggaggcgctcagggactggcgctag

SEQ ID NO: 357649 - DNA, 672 bp, Pseudomonas aeruginosa
atgcatatccacgtactcgtcgtcgaagacaacttcgatctcgccggcaccgtcatcgactacctcgaggccgccggggtggtctgcgatcacgcccgcgacggccaggccggcctcaacctggcgcgcgccaaccgctacgacgtgatcctgctggacatcatgctgccgcgcatcaacggccggcaggtctgtcgccagctgcgcgaagccggcctgcagaccccggtactcatgctcaccgccctggataccttgcaggacaagctcgacggcttcgacgccggcgccgacgactatctgctcaagcccttcgaactgccggagctgctggtccgcctgcaagccctcagccggcgccgcagcggccaggcccagcgcctgcaggtcgacgacctggtgatggacctcgacagccgccaggccagccgcggcggcacgcccctggcgctgtcccccaccgcctggaagatcctcgagtgcctgatgcgcgccagccccgcgctggtcacccgcgagcagctggggcgcagcgtctggggcgacgagccgccggaaagcaacaccctcaacgtgcacatgcaccacctgcgcagcaccgtcgacaaggggttcgccacccctctgatccataccctgcacagcgtcggcttccagctggagcgcaaatga

SEQ ID NO: 357650 - DNA, 600 bp, Pseudomonas aeruginosa; identical to SEQ ID NO: 199320

SEQ ID NO: 357651 - DNA, 1995 bp, Pseudomonas aeruginosa
atgactgaccgccgcgatgacgatttccgcgtgcgccccagcgccccgaagaaccggggcaagggccaaggccagagcttcgtttccaaggtgctcaagcaggcaggcaaggccagcagcggcaagtccacgatgcgccgtcctggcgcgacgggtggcacgggccagcggcccggctcgcgactggggcgcggctacacagcggcgcgcttcgccggggcgaagctgacgcccatgtctcggcgcgtgaccatcaagacgctgttggtgaatcaccagcgggccagcccgcagtcgctcgccaagcacctgcactacatcgagcgcgacggcgtgggccgcgacggcgagccgggccaagcctacgggccgcagaccgacgtggccgacctcgacgccttcaaggaacgctgcgccgacgaccggcaccatttccgcttcatcctctcgcccgaggatggcgcggagctggaagacctgcgtacctacacgcggcatctcatgggccgcatggaggccgacctgggcacggacctcgattgggtggcggtcaaccactggaacaccgacaacccgcacacgcacatcgtcgtgcgcgggcgcgacgacacgggcaaagacctcatcatcgcgggcgactacattgccgatggcttccgccatcgcgccgccgaactggcgaccgaatggctggggccgcgcaccgagctggagatccagcagaccttgcagcacgaggtagagcaagagcggtggacgagcctggatcgcaccttgaagcgcgaggccggcgacgatggcctggtgcatgtcgaacggctcaacgaaccccgcctgcaacgccagcgcctgctgctgatcggccgcctgcaacgcttgcagcgcctgggcctggccgacgagacgcagcccggcacctgggccgtgcatgccgatgcggaaaagaccctgcgcgccctgggcgagcgcggcgacatcatccgcaccatgcagcgggccatgcgcggcgagccgcgcgagctggcggtgttcgagccagggcaggacgcggatggaagtggccgcagcatcctcgggcgcgtggccgcgaaaggactggccgacgaactgcgtgatcggggctatctggtcatcgacggcgtggacggcaaggcgcactacgtcgcgctcaacgcccacgacgagctggcgaattacccgaccggcgccgtggtggaggtcaagggatcggccgacgtgcgcgcggccgacaagaacatcgccgcgctggcgagcgatggcctgtaccgcaccgaccatcacctcgccatcgcgcagggccaggccgtgcccggccgcgacccgcaggaggtcgtggcggcccacgtccgcaggctggaagccctgcgccgggcgggcatcgtggagcgggtggccgaggggctatggaaggtgccgggcgacctgcccgagcagggccgccgctacgacgcgcaacgcctgggcggcgtagccgtggagctgaaatcgcacctgcccatcgagcggcaggcccgcgtgatcggggccacctggctcgaccagcagttgatcggcggcggctccggcctgggcgacctgggctttggcggtgaggccaagcaggcgatgcagcagcgcgccgacttcctggccgaacaggggctggccgagcggcgcgggcagcgcgtgatcctggcgcgcaacctgctgggcacgctgcgcaaccgggaactggcgcagtccgccaaggacattgccgccgacaccggcctggagcatcgacccgtggccgacgggcagcgcgtggccggcatctaccggcgcagcgtcatgcttgccagcgggcgctacgcgatgctggatgacggcatgggatttagcctcgtgccgtggcggccggtgatcgagcagcgcttggggcagcaaatcgccgcaacggtgcgcggcgggcaggtgtcctggaggtggggacggcaactcggcccaacaatttag

SEQ ID NO: 357652 - DNA, 618 bp, Pseudomonas aeruginosa
atggcagcgcctgccatcgcgcccgcgccgagctgcgggccacccgacaccagcccggccgcaatgcctggcccgaagatgcccagcgccagcagggtcagcgaggccagcatgacaacgaccgaatggtcgatggatggctcggccggctgcacctggaactcggcgaacaggcccgagccaatgcccacgatgacggccagcaccagcaccttgatgcccgaggacaccacgttgcccagcaccttttctgccaggaacgcggtcttgttccacagcgcgaacggcaccagcacgaagcccgcgagcgtggtcagcttgaactcgatcagcgtgatgaaaagctggatcgccagcacgaagaagcacagcaggacgatcagccaggcgaggaacatcacgacgatgggcgtgatgttcacgaacacctcaggaaatcccgccatgtcgccgatctgcttgaggatcggcgccccggcgtcgatgccgaccttggccagcctgcccggttgcaggaagttctccatgctcagggtcgagccgctggcggtcaggcccaggcccgcgaacgaacggaacacgatgccggccagccagttgaagttgccgatgatgtag

SEQ ID NO: 357653 - DNA, 720 bp, Pseudomonas aeruginosa
atgtatagcaaggcgcaagcgcagaactcccaggagcaactgatccagcgttacgcaccactggtcaagcgcatcgcctatcacctgctcggccgcctgccggccagcgtgcaggtggaggacctgatgcaggccggcatgatcggcctgctcgaggccgcgaagaaatacgacgccggcaagggcgccagcttcgagacctatgccggcatccgcatccgcggggccatgctcgacgaggtccgcaagggcgactgggcgccgcgttcggtgcaccgcaacacgcgcatggtgaccgacgcgatccgcgcgatcgaggcgagaaccggacgcgacgctaaagatcacgaagttgctgccgaactccaattgagcctcgaagattactacggcatcctcagcgacacgcagggcagccgcctgtacagcttcgacgacctgttgcaggacggcgaacatggattgccggaagacaccagcctcagtcacaacgaaccgatccacggcctgctcgacgaacgtttccaggcggccctggcggatgccatcgccaagttgccggagcgcgagcgcctggtgctggcgttgtattacgacgaggaactcaacctcaaggagatcggcgaggtactgggcgtcagcgaatcgcgggtcagccagttgcacagccagtgcgccgcgcgtttgcgtgcgcgcctggccgattggcggtcggcctga

SEQ ID NO: 357654 - DNA, 1146 bp, Pseudomonas aeruginosa
ttgaacttgcccttgccgtgcagttcgtcgagcagcgactcgaactcgtcgtcgctgatctcatcgccgcccgcggcggccggcgccttgcccggctccgccggcgcagccgctggagccgcggcagccggtgcggcgggtgtgccggcggcttccgggacatcgccgaacttgcccttgccgtgcagttcgtcgagcagcgcctcgaactcgtcgtcgctgatatcgtcaccagcggcagccgcggccggctcgaccgcctcggcggggacttgcgcaggctcggccgagaccgccggcgggacgaacttgcccttgccgtgcaactggtcgagcaacgcctcgaactcggcgtcgctgatctcgtcgccagcgggagccgcgggcgcttctgcaacggcggaggccggcgcttcgtcgccctggagagcatccagcaactgctcgaactcgtcgtcggtgatatcgctggagccactctgcgcgggcgcttccggcggcgccgcaggctcggctggcggaacggccgctggcggcgcttgcacaggttccgcgggcgcggcgccctcgggctcggccaggcgggcaagggccgccagcagttcgggcgtcgccggggtcggttcggactgctcgcgcacctggtcgaacatcgcgttgaccgtatccagcgcctgcagcaccacatccatcagttcggagctgacgcgccgctcgcccttgcgcaggatatcgaagacgttttccgcaatgtggcagcattccaccagcgcgttcagctggaggaagccggcaccgcccttgaccgtatggaacccacggaaaatggcattgagcaggtccatgtcgtccggccggctctccagctcgaccagttgctcggacaattgctcgagaatctcgccggcctcaaccaggaagtcctggaggatttcttcatcggcgtcgaagctcattcggctgctcccagagacgtgttactcgaaaggatcggcaggaccgctgtcctgccggaaataccggcccggctttccggaccgacttcagcccgcccgccgggatcaccggcatgacgaaggctgtgccggcagcccgcggatgccagcgttcaatgcttacttaacggcagcgatgccgcagtcttga

SEQ ID NO: 357655 - DNA, 258 bp, Pseudomonas aeruginosa
atggtgcagccgttgccgctgaaacaggtgccgatcaggttctggtcggcggccaggccgaaggaagccgggttggccatgccttccttgagcagcagcgggatgttcaacggaatgacgttggcgccggcctggctcaactgggcggtcagctcggcgttgaacgtgccgctgagttggctggcgaaaggctgcaagggaccaccgaaggtagccggggtcaggcccaggtcgggcaacagccagaccacgatgtag

SEQ ID NO: 357656 - DNA, 915 bp, Pseudomonas aeruginosa
atgcaccacggcagccagcgcggcttgcgggtgccgggcgacttcgatttgcagcgcggcggtgcggtgggcgctcaaccgctgcgccagccggtcagacatggcggcgatcttgggctgttcgtcgtcctcgccttcgtcgtcgtttccggcttcgccttcgccgccgaaaccctgccgcaagcgttccagcgtgcgcagcgccttggcttcggcctcacgcatcaggccgcgatgaatcacggtttcgccgttgcggtcgatggtgacgatagccccggctgcggccttcacgttcggactgtagtcctgcaagccatcttcaagcgcctgcaattgctcgcccacggcttcgccttcctcttgcagcgcgtcggccttgtcctcgtcctcggcgtccagcgcggcatccacggcttcggccagttcgtgcagcttggcttgcagcttctcgatgcgtgcggcttcgcgcttgttcggttcgcggcgctccttcggtgcgcgttggaaggcgtgcaggtcggaatgggtcattcccggcgtggcatccacccatgcccaaccttcggcgcgaacattggcggcaatgcctgccagccggtcttgcgccagccgttccagcaacgcggcatcggtcagatacacgcctgcgtcatcttcggcgaacaggtcacggcggatgccgccgcctgcggcttcgtagctgtccagcccgacgaagcgcaccagcggatgccggtaggcgtcgatttcccgttcggtcaggcgttcgcgcaagtgcgagggatggcgctgccattgcggggcatcgtagaacgcggcttcctgcgcggcgtgatcgtcggtgatggcaagggccatcaactggtcaaggctcacggcatcggcgcgatagtcggccatcaatcgcggtga

SEQ ID NO: 357657 - DNA, 2067 bp, Pseudomonas aeruginosa; identical to SEQ ID NO: 161438

SEQ ID NO: 357658 - DNA, 159 bp, Pseudomonas aeruginosa; identical to SEQ ID NO: 345635

SEQ ID NO: 357659 - DNA, 192 bp, Pseudomonas aeruginosa; identical to SEQ ID NO: 344151

SEQ ID NO: 357660 - DNA, 1296 bp, Pseudomonas aeruginosa
ttgctcgacaaactgcatctgttcgtcccgttccgcctcgagcacatcgaactgctcggggtggaagggcgtgcggatccggtgcacgtcgtggatctggaaagcctgggcgtgccgctccaagggcagatcagccgaggggagggcggagagctacaggcggattacttgcggcacacctgggagtcactgagtacgggcttcacgcctttggcgttcaaggtgtttcaccagtccttgggtaagcgcctgatgcccggtgtagagctgaaggccagcccggcgaagttgctccaggggcacaacgtgtttggcccaacctgcatccagaagggggccgaggtgatgttcaagtggctagccggaagctacccggacctcttcgcgaagctcgatgtgtcagcgacgcaggtctacaccctggactgcacgtattccagccggctgccggacgaacgcacggcgctccaggtcatccaggcgctgaccaacgtcagcaacggccacaccaagagtcgcggcgacaactaccagacgtccgcgtactggggcgcgaaagaatcccgcctaaagcgcctgaaggcgtatctcaagcacaccgagtttcaggcccagttggacgaattgaagcgggcagggcgggccgatctgtcggctgctcggtctgctcgggtcatgtctgacccacggttgcaggagtgggtgcgctacctgctccgcatggaggccacggtaatgcaccggtggctggaacgccggggcatcccgtctcggcttgttgatctgatcgcctaccagcagcggctccagaaagaggggcgctgcctgattcaggagtgctggcaagcggttacagcggaccttttcgcggcctttgagggtatccagatgcgtgtgattgatgatgaaaaagtgctggccgcactgctcgaaaagcacaccaaggaaggtaaggggaagtggaccaaggccaaggtcgatccctccactggggtgacaattcctccggtgtttgttcccggcaagcctaacgatagctatgccctgaatctctttcgcacataccgaagcctcaaggactacgggtgggaagagaccatggcgtctatggctcgccgaaccttctacgaccatatccgggacatctgcgctgcgggcctgtcgaaagccgccctgcagaagctccacgaagcggaccgggcgaacaacgtcgtaccgctgctgcggttcgtccaggtcgatttcagcgcccagcgccccgactggtacgtcgagccgaccgtggaggccgcgtga

SEQ ID NO: 357661 - DNA, 558 bp, Pseudomonas aeruginosa
atgaatgcatccgccttgcctgccgctcacgcggcgacggctgcaccggctgctgcgccgccgccttcgctttcgacgctcgccggccaggccggcagcgtgccgctgactcgcgtatcgctcgcctacatcgaaccgcgcttcaagctctacctgcgtttcggcgaaccggcgcgcacgttgcggctcgaccgctggcggcgctgcgcggtgttcctgccgcgtgcaatgttctgccgcgtgcgctgggaagcaaacgactacggcacgatccgctggcagctcatggtgatgcaagccgccacgccgctggacgacatgcagcgcatccctggcgtgcggccgggcgcacgcctgctgctgcacgccgaaggcgaaaacgcagtgcgtgccgcgctggaacgcatcgacaacatcgacgcgcagggtatcgccgccatcgacgtgtcgcccgcgtactggcgcacgctgggcaaccgtctggcggcccgcctggcgctgcccgaatacaccgccgaacggcacgccgcctggctcgctggaaaggcgctgccatga

SEQ ID NO: 357662 - DNA, 273 bp, Pseudomonas aeruginosa; identical to SEQ ID NO: 357064

SEQ ID NO: 357663 - DNA, 219 bp, Pseudomonas aeruginosa
gtgctgatgcatgaattcagcggctccagcgccgagctggtgtcctacgacagcgccacctgcaaggtggtgcaccgcgaggacatctccggccagcgctgggcggtggacaaggacgggctgcgcctgggagagaaatgctcgggcgaatccgtcgacagctgcgcgaagatcgtgaagcgttcgctcacgccgttctgccagaccgcaaagaaatga

SEQ ID NO: 357664 - DNA, 1623 bp, Pseudomonas aeruginosa; identical to SEQ ID NO: 327640

SEQ ID NO: 357665 - DNA, 2727 bp, Pseudomonas aeruginosa; identical to SEQ ID NO: 346669

SEQ ID NO: 357666 - DNA, 756 bp, Pseudomonas aeruginosa
atgataagagagaaattgagcacgcagaagtcaaaaggagaaacacaaaacacccttggatatgctttgaagaaatcagcccttatagagagcaacagacttcaaacaggaacaacgcaagaatttatagagtttctagccaagaaattcgataaggcttgcaaaggcaagcagcaaaataccagttttcacgaaatggtatcttttgacccatccgacaaaatcacacccgaacaagctcttgccatagcaaaagaactttattcagatactcacggattaaaccgtgagcacgcttttgctgtccatacagacactaaacaaatccatgtccactttgtatgggcacccagagacttcaataataaaatatataatcaagttgatgattacagaattattgaagctaaattgactgagcttgaacataagcacaatctatttaaagtcgaaaataggaaatctttaaaccctgacttagaaacaaaaccaccagagagcaaccacgaaaaagctcttgaagtaagaggtatcaaatcacataaaaaacaattcaagtctcaaattgaaaaagctttcattggtgcaaccacaacaacggctttccttgctaaccttcacaagcaagggtttgacattatcccgaatggacagaactcctattcattagaaaaagaaggccaaacgttcaaggccagtgagttgggtattcaacactcgaaactaaaaaacaagcttcttcatgtcagttgttag

SEQ ID NO: 357667 - DNA, 1092 bp, Pseudomonas aeruginosa
atgagcatggaaatgaacaaagcgctggacctgctgcgcgaaatccgcccgagcattccgaaggaagtgttagagctttggtgcaaggaccgcgatgcattcctagcatcgcatcctgcggtagagcaggcaggcggggatgagcgcgacttccaggcagagggcgcacaggaggttccatcgccagtctcacaagagtatgaccgacatttgatcagtcttttgcgtaaaggtgaggcacttcctggccaccaggaggaggccgctgacgagatcgagcgcctgcgcgattggaatgatcacctgaacaacaccgttctacccaacatactcaatccaactttcctgatgctcatgaagggcggcgagaggctgcttgacctgtgcacgaaggacggcgaattcattggcgtatcgctgaatgacatgaaggacgtgtttgattggatggtcacgcacgctcgaattgcacctgatcaagccgccctggcgcaaccctccccagcgcagactcaaccctctccggccccaaccctgcgtgccgccattgatgtagccaacgaccggttcgaagtgcctgtagcgaagtgggggaccgacctggtaggggaagaggagcggccggaggtagcagaagtcgcgttcgtcctgcgcaacatcggcgctatggacgctgaagacatcgacggcgacaacgttgatctgcgcttcgaggatgccgaaggccgcgatacagggtgcgacgtttccatcgtcgagtacgccgagaaagccgctgacctattcgaacagcacgaccgcatcgtcggggagctgcgagcggatcgcgattcgtgggcagagcaggcagagcagcgcctcgcggactgggatgaaatgcgtaaagagcgcgacgccgccctggccgaagtcgagcgcctgcgccagttcgagcgcatctgcgaagggctgccgcaagacgccatcgatggtggctggaccgtgcaaggcattcgcggctatgccaagcacttggaggatcaactgaaagtcgccctggccagggtcgcggagctggagaagcaggagcggccggaggtgccagatgaatga

SEQ ID NO: 357668 - DNA, 183 bp, Pseudomonas aeruginosa; identical to SEQ ID NO: 350859

SEQ ID NO: 357669 - DNA, 210 bp, Pseudomonas aeruginosa
atgaaattaatactagtggctagcggaaagaaagaagtcttaaagtctattaaaaaatttggcatagatggtatgtatgagaatattaagagcatacacaatgatagcgagtgcgacttattttatgataccgttgacggcgaatttaaagccttggtagaccaaagtaaggttccttatgagtattgggacaactgcttaaaggtctaa

SEQ ID NO: 357670 - DNA, 1584 bp, Pseudomonas aeruginosa
atgatatttattccgcatcgcataacacttgaaaatctcactgctaaattattctttgcagaatgcgaggcacagtatgtttatgagcgagctatcgaaaagaaactgacttcgaaggaatattatcaaaacaagttaaacaattcatcagaaagaaaccataaagcattagtcaaagaaatacgaaatcttgagcaaaaaaagacttgggttgcaaattgcgaagaatataaatgttggaagatacagcataaatatgctctcgatggcgatttgaacgaaatcgtcaaaaatatcacgtttgttttcaagagaattcaagaaaatctcattattaagaaaagaaatctcaaaaatgacgagtgcggcgaaaacgtgctctcacatataaatcataactggaatattggctacaacatcaaaattaaagatatcaaagggtcaactataaaagacaagctaatcaatattactgatgagaaaaagctcaaatcacaaataaaaaggatacaaaagcaacgaagcgaactttcaaagatgcactcaggtttaattggttcgggtcaagcatatgagatttgtagtgatgaagttgttcgcaatagagaaactgacgaacaaaaacaatatgaatacatattgagcaaatacgttgtctatgcaaacaacaagaaaatcccgctatcaaaagtagcaagcactgaaaaacaaagatttgctgagatatatattcaagttatgtcattagacgcatacgcaaagagacttgactacaagcctcttttcataacttttaccgctccggcaaggtttcacccaatgccgtcaaaaggcgttagttcttgggatggttcaacgccaaaagaaagcaatgactatttaaaaggtttgtggaatgcttttagaaaagacatccatagacataagattgagatgaatggtttctgggctgtcgagccacacaaagaccaatgttttcacaagcacgctttaatgtatgtaaacaaaaagcattttgacgaattagtcatattgattaacaaacattttaggcattctgaaaatgccgttagaattgaagaaattgacacaaagaaaagcaaggcaacatcatacgtgatgaaatatctaactaagtcattcaatatggatttcgagttgaagggcggcgttctaaatatagataagttggaaatttcaaatcacaaaaaagttagagctgttcaagctttgtggggtgtgcgtagatatgcaatgttcggcgttaaaaacacgctttcattatggagagaattaaaaagaaaaccattttttaaaggtaaaaatgaaaaccttgataaagcattcatgtttattgagaaaaacgactttattggcttctcgatgtttgttaatggaaagctaaaaataatgagggtcttcaatgaaatacaaatcatgaaagatgatttgctgggcgatgtatttggaaaaagtctagcaggtaaatacataattgatttggtgactgatgaagtaattgatatcaaatcaacttgcaagatagtagatgtttcattgtttgatactgcagccggaaaataa

SEQ ID NO: 357671 - DNA, 666 bp, Pseudomonas aeruginosa
atgcagcccacctcgcccacccgcaagccccgcgccagcagccaggcccggatcgccgcgatcctcgacgccgctcgcggcctgctcgccgacgaaggcatcggcggcctgaccatctatagcgtggccgaacgcgcggaaatgccaccatcgtcggtctaccacttcttccccagcgtgccggccctgctccaggggctgaccggcgaggtccacgccgccttccgcgcgtgcctcgaacagccggtggaccatgcaggcctgcgctgctggcgcgacctgtcgcggatcgtcgaggagcgcatgctggcggtctacgcccgcgacgcggcggcccgccaactgattctcgccagccacggcctggccgaagtcacccaggccgatcgccaacatgacgtgcaactcggccaggccatgcgcgccctgttcgagcggcatttcctgctgcctccgctgccgaccgatatcgagatcttcagcctggccatggagctaggcgatcgcgtctacgcattgtcggtacagcgtcacgggatcatcgacgcacgcctggcggaagaaggcatgcgggtgttcgacgcctacctggggctctacctgccgccgatcctggaaaagcgtagtgaaccattaaccggatttatatccgatttaaatcgatag

SEQ ID NO: 357672 - DNA, 267 bp, Pseudomonas aeruginosa
atggccgtcgaaatgccgggcaatctgaggaataatcaaatggagtccctggccctcgcccatattacctgcgtaaagcaccgtatacagactagagctttcttcacgctcacaagaagtctgcaccttgacaaactcatcatcaattccatttgtaaatacaacaaaatcaccaccagggtaacgcgagttgaagtaaggcagaaaacctgcagagaccagattaactcgggtagcagttcgaacagtgatacgctccatcattga

SEQ ID NO: 357673 - DNA, 339 bp, Pseudomonas aeruginosa; identical to SEQ ID NO: 332086

SEQ ID NO: 357674 - DNA, 723 bp, Pseudomonas aeruginosa
atggtgaaaacctgtggcaaggccctgctcggcctctgcgccgcagccgccgtactggccttgctgatccactggatcacccccgcgaccatcctccactaccgcgaggacctgctgttctacttgcaggcccacctggtgctggtcttcagttcgatggcggccgccctgctggtcggcgtgccggccggcatcctgctcagccgtcccggcatgcaggcccaggccgaacgcctgatgcaggtgttcaacgtcggcaacaccatcccgccgctggcggtgctggccatcgccctggcgatcatcggcatcggcaacggcccggcaatcctcgccctgttcctcgcctcgctgctgccgatcgtgcgcaacacctacgagggcctgcgcaatgtctcgccggcgctgaaggaagccgccaccggcatcggcatgacgcccaaccaggtgctgctgcgggtggaactgccgaacgcggtgccgatcatcgtcggcggcgtgcgcgtggccctggcactgaacgtcggctccgcgccgctggcgttcctgatcggcgccaacagcctgggcagcctgatcttccccggcatctacctgaacaaccaccagcaactgctgctcggcgccgcctgcacggcgctcctcgccctgctgctggacgccctggtggtgctgttcagccgcatgttcctggaacgcggcctgaccgccaaggaggcctga

SEQ ID NO: 357675 - DNA, 954 bp, Pseudomonas aeruginosa
atgagcgaatataattttcgtgagcacctttcagatgagtttttgattgcccagcacgatgttgtccggctgctacttagagctccatatacctataagcgttatacgatccccaagaagaatggcggggtaaggcatatcgctcagcctgcgaaagaaacaaaaataattcagcggtttatgatgggtgaatggttttctaaactgccagtccatgagtgcgcagctgcgtataaagatggcgccagcattaaagacaatgctgagcggcatagtgggtctatatatatatcaaaatttgattttgttaattttttcggatctataactgaaggggatattaagagaatactgtctcggacgtttggggggcagttgtcagaaataagcatcgctgacatggcaagaatgagttgcatccgagacagagcaactggtcaattggtgctgagcataggtgcaccatcttcacctatactgtccaatgctgtgatgtttaattttgattcggtcgtgaatcagtggtgctcagaacgcgatataacatattcgcgttatgcggatgatctgacgttctcttccaacaagaagggaaatacgttttgtgtggaagagtttattaagggggcattgaaggaactatctgagccatcactatcgctaaattcggacaaaaccatacatgcgtcgaaaaaaaatcagcgccggatcaccggcctagttctgagcaatgatggcaaggtgactatcggacgtgatagaaaacgactaattagtgctatggttcatcgatttgcacacggtgagcttgatgataagtgtgttgcccatttacaaggcctgcttggctttgcacagggcgttgagcctttgtttatttccaggcttcgaagcaagtacacttcaaaagttattactgaccttatgaggttccgaagcaagaagctagattga

SEQ ID NO: 357676 - DNA, 300 bp, Pseudomonas aeruginosa; identical to SEQ ID NO: 340936

SEQ ID NO: 357677 - DNA, 573 bp, Pseudomonas aeruginosa
atgcgaaccgaatcgcacaccctgatttctacgctgctcggcgtggtgaaccaatggcgccgccgagaggggtggagccgagagaccgtagtccagcacatcgtggaggcgcatgagcgcatccagggagcgctggtcaccggcatcgtcttcgacccgccgacgcgcgatacaaccgagcggatgaaggtcaacgccgaccgcgtgttccgctggctcgacgacggcaccaaggacaccaacctggtgccggcgaacttcgttcccagcatcctcgccgcgctgccgactgacctgaaggtccaggccctgggcgacatcctgaccccgctgggcgtgtcggtgcgtctgatcggcggcgatgccggccagcggccggaggtgctctgcatgctccggacgctcatcaaggagaacggtgaggcgcagcaggccgttgccaacctcgtcgacggcgccgatgaccaggaactgcaggaggcccaccgggaactctccgaatccagggcggcgaccgatgaggcgcttcggatgatcgaccagatgcgccggccgcgccttgttcaggggtag

SEQ ID NO: 357678 - DNA, 762 bp, Pseudomonas aeruginosa
atgagcaacaacccgcacttcatgaacatgaccgccgacacgctcggcaaaagcttgctgcagggtctgatccaggaaatccggatcatgccggactgctggcagaagcttcccgaggccaagcagcaggacatcatcgaccgactggagcgccaggtacggaatgccgccaccatcgcggtccacaccattgccggcagcgatcgcgacacggtctacggcaagctcgaatccttcaccgccaaggacaaggtgaaagcggtcttcaccgtgagccccagcagcccgaaccaggagcaactctttggtgctgtgcaccaggactgtctgctgatcatcggcggcgccgctgagttcctcgacggcatgaaggacgtgaaggcggatccggaccagaacccgctggacctgaatggcggcgacggcgacatggaggaagacggcgcctggggcggcgagcagcagcccgacgatgatgtcgtggatgccgagttccaagagctgccgcaactcaccgtcgagcgcttcgccggccacaccctgggcgagatcgccatcggcgtcgccaccaagaaggacgtgttcgacgcggcctggctgcaatcgcgcttcgctctcaccaccgaggaagccgagcgcgtcgttctccagctgctggaccagggcgtcatcgtgctcgagcaggagaacgaggaatcccgcgagttgaacacttaccgcgtcgtcaagaagccgggggatatcgccctcgacctggagtga

SEQ ID NO: 357679 - DNA, 1272 bp, Pseudomonas aeruginosa; identical to SEQ ID NO: 337686

SEQ ID NO: 357680 - DNA, 189 bp, Pseudomonas aeruginosa
atgaagctgccagcaacctatgaaacagaggtttatctcggtgccgaggggcatgttgtggtcgcacagcctgatccgttggctgcctacggcgcggacgacaacatcgttcttctttctcctgagcaggccaggttggtggcccatgaattgttgcgcctggctgatgacttggagagtgacggctaa

SEQ ID NO: 357681 - DNA, 699 bp, Pseudomonas aeruginosa; identical to SEQ ID NO: 345553

SEQ ID NO: 357682 - DNA, 798 bp, Pseudomonas aeruginosa
atgcttcttggcttgtctcgttccttgtggggctatcgtggcttcgttctcggcagcgtcaagcgcgagttccagtcgcgctaccgcgggtcgctgttcggcgcgttgtggacggtgctcaatccgctgtcgatgatcgtcgtctacacggtgatcttctcccaggtgatgcgcgcgcgcctgccgggggtcgacgacggcctggcctacagcgtctatctctgcgccggcctgctgacctggggcctgttcgcggaaatcacctcgcgcagccagagcatgttcatcgagaacgccaacctgctgaagaagatcagcttcccgcgcatctgcctgccggtcatcgtactgctcaacgccggggtcaatttcgccatcatcctcgccttgttcctcggctttctcgccctcagcgggcgcctgccgggcgcggcattgctcgcgctggtgccgctgctggcgatccaggtgctgttcgcggcgggactggggatgatcctaggggtgctcaacgtgttcttccgcgacgtcggccagctgttcggcatctgcctgcagttctggttctggctgacgccgatcgtctatccgatcggcatcctgcccgagggtatccgctcgctgatcgaactcaacccgatgaccgcgctgatgcgcagctaccagcagctgttcctccacgggcaatggccggactggccttcattgctgccgatcaccctgctggcgctgctgctgtgcgcgctcggcctgcgtctgttccgccagcgggtcggcgaaatggtggatgaactctga

SEQ ID NO: 357683 - DNA, 1383 bp, Pseudomonas aeruginosa
  misc_feature (1358)..(1358): n is a, c, g, or t
atgacgcgtctgttggtcgaatgcacctatgtgttcgagcatcccaaggtcaattccggtattcagcgggtggtgcgcaacgtcatccgcgagttgccggaagccgacgagacggtggagtgcatcccggtggcaatgctcgacggcaccctgtatcaggtccacagcctggcgccgctggacccgcggccgcattcgccgctggtacgcctgcgcatcctggtggagcgagccgccaactacttctggctgggccagcgcaccctggaaaagcgccgcccgttccgttcctcgccgtgggcccggcgccttctctatgtagcctgccgcctgttcgccttcgccttcctcagcattccgctgcgcctgctcgaccgcatcctcggcaagcagcagcctgcacccgtgcgcgcgaccccgctcgaacatcgggccggcgaccaactggtcttgctggactcctcctggcacgccgatttcttcccgctggcggaacgcctcaagagcgagggcgtgggcatcgtctcggtgatctacgacctgattcccctgacccatccgcaattctgcgatgccggactggtcaaggtgttcaaccactggttcgactggatcgcggccaccgccgacggctacgtcgcgatttccgagaccatccgcgacgaagtgcgcgcggagatgctgcggcgcatcggcccggagaaggtcgcgcaacgctggttcgattatttccacctgggttcggagctggacctggtggaggacggcgcctccgtcgagcccgatctgctgcgcatgttcaaggccaaggcgccggtattcctgatggtcagcaccatcgagccgcggaagaaccacggttacctgctggatgccttcgagcgtgcctgggcccagggttcgcaggcgcggttgtgcatcgccggacgcatcggctggaagtgcgaggcgctggtggaaagggtgcggcagcatccggagctgaacaagcgcctgttcatgttcaacgacctctccgacaagagcctggagtacgcatactcccatgccgcatcgctggtcttcccgtcctatgtggaaggtttcggcctgccgctggtggaggccatgcagcgcggcctgccggcgatgggcagcgacatcccggtgttccgcgagatcggcggcgaattcatggcctacttcgacctcgccgatccgcagacactggcgaacctggtcacccgcttcgaagccacgggcgagttcccggccgagcgaccggtcggcgaatggcgctggatcggctggcacgaggcgagtcggcaactgatcgcgcggatcctgctcgccctcggcaaggccccggcgcatggcgnggcagtacatgcggattgcggttaa

SEQ ID NO: 357684 - DNA, 288 bp, Pseudomonas aeruginosa; identical to SEQ ID NO: 332350

SEQ ID NO: 357685 - DNA, 1782 bp, Pseudomonas aeruginosa
atggccgtgtctgccgtcatcacccagcgcctggttgacctcgaccggcagctacagagcgccggtcaggggcagcgcacggcgctatgcaaagcagccgcggcagagctgggtctgtcgctggcatcgctgtaccgcaagctgaaggatgtacaggtgcgtgagcgcgcaccgcgtaagcggcgcaaggactcggggcacagccgcctggggcgtgacgaggccctggtgatcagcacggcgctgatccactcggcccgacataacgcgaagcgcctgtattccgttgctgatgcggtcgaggatcttcgcgccagcggcttgatccgtgcggagtctgtcgaccgacgcaccggagagatccgcccgatgtcgatcagcgcgatcagccgcgcgctgcacagctaccgcctgcatccatcccagctattggcgccggagccggtcaccgaactgcgcagcctgcatccgaaccacgtctggcagatcgatgcgtccctctgcgtcctctactacctgaagcctggggcgaacaagaaggctagcggcctacaggtgatggatcgcaaggagttctacaagaacaagccagcgaacctggatcgcgtggccgctgaccgtgtgtggtcctacgagatcaccgatcactacaccggctggatctacgttcgctatgtgatgggcgccgagagtggcgagaacttctgcacggtgctgatcgaggccatgcaagagcgtggtggagccgacatgctccacggcgtgccacgcattctgatgatggaccctggttcggccaacatctcggcgatgtcgaagaatctgtgctgctccctgggcatcgaggtcatcgtgcacgcgccaggcgcggcgcgggttacgggctcggtcgagaacgcccggaacatcatcgagcgcaagttcgagtcgaagctgaagttcgaaccggtcaacgacctggacgaactcaacgcccaagcgaagaagtggcgcgcccacttcaatgcgacggccgtccacagccggcataggcgcaccaggtcagaactctggatgaccatccgggctgaccaactgatcaaggcgcccacggtcgagctgtgccgggagcttgcagtgagggcaccagagtctcggaaggtcacggccaaacttcgcgtctcgttcggagggtgcgagtacgacatttcggttgtcccggacgtgaacgtcaacgaccgcgtgctgatcacccgcaacccctggcgcgaagatgcagtgcaactggtcacggtcaacgagcagggccgtcaggtcttctatgtccttcccaaggtcgagaaggatgagggcggctacgcgaccacttcaccggtgatcgggcagacgttcagccgtcaggctgagactccggcgcagaaggcccgcaaagctgttgaccaactggcctatggcgtcgaaagcgaaatggaagtgcaggctgcgcgcaaggccaagtccgttccgttcggcggtgccttgaagcccttccaacatatcgacgacacccaactgcccaccttcatgcctcgacgcggcacggaacacagcttggtagcccccatcgtggaggttccgctccttccgcatgtcgaggcggccaaacgtctacgcgcgcagttgggtgaagcctggaccacggactcgatggcctggctcaagaagacccaccccgaaggcgtgccggaagaccagctcgacgccatcgccaaccagttgcgcaagccggcccggcctggcctgcgcgtcgtaggaggcaactga

SEQ ID NO: 357686 - DNA, 504 bp, Pseudomonas aeruginosa
atggacttcaaagtactgcttggggcagtgatgctggtcagcctatcggtggccggatgctccacgaaaaactatggccgacagccggaactgaccgacttcgaacggcagaccatgagctgccgcgagattgacctggaacaggccaaggttcagggattcctgacccacgtgcgtgaggagagcgagttcgacgggcgctcggtgctgtctttcctgggcgacttcgggatcggcaacctgatggagaaggacgcagcggtcgacagtgccaatcagcgcctgacccagttggcaggtgccaagatgcagcgtggctgcacctatgcctatgaggctgaggccccagctcagcagccgtacgcgccaccacgcgcctatgccccaggcgcacccgtatcagcttctgcccgttctgtcgacgcccagctcgacgagctgaatcgcatgcagttgccctacgaggagtaccagcggcggtatcgggaaatcacggggcaatga

SEQ ID NO: 357687 - DNA, 156 bp, Pseudomonas aeruginosa
atgaacgcttttgctcgtgagattctcgcggccgcaaggcaggctccggccatctacttcgcgccgctcctgggtgcgattcaggaagtaaaagccgagtggcagcgccaagtgcgcggcaacgaggccagctcttctctggatagaaagcgctag

SEQ ID NO: 357688 - DNA, 426 bp, Pseudomonas aeruginosa
gtgtccgaggcgctggccacgcttcgcgatgccggcgcggtagctctggtgaccctgatgccagaagaagaactgctgcagaacgaagtcgatctacttcccgaggaatgccaactgcaggggatcgaatggttccacctgcccgttgaggatgaccaggcacccggtgaagctttctccactgcgtgggaaaccaatcgagatcgcctcaaagagctggtcaatggcggccagaagatcgccattcactgcaagggcggctctggtcgcacaggtctgatcgcggcccagctgctgatcgagtgcggcatccccatgcgcgaagccgttgcccaggtacaagcgcttcggccccgtgcgattcagcaccctgcacacatcaactacatcaaccagttcgacaaaaaatcgccgaacgctcgctaa

SEQ ID NO: 357689 - DNA, 129 bp, Pseudomonas aeruginosa
atggatgctgccttcgatgccacgctcgagcacatcaagcagcgcatctcggcgttcctcgcactgccctttgaacaactcgatgcagcccaactcaaggtggagctggcacgcatcggcacgctctga

SEQ ID NO: 357690 - DNA, 1041 bp, Pseudomonas aeruginosa
atgtattcagcgtcctccgcgatctcactcatttcgtcagcatcaaaggcactattagaaaaacttctccacggcagaaacaatacttatttcttagaaatcttagattcactatcgtttgacacaaacgcgcgctttatatttaagccctccttctcgaaggttaaggatttcgacgaacctgctccatatagcagtcgcccgcgtatccaactcactacagatgatggagctgataaaatcatcctagatgaaagatatgcgtcgctaatacatgccatggcaacggaaacacgctcaagcgttacatatgccatgagcaatgtagcagactattttgatagtcgaaaagcggtaacgctgaacgtcgatttcgcaagcaacaatttttcctttgaaggaaaaaaagcttacccccaaataattaactcaatattaatactactaaaccacaacctaatcagactaatggatgtggtgcttcacaagaaaactcatggggagctctcgctaaaaagagcaagttctggcgagcagtgcctgattgtattgacactcggcattgcgggacatatcgaagacggctcactaatcttgatcgacgagcctgagataagcctacatcccaggtggcaagaggagttcatgccattattaatctctgcattctcaaactataagaactgccacttcatcattgctacccactcacctcaaattgtagcgagaatgaatgatgaatcttcatatatttactcgcttagccaggacaaactgtatccagcaaaatatttcagcgacaaatctgcagactttcaacttgctgaactatttgacgcccccggaatgaagaacgaatacatatcgcgggttagctttaatctgatcgcaaagctgcgcagcaaaagaaaagtagatttggagatcaaggcagacctattaaagctcctagagcttcaatcaaagctagaagatctagacccaacaatatttctcattgactcagcaaaagagctttacgactattatgcccgaaattaa

SEQ ID NO: 357691 - DNA, 1950 bp, Pseudomonas aeruginosa
atgatattcgcccttttgctacgtaacttcaaaacgtatcaaggtatcaactacatagccctctctaacggcagcagttttagtgcactagttggagaaaatggtgctggcaaaagctccgtgcttgaggcattaaatagctttttcaacaatgccgactggaattacaaccacaacctatctaaaggctttgcagagcgtgaaccattcatatgccctgtgtttttgatagaaaaaagtaaagtaccaaccctaacccacatgtggctaataaataaattaagcgacatgacttgggacgcacgagctgctgactttaacccatcagggaaaaaccacgctgaattatttacccgtcaaagaaacgaactccaaaaatcggcaataacgaaagacactcactacctatttccattcggcatatggaaaacaaataagcaagtttcccccaccagctactactcaatattcgaagcgctgccgacatactctgcgctaaagaagtatgacacctatacagaagcggcaaacgaactccagaaacacctacactcacactacaactacatatacttaccatccgaactagacttccgcgagcacacaatgctcgaaagcaaaacaatgcaggctctcctgggacaaaaaatagaccagatcgttagaagcctaatagacaaaacaacaatatcagacataaacacgagactaggtgagtttcttgatacattatcaagtcgacttataaactacgagtacagaaaacccgcactcaaacaaagcttagtaaacctaacacacttcaccgagacgattatagattcgtattttggtagcaaagtactaagcaaaaaatcgggtagagacaattctgtgccaggctcagatatgagttcaggcgaaaagaggcaggctctcatagatgtagcacaggcctttctaacctcttcatcaacgccaccgtcaacacaacagctaatacttgcgatagatgagccggagctgtcactgcatgtctcagcgtgctttagtcagtttgaaaaactaagagatgtctccgaggcaggggttcaagtcattctaaccacccattggtatgggttcatgcccatcatttcaaatggagtcgcaatttattgccctaggaccgcaggtgatcctgtaatgctggatctcaggtgtttcagagatgacttaaagaagcttagaaccgcaaccagcggaaggctaccgacagagctagagctcaaaggaacaaatgacctcgttcagtcaataatagcttctataaccggtgcagagtacacatggattatttgtgaaggcgcatccgataaaatttacttagaccattatcttcaaaacgaaaaacatttgattgtcgcagtaggaggcagcattgccttaaagaaaatttacacatatatcgacctagcactaagcgacgccagggatgatatacgtggaaaagtatacttcatcctagacactgataaaaaatatgaacgcttcgagaccaaggactcaatcgatggaatccgaatcagacgacttaaaaacaacgaagaaacgcaccgcacagagttactagccacaaataacaatgactttcacccagccacagtcattgaggacacacttatacctagcttcttcctagaaacactgaaacaactacaagcagaagaaatattctctccaatcattacccccttagttcgcaacttgacatcacaagacgatgcaatgccaccatcattttcttttaacctaagaaaacttgacgaaaaagcactgagtgaactgttctcaatggacggtttcaaaatcaaattcgcacttaaatataccgaaattgctgacccagcctttcctccagcttggatcaatgaagtgaatacgttcctaaataagccgccccccaaacgccgcccaaaacccaatcgataa

SEQ ID NO: 357692 - DNA, 855 bp, Pseudomonas aeruginosa
atgcacgcattatcgcccctggccctggccgcactgatcgtcgccaccgcccccgccttcgccgacgaagcgaagaaacccggcacggtgttcaaggattgcaaggactgcccggagatggtcgtactgcccgccggcagcttcaccatgggcaccccggacgacgaggtcggccgccagcccgacgagggcccgctgcacgacgtgaccttcgccaagccgttcgccatcagccgctaccaggtcaccgccggcgaactggacgcctacctgaaagccaccggcgtcaagctggccgacggcgatacccgccccggccgcgaatgcatcgccggcaagccgcgctaccagcaaggccctcgccagccggcggtgtgcgtcgactacaacgacgtgaagaactacgccgcctggctgtcgaagaagaccggcaagcactaccgcatgctcagcgaggccgagcgcgagtacggcgcccgcgccggcagcgccggccccttccccttccccttcgacgaaggcaaggaatacagcatcgccaagcacgccaacacctacggcgccagcgatggctacaacttcacctcgccggtgggcagcttcccgcccaacgccttcggcgtctacgacatgcacggcaacgtctacgagtgggtcgccgactgctggcacgaccactacaacggcgcgccgagcgacggcagcgcgtggatggaggacaagtgcgagctggtgcagatccgcggcaacgactggggcgagccgccgatcttctcgcgctcgggcaaccgcaacaatgcctaccccgacgcccgtggcgactggataggtttccgcgtggcccgcgaactctga

SEQ ID NO: 357693 - DNA, 876 bp, Pseudomonas aeruginosa
gtgccggagcacgcgctcaagtccgacccattccctgagaaagacgagatgacgaaaaggaaattagcctatatctggtccctgagaaacgccgccgccgacaaggccggacaacaggtggcctacaagggcgagctgcgctacatgaagtccccgctggagtttctcgccgaatcgctgaaccggacggcgctgggggacgcctacgaattggtcggggtgatctacgacgacgacccggagctgccccgcgaccagcagaagatcgaggactacggattcgcctaccggcctggacagcagtggttctacccggcggaactggaggtacaggggcggcgcatgaacgatctgctgctgaacgtgccttccacctaccgtcgccacccgcgcgggagcgcggagcatgtggccggcaagcgcgacttcgaacgacgcctgtacgagacgctggtcgagctgcgcgccgaggtcgtcgtcctcgacggcctgctggtcatcctcgatgagctggtgcggcccggggcgccattcgcccgacggatcatgaatatccatcccggggtcacgcgcgccgactcgccctaccaacggcgcggcgcctgggcgaccctggatgcattgcatggtgcgcggggtgagaagatcgtcgactgggcgacgatggaaagcgtaccggtcgaacccttatacctgaccggcgcctcgttccactacgtggacaacggcatcgattccggcgaggtcttccacgacgtgctgaaaacgaagatatctcccgacgacaccatcctcgagctgcgttggaacaacttcaacgacagtctgttcccggccttgcacgaaggcctggcgctgctggccgagaaggactga

SEQ ID NO: 357694 - DNA, 1653 bp, Pseudomonas aeruginosa
atgtccgcaacaccccgtagcgccactcgcgaactcctgagcattctcaaacccttctggccagcgctcagcctgtcgatcggactgggtatcgtcggcggcctggccatcaccgcgctgctcacctcgatcaaccgcgtactgaacgccgagggcggcatgaccagcggcatgatgctggctttcagcgcgatctgcgcgctggccctgctcagttcgatcctgtccaacatcggcaccaactacgtcggccagaaggtcatcgcccggctgcgcaagaccctcggcggccgggtgttgtccgccccgatcgaacaactcgaacgctatcgcacgcaccgcctgatcccggtgctcacccacgacatcgatacggtcagcgatcttgccttcggcctgccgcaactggtgatctccctgaccgtgacccttggctgcctgggctacctggccaccctgtcgctgccgatgttcctggtcgccgccagcgccgtggtgctcggcaccatcgcccagtacatcgcccgcggctatggcatggccggtttcgaagcggcgcgcgaggaggaagacctgctgcagaagcactaccgcggcatggccgagggagccaaggagctgcgcatcaaccgcccgcgccggcagcgcctgcacgggcgactgctggacgagaccgtggagcgcatctgccgcctgcaagtgcgttcggtgaatatattcctcactgccagcaccttcggttcgctgctgttcttcgtggtcatcggcaccgccctggcggtccagacctggtggccgacctccgaccgcagcgtgctcagcggcttcgtcatgaccctgctgttcatgaaggggccgctggaaagcgtactcagcctgttgccgctgatcagtcgcaaccgcatcgccctgcgccggatcgccgaactcaacgagcagttctccaatcccgaaccctacctgctgctcgagaacgacgcctccagaccggctcaagaggtgcgcagcatcgagttgcgcgatgtcggctacagctatccgggcgtgccgggctcgacgcccttccgcttcggcccggtcaacctgacgatccgcccaggagagatcctcttcatcgtcggcgagaacggctgcggcaagaccaccctgatcaagctgctgctcgggctgtacacgccccacgagggctcgctgctgctcaacggagaggaagtgacggcacaggcgcgcgacgactatcgtcagctgttcaccaccgtgttcgccgactactacctgttcgatgacctcgtcgacggcgagcaacagttgccggaagaagccgggcgctacctgaagcgcctggaaatcgcccacaaggtcagcgtcagcgacggcagcttcaccaccaccgacctctccaccggccagcgcaagcgcctggcgctggtcaatgcctggatcgagaagcgcccggtgctggtcttcgacgaatgggccgccgaccaggatcccaccttccgccggatcttctataccgagctgcttcccgagctgaagcgaatgggcaagaccatcatcgtgatctcccatgacgaccgctacttcgacagcgccgaccaactgctgcgtctggccggcggtcgagtggtcgaggagctgcaaccggcctga

SEQ ID NO: 357695 - DNA, 2427 bp, Pseudomonas aeruginosa
atgcgcaacaccctgacgctgcatccgcgcctgagcaccgccgccctggccatggccctgttggcgccgatcgccagccaggccgaagcgcagaagatccagttcgacatcggcgcccagtccctgcccagcgccctgcgccagttcggccagcagagccagttgcaggtgctttacagcgccgatgaagtgcaaggcctgcgcagcaacccggtccgcggccaactgagcgtcgaggcggctctcgccgaacttctccgcggtaccggcgccagctacagcctgcaaggctccagcgttaccatcagcgcccagcgctcggcggactcggtggacctcggcgacattaccgtcaccagccaggagtcggcctggggccacgtcaacggctacgtggccaagcgcagcggtaccggcaccaagaccgacaccccgctcaaggaaatcccccagaccatcaacgtggtcacccaggacgagatcaaggcgcgcggttcgcagaccgtcaccgaggccctgcgctacactccggggatcaccggcggcggcttcgccgaccgggtgaagatcttcgacgagccgacctcgcgcggcttcagcccggcgccgatgtacctcgacggcctgcacatgccctacggcggcggcagtaccggcggtgccctgcagatcgacccctataccctggaacgcatcgaagtgctgaaggggccggcatcggtgctctacggccagaacgaaccgggcggcatcgtcaacatggtgtccaagcgtcccaccgccaccccgatccgcgaagtggtgctcggcggcggcagccaggaccgccgctacggcgccttcgacgtcggcggcgcgctcgatgaacagggcacctacctgtaccggctgaccggtgtgggccgggacatcaactcggagatcgactatgccgagcagaaacgcttcatgctggcgccgagctttacctggaaccccaacgagcagaccagcctgaccttctacggccagtaccagaaggacaacgacgtgcccgaggcccaaggcctgccggcctacggcacggtgttcagtacgcccaacgggcggatcaagcgcagcaccttcatcggcgagccggggctgaactcctacgaccgcgaccagttcgtgttcggctatgagttcagccacgaactcaacgatgtctggaccttcaagcagaacacccgctacgcctatctcgacgaccaatacgtggcgccactgcacggttacagattcgtacccaacccgaacaccggtgccgatgaccgacgctatgccacgcgctatggcgtggactggtcgcagaccaacaaggccttcggcatggacaacatggcccaggccaaattcaagaccggcgcgatcgatcacaccgcgctgatcggtattgactactaccacttcaaatccaagttcttcggtctctactcgaaccaggaacccaccacgatcatcgatctgtacaagccggtgtacggcagcaagttcaccttcaccaatccctatcgctggaaccgcaccaccgaccaaaccggaatctacttgcaggaccagatgaaatggaaccagtggttcctgaccttcggcggacgctatgactgggccaagaccgacaccaaggaaaccggcggcaaggtcgacgcgaaggacgagaagttcagcggccgcgccggcttcggctacgagttcagcaacggcatcgtgccctatgtcagctactccgagtcgttccagccggtcggcgggttgaacatggacgaaggcaacaaggccttcaagccgaccaccggcaagcagtacgaggccggcatcaagtaccagccgccggggcagaacagtttcatccaaatgtcggtctaccagatcgacaagaagaacgtgctcaccaccgatctgctgaaccccaacttcagcaagcagtccggcgccatgcgctccaagggcttcgagctggaaggcaaggccagcctgaccaacaatctcgatgtcatcgcctcgttctcgcgcaacgacatcaaatacaccaaggacaacgacgggcgcaaaggccgccatccggccggcacgccgccgatgaccgccgcggtctggctggactacaccctcggcgcggataccgcgttcgccggcctcggcgcggggatcggcgcgcgctacacccgcggcagcgacggcaccgaaaccgccgacggccacttcaccatcccgtcctacacgctgtacgacggcaagctgtcctacgacttcgagaaatccccgctgcaggtgaaaggcctgaaggtgcaggtcaacctggagaacctcgaggacaagaagtatgtcagccgttgctcctctgatctcgactgctactacggccagggccgtaccatcaccaccgacctgacctacaactggtaa

SEQ ID NO: 357696 - DNA, 966 bp, Pseudomonas aeruginosa
atggccttgaaccccgatatcgcggcatacctggaactggtcggcaacggccgcagcagtggcaagagcctgcccatgcaccagttgacggtgcaacaggcacgcgagcagttcgaccagtcgtcggcgttgatggacccaggcctcgacgagccgctgccgcgcgtcgagacgctgttcgtcccggcgcgggacggtacgccgttgccggcgcgcctctacagtccccaggggctgtccgcgtcgccgccgttgccgggcgtgctctacctgcatggcggcggctacgtcgtcggcagcctggactcccacgacgcgctgtgcgccagcctggccgagcgcgccggttgcgtggtgctttctctggcctaccggttggccccggagtggcgttttccgaccgccgccgaggacgctgaggatgcctggtgctggttggctgccgaagccgcgcggctaggcatcgatccgcaacgcctggcggttgccggcgacagcgtcggcggcagtctgtgcgcggtgttgtcgcatcgcttggcgctgcggggagacgcctcgcaaccgcgtctgcaggtactgatctacccggtcaccgatgccagccgcacgcgccaatcgatcgagcgttacgccgttggccacctgttggagaaggacagcctggagtggttctaccagcactaccagcgtagccccgaggaccgtcaggacccgcgtttctcgccgctgctcggcgtggtgccggctgacctggcgccgacgttgctgctggtcgcggagtgcgacccgttgcatgacgagggcatcgcctatgccgagcacctgcgccagggcggcgcccgggtggagttgtgcgtctatccggggatgacccatgacttcctgcgcatgggtgcgatcgtcgacgaggcggacgaagccaaggacatgatcgccgacgcgctggtggcggccctggcaccctga

SEQ ID NO: 357697 - DNA, 1401 bp, Pseudomonas aeruginosa
atggggtatttagaacaagcagagcttcagggaggttttgaaaacgaatcctccaagctcgcttcagagattccatttaagccatctaaggctccagaaacaattaattacgaaagtcgcttttctctattttctcaagaagccatttcaattgcgcaaaaaatccttaatggggaaaagcccagtcaaagccaagctgagcttgaagcattgattggcgagaaagttggcagcgagcttaagcgacaaatccctcttgccaaacgtcaggagatgggagctttctttaccggagtcagccttcgtgagaaagcattctcttatctagacagtccttattctgtactagaccctgcctgcggcgctggtgacttactattaagctatgcaaataagcttccggttcgtgactctttggaagagacattgatctcttgggaagatttcatatacggctttgagcttgaggaaagcttcctaagaatggcgcgagcccgccttgttattctggcttacctaaaaggcctgaagagttggtgcaaaagcgctctatcccttaacaacatatttagaaatattgtcttaggtgacgctctcgccaccgcagaatggccaaagacagagcatattgttctaaaccctccatatatctatatgaaggcagaagagaaatgcccctggacaacaggcagcgtctccgcagcggccgtctttattgatcactgtttgaagaaaggctctcatgcatctgttattacagccatcctgccagacgtcctaagaactggcagccgctataggcgatggcgagagttagtcggcaagtcgcgcctaataaaacgcacacaggtacatggtgccttcgactctcaagttgacgtcgacgtcttcatactggagctccatttaagacctttccaaattggccatctacaacatcagtggacatgccagctaaaagtcacggacaaaacggttaaagatcttttttctgtaactgttggaagtgtagtacctcacagagacagagaagagggaatggagtgtgtttacatccatcccaaagatgcacctccatggggtgagataactacgccacccggacacagaaaatattttggagcaactcaccaggctcctttcgttgtaattcgacgaacatctagccctagcgataaaaatcgcgcaattggcactatagttaattgcgaaggcaatatagcgatagaaaatcatcttatcattttaaaacctctcagcaagaagctatcagactgccagagacttttagaagtattaaagctaaaaagtacatcagaatggctcaacgacagaattagatgtcgccacttaactgtgagcgcaattaaagatctgccttgggcagagcaaaaaccttaa

SEQ ID NO: 357698 - DNA, 1068 bp, Pseudomonas aeruginosa
atggcaagaaacatagctccatttgacatcacttggttcatcgacttccactctcgtggactgctcgacttatcgcccccctatcaaaggcacagtgtctggacgacaaaagaaagaagatatttcttagacaccatttttaacggatatccatgccctccactattcctatataaatccctttctgatgaaggcgttgccacctatcatgtggttgatggaaaacaacgactcgaaaccatcattgcatttgtaaacaataaaatttcgctttccgaagaaatgcaagacgaaggcttggccggaaagaaatggaagagtatcgacgtagagcagaagaagaaattctggaattatcagctcgcggtcgaacttcttgactccgtagacaacgcagtcgttaaagaaatttttgacagatacaacaggacttcgcgcaacctggagcgccaggaactccgccatgccaagttcgatggatggtatgttaagtttgcagaggaagaggcgaaaaagaaagagtggcgagatatcggcatagttacttctgctagcgctcgaagaatgaaagatgtgcaattcatctccgagcttatgttggtcctcataaaaaaagatgtttccggctttgatcagaatgagctggacgagatttatgccaactacgatgctcctcttgagttttctcccgacttccaagaagacgacttctcgcagtcttttgaatcgataaaaacgttcattctagacgttgaacgaatatcaaacgtcatttctcgactagggaaaacatatataaacttctactcactctggtctactattgctttagccggggacaaactccccccagcagaagtagtctctgaaagatacgaagccttcatgaataatgttcaacgtatatcgaaaccggagaatttggaggagcttcttaaaggaccagaagcagaggctctaaaacttcccttggcgtactatcagaatgctcgaggcgccaacacggagcaacctcagagaaatcagcggcatgagattttggcctctgtcatcctaggtgaagtgtaa

SEQ ID NO: 357699 - DNA, 1002 bp, Pseudomonas aeruginosa
atgaaaataagccagagcgtaagagcgctatacgagaatagcgcaccattaatccaaaagctggaaaaaaaggcaggcgagatattcgaagcaaagcgggaaaaacaatggttctataccggcagggtaaaatcactagaaagctttgcacagaaactcgaaacaggaagagtagaaaatccggccaaaatggaggattttttcgcctgcacattggttgtcgacaatcgaaaatcaataacaaaagcacttgacctcataaattcagagttcgaaataacagagcgaagaccaaaaaactttgagaccacgcacaagtcagctgatgcctttccgtttgatgacctgcgtctatatgtcaaactaaagaaagatgaacgcttgccaagcggccccattcatgacatcgtatttgaaatccaaataaagacatttcttcagcatgcgtggggcatagcaacacatgatcttgtttataagggagacgatataaactggtcaaaagcgcgtgttgcataccaaattaaagcaatgcttgagcacgctgaaatctctgtcgagcaagttgacagcctctcttcgtctactggacttgcgatgaccgacaataaaactagagagaaaaaatccgcaatcgactggctggtagaaacgtggccaagagattctctgccgaaagacttagtaagactatctgaaaccattctcgatctatgccgtagcacagggattgagtttaagcacttgaaaagagcaacaaataaagcaactacagaaagcaatggtgccaacttaacaaacctctccccctatgccacaattgttaagatcatgttccatgaattcaccaaagaaatacttgcgtatttaaagacaccaagtaaaggtcgacgaatccatcgaattttcatttcagatgacgaagaaataaagagcctattggaagattgcaattcagaaaaatacatatatatagacccagaagtattacgtccgaaataa

SEQ ID NO: 357700 - DNA, 243 bp, Pseudomonas aeruginosa
atgagcaccacgcgcaaattgcggctggggccgctgcccaagaccgagagcgttaaattgacctttgcgtgcccggccacgctcaaggccgacctcgaccgctacgcggccatgcacgagcagacctacggcgaagaggtcgatgcgacgacgctgatcccgcacatgctggaggcgttcatggccggggatcgcggtttcaggaggggagggcacgcagctccgaagcctgcgacgaagtga

SEQ ID NO: 357701 - DNA, 294 bp, Pseudomonas aeruginosa
atgcaacgcgcacccgtcctgttcgccttcgcgtgcctgctggccggctgcgaccggccgcaggcgctgtcattcgatgcgcttgccgccgatccggtgcggctacacgcgctcgcggcgcagtgcagtcgtggcgagcaggacggcgcgttctgcgcgcaggtcgcgcaagccgacctgcgccgctttctctccgggcaggttggcccggacgaataccagacgctcgccgatctgccgccgattccggccagcttcgacgaacccatcgccgcggcggaggatcggccatga

SEQ ID NO: 357702 - DNA, 738 bp, Pseudomonas aeruginosa
atgaaaacccgtgtgctttccacggggcttgctgccgtgttgtccggctcgctgctgctcgcgcagccggcgtcggccatcaccgtcatcgacccaaccaacctcgtgcagaacacgctgaccgcgattcgcacaatggaaatgatcgagaaccagatcaaccagctccagaacgaggcgcagatgctcgccaatcaggggcgcaatctggcgagcctgccattcaacgtggtcaaccggctgcgctcgacgctcgccaccgccgaacggctgatctcgcaggcgcaaggactggcgttcgaggtgcagagcatgaacaccgagttcgcgcgcctgtacccggagcagtacgccgccaccgtcagcggcaatcagatgtaccaggacgcgcgccagcgttggcagaacacgatgggtggcttgcagaccgcgatgcaggtgcaggcgcaggtgtcgcagaacctgtccgacgacgagggcgtgctgagcgacctggtgagccagagccagtccgcgaccggcgcgctgcaagcgatgcaggcgaccaaccagcttctggccttgcaagcgaagcagtccatccaggcacagcagcttcagctcacacagggtcgtgcgacggcgctggagctggcgcggcaggccgccgccgtcgaacgcggccgcgaagtgacgcggcgcttcctcggcaccggcacggtgtacacgccgcagcccgtcaccttctacggcaactga

SEQ ID NO: 357703 - DNA, 264 bp, Pseudomonas aeruginosa
atgaaagggagcatcttcttcttgctgacggcggtgctggcgggatgccgcccttcccaagcgccgcaaacgaacgatctgccgacgatcgatgcactggcatccgatcccgtgcgactgaaagaacagcgccagcagtgcagactggagcgtgcaaagttgggcggcgagttatgtaaccgagtcgccgaagccacacgcaaacggttctatggcgatggcaaggtgccctatacgccgctggagcagccgcccaagttctga

SEQ ID NO: 357704 - DNA, 972 bp, Pseudomonas aeruginosa
atgctagcagcacaatcagaattccattcttttggggaaccccgtcccgtcgtttctgttagtccagtcgtgttgtcagcaccgggacgcggtacggatctgcaaacgcgggtttccgcgcccgcgaccgggagtgcgctaccaatcatcgtcttcgcgcacggcttcgcatcctcgatggatgcctatgcgcctctcgtaagcttctgggcagcgcgcggctttgtcgtgattcaacccacctttctcgattcgagaactctgaatgcagacccaaaagctgaccacaacgaagcggtccaggcctatctgaacgacccacggaaactgtcgatgtggcggtatcgtgttgacgacatgaagcatatcctcgacaaactcgatttaattgaatactcggttcctgggctcaaggggcgtctcgatttggaccgcgtcgcggtggctggacattcgttcggagctcaaacggcggcgatgctgctgggcgctcaaaccgactcaggcgagaatttctatgatgttcgtgtaaaggcaggcgtgttgctatccgcaggcgggaggggaggcgaagcgctcagtccatttgctcttgaacattttccccatctgaaccagaactacgccgggatggttacgccaacgctcgtcgtggctggggatcgcgatgaatctccgttaaccgttcttgggccggaatggtttacagacgcttatacccttagcccaggcgccaacgcgctcctgacgttgtacggcggggagcacatgctcggcggaatatctgggtatctggtgcgtgagacgaccgacgagagcccagagcgtgtcgccgccgtgcagcgtatgacctcggcctaccttcgcactgccctctatcccggagatcccgcttggagtgtggcctgtacctggctgatggaaagctctcagcctccgggacgtgtcgattacaagcgatccgttagatag

SEQ ID NO: 357705 - DNA, 402 bp, Pseudomonas aeruginosa
atggagaagcgccgcaagcggatcaaagaaccgatagcactcatgtgcaagagcgatgagtcgctggccgtacgggagttcttggcaaaggtaggtgataagtggagcatcctattaatcgtcatgctttcaaggacaccacagaatcgcgcccgcttctccgagctgcagcgaatgatcgacgggatttctcaaaggatgcttgcgactacgctccgcaatctagaaaaagacgggctcgtattccgcgaggtttttccagaagtgcccccgcgcgtagaatatgagcttactcctttgggcctcagcctattggaacctatggagcagctggttcaatggatcggaagcaactggagctccattaagcgttcgagggagaattacgacaagcgacaatga

SEQ ID NO: 357706 - DNA, 1959 bp, Pseudomonas aeruginosa
atgagccaacgcgatgacgaccgtttccgcgtccggcctggtgccccgaagcagcgcgacgatgccttcatcaacaaggtgctgcgccagaccagcaaggccggtgcgaaggccggcaaggcgatggcgaaagccggcaggcagcccggtgcccggctgggccgcggtcacgtcgcggcgcgcttcgctggccggggacttggggccaacgcccggcgcgtgacgatcaaggcccggctggtgaatctggcgcaggcggggccgcgctcgaccgccgcgcacctgcgctacatcgagcgcgaaggcgtcgatcgccagggcggaccggggcggacctacgggccgatgaccgatgccgccgacctcgatgcgttcaaggggcgcagcgccgacgatcgccaccagttccgcttcatcgtgtcgccggaggacgccgaacaactcgacgacctgcgcacctacacccgccacctgatggcgcgcatggaggccgacctgggcacccggctggaatgggtggccgtcgatcactggaacaccgacaacccgcacacgcacgtcgtcctgcgcggtaaagacgacaccggcaaagacctcatcatcgcccgcgactacatcgccgaggggatgcgccggcgagccgctgaactgacaaccgaatggctggggccacgcaccgaactggagatccagcgcgccatgcaacgcgaagtcgatcaagaacggtggacgggcctggatcgcaccttgcagcgcgaggccgtggacggcctggtgcggcaggagacgctcgccgaaccccggctgctacgtcagcggcaaatgctgatcggccgcctgcagcgtttgcagcgcatgggcctggcgagcgagcagcagtccggcacgtgggccgtccatgccgaggccgaaccgacgctgcgggcaatgggcgagcgtggcgacatcatccgcacgatgcagcgggccatgagcggccggcagcgcgaactgacagtgttccagcctggcgaggatggccgcgccatcgtcggtcgcgtcgtcggcaaggggctggcggacgagctttacgacaagggctatctgatcgtcgatggcacggacggcaaggcgcattacatcgctttgccgccgcgctcggagttggagcagtacccgacaggggcggtggtgcaagtcaaagacgccgccgacgcgcgcgccgtcgaccgcaacatcgccgcgcttgccgtcgatggcgtataccgaaccgatcatcaccttgggcttgtccaaggtcaggccacgctcgaccgcgatccgcgcgaggtggtggccgcccacgtgcgccggcttgaggccctgcgccgagctggcatcgtggaccgcgaagccgaaggcgtctggcgagtccccgataacttggtcgagcgaggtcgccaatacgacgcgaaacgcctcggtggcggcgtggcagtggaactgaaatcgcatctccccatcgagcggcaggcccgcgtgatcggcgccacctggctcgatctgcagctgatcggcggcggcaagggactgggcgaacaggggttcggggccgaggtgaaggacgcgctacgtcaacgtgccaagttcctgaccgaacaggggttggccgagcatcgcgaccagcgggtcgtcctagcccgcaacctgctggcaacgctgcgcgggcgcgaactggcgcaggctgcgaaaagcattgccgccgaaaccggcttggcgcatcgccctctcacggacgggcggcgcgtggttggcatctaccggcgttcggtcgtgctcgccagcgggcgctacgcgatgctcgatgacggcatgagcttttcgctggtgccgtggaagccggtgattgagcagcggctaggccagcatctggccgcgacggcgcgcggcagtggcgtatggtgggaagttgctcggtcgcgcagtccaagccttggttga

SEQ ID NO: 357707 - DNA, 588 bp, Pseudomonas aeruginosa
atgacgaccatttccccatcccgcatcgcgccgcatcctcgctcgcgcttgcgcgctcgcctcatgttggcgggcctgtccgcctgcggtctcgccgcgctggcctgggcgtccttggtgtcgccactaccgcgcctgacctacaacccgtccgacagcgtggcggtcggctggtatcgcgtcgaaccgctcgaccagcgggccggctcgctgccacatccgttgtccatggacagcatcgtgctcgttccgctgcctaccgaggccgccgcgctggctgcgcgtcgcggctacctcccgacgcacgttccgttgctcaagcgcgtgggtgcggtcgcgccgcaagaggtgtgcatcgtcggcctcagcgtgcgcatcgacggcgtgccggtggccaccacgctgcccgccgaccggctgggccggccgctggcatcgtggccgcagtgccgccgccttgaaccgggcgagctgttcctgttgagcgtgacgaatccggcatcgttcgacagccgatatttcgggccggttgctgcatccaccgtgctcggcgtcgcacatccggtctggctggagacacgccgatga

SEQ ID NO: 357708 - DNA, 753 bp, Pseudomonas aeruginosa
atggctgatcgaagcaccgattcctggtatcccatcgccgcgtatctctacgcgctgcatctggacggccccgcgctggcctgggagtacctgcgcaggcatcccgactaccggcgcgactggctgcgccgtcgccatcggcctgaggcggcacacgcttggggactgcgcctgctggaagacccggccctggatgcgcgcgacgcgcatccggcttggtttcccgatcacgatggcgtgatccagctccacccggatgtcgacccgccacccgaggcccacgccttcgagttctggtgcatccccggccacaagcacctgatccacgacggcaagcgcctggtgttgacggcacgctggcctggctgctgcgtgcggctcgcactgtcaccggacctggccgatggcatggcctacctctatgctgtccgcgcgtgcgccgcgccctgcgcgagctaccgcacggtcacggccgagctggacaagctggcgacggtggacggggccgtgcctgcggcggcggcccgctctcggcccacaccggcgttgctggaattgcacaccctgcaggcgctcgacgcgacccttgcgggcgcgtccttgcgcgaaacagccgcagggttgttcggcgccgaggcggtggccgccgactggtacacggacagcggtctgcgctcgcgcgtgcgccgcctggtacggcgtggccaatcgctgatgcgcggcggctaccgccgccttgcacagctcgaatga

SEQ ID NO: 357709 - DNA, 210 bp, Pseudomonas aeruginosa
atgagccgcaacaccacaagcaacccacggatggcggcgacctatgcccccggcacggtacgcgcccgtcgctggcatggtgacggcgacgtgcgcggctgccgtccgcctcgcggctggacggcccgcgccgacctgaccgacctgcatcccatcacgggccgcgccttgccgcgtgccgagtggtggattgtcgaaacgaaggaataa

SEQ ID NO: 357710 - DNA, 1035 bp, Pseudomonas aeruginosa
gtgattgccgccaacgatggcgagcagtacgaggtcgtcgccggcgaccgccgcctgaccgccttgaagctgctggcgaagaagaagcgcatcctcgcagacgttgaggtgccgtgcctgctggtggccgacgcttcggcgcgaaccgtcagccttgccgagaacgtgcagcgcgagaacatgcactccgccgaccagttcgtcgcctttgccgcgctggtcaaggagggccgtcccatcgaagacattgccgccgacttcggcgtgtccccgctggtagtgcagcgccgcttgaagctggcgaatgtgtcgccgcgcctgctggccgactaccgcgccgaggccgtgacgctggagcaattgatggccttggccgtcaccgacgactacgccgcgcaggaagcagcgttttacggtgcgtcgacgtggcagcgcagcccgtccgcgctgcacgaacgcctgaccgaacgtgaaatcaacgccacgcatccgctggtgcgtttcgtcgggctggacgcctacacgtcggcaggcggcatccgccgcgacctgttcgccgaaggcgatgccggaacctacctgactgacgccacgctgctggaagcgctggtgcacgacaagctcgacgcgctggccgaggacgtacgcgccgagggttgggcatgggtggatgccacgccacacatcagccacgccgaccggcaggcgttccagaacgcgccgcgccagcgccgcgaaccgaccgcccgcgagacccgccgcattgcctcgctgcacagccgtctcgacaaaatcgatgccgagctggaagacgcctacgacaccgagaggagggcagggtggaaacgctcgaacagcggcgcgggcaggtggctagtgaactgcaagccgtggagctggatgcccgccatcttccgttccgaaggcccgcagcaggccgtgcaggaggtgacggcggaagccgaagccgaagcgccggaggatgccgccaccgtggcggatgagcagccgcaggcagaagcattggccgcgtga

SEQ ID NO: 357711 - DNA, 207 bp, Pseudomonas aeruginosa
atgaccgccgttaccaaaaccgaagcccgcgccgtcaccaccgcgcttgaagtggccgacccgaccaagaacctgattctggttccgctgtcgcggctggtggcgcgccgctccaagcgcaacgtccgcacgaccgcgcgcatgtccatccccgaactggccgcgcgagcatttcccgcgtcggcctgctgcaaaacctcatcgtga

SEQ ID NO: 357712 - DNA, 810 bp, Pseudomonas aeruginosa
atgagttcaccccagactacgaacccgcagcaagcctgcgaggccatcctcatcgaaggaaagcgctacaacatcgagcacggcatcctgcccagcgagaacgccgtcaccgaccgtctgctcgcccgtggcatcgagctgagggacgcctacggcgagttgtacgagaagctgcacccgcgcccgccggcactcaaggtcttcctggaccttctgctgagtacggcggcgttctggagcccggagaagatcgcccaggcacgtgtcgcccgggacgagctggccagcgtcaaccggcagatcgcgcggaaggccgaggaactggcgcaactgctggagcggcgtaccgacctcaacaacacctccggtttcagcagcgaaacgcactaccacgtctgcgacgtgatcgaagcggcatccgagcacaactacttgttcaactcctgggtcaaggatcgcctggatgcccttcgcggccagttcgatctgaagtactggccatcgctggatcagttccttcgagaactggctgccgatgcggagaacgccggcatgcaagccacagatcctttgactgcggcggccaccgtggcgtcgcgcccgtcacgggccgacttcttcaaggcgctgttcgcctccatcgaggaaaacagcgcacgtaactacgggctgctacccaggggcctcaagcttaccgacggcaccctggcctcgttggcgaactgcgcattggaccttgggccagacgagctggcggacagcacctatgtgaagcggcttcgccagcgtgaacgcaacggcggcaagtga

SEQ ID NO: 357713 - DNA, 2883 bp, Pseudomonas aeruginosa
ttgacgacacagcagcttctgacgccgcaccagagccagtactttgcttggctgctgaccaggcgtgcagcaggcgactccgtggagtcgctggcttcgaccttagtcgattcgcaagtcgatctgaatccccatcaagtggaggccgcgctcttcgcttgccgcaatcccctctcacgcggcgtgatcctcgccgacgaggttggtctgggcaagaccatcgaagccggcctggtcatctcccaacgctgggccgagcgacgacggaagatgctcatcatcgtcccagccaacctgcgcaaacagtggcatcaggagttgcaggacaagttcggcctgcaagggctgatcctcgaagccaaaagctacaacgcgatccgcaagcaggatcggcagaacccgctcctgttcgcgtccggcccgatcatctgttcctatcagttcgcgaaggccaaggctgacgatgtcaagagcattgactgggacttggtcgtcctagacgaagcgcatcgcctgcgtaacgtctacaagaccagcaacgtcattgccaaaacactcaaggaggcgttgtcgcacgttcactccaaggtgcttctgaccgcaacgccgttgcagaactcgttgctcgaactctatgggctggtcagcttcatcgatgaccgcgtgttcggagaccttgacagctttcgctcgcaatttactggccgggaacaggccttcaacgccctacgtgaccgactggctcccatctgcaagcgcactctgcgcaaacaggttcagccctatgtgtcgtatacggcgcgcaaggccatcatccaggaattcacgccgtcaaacgaagagcaggaactgtccagactcgtcgctgattacttgcgtcgccccaacctgaaggccatgcccgagggacagcgccagctgatttcactggtgctatggaagttgctcgcgtccagctcgcacgccatcgcaggcgcgctggagacgatggccaaacggcttcagggggtgcttgacgaaactgccgagattcccgatctggccgaagaactcgacgaggactacgagtcgctggacgaaaccgctgatgagtggagcgagcaggaagccgcttctacgacgccgagccgctcagagcggaatgccatcgcgcaggagatcgaagaacttcgccacttcaaggcgctggcaaccagcatccgcgacaacgccaaaggcaaggcgctgctcactgcgctggatcgcgccttctccgagctggaccagttgggcgcggccagaaaggccatcatcttcaccgagtccaagcgcacacaggagtacctcctcagcttgctggctgacacgccctacggcgacggcatcgtgctcttcaacggcaccaacagcgaccagcgtgcgcaggcgatctacaaggactggctcaaacgccacgaaggcactgaccgcatcaccggctccaagaccgccgacactcgtgcggcactggttgagcacttcaaggagcgcggcaaggtcatgattgccaccgaagccggcgccgagggcatcaacctccagttctgctcgctcgtcatcaattacgacctgccgtggaaccctcagcgcattgagcagcgcatcgggcgctgccaccgctacggtcagaagcacgacgtggtggtggtgaacttcgttgatctcagcaacgaggcggacaaacgcgtctacgaattgctggcgcagaagttccaacttttcgagggcgtgtttggcgccagcgacgaagtgttgggcgcaatcggttcgggtgtcgatttcgaacgacgcatcgctgatatctaccaaaactgccgagagcccgaggagattaaatccagtttcgagcaactccgacttgacctttcgggagagatcagcgacgccatggtcaagacgcgtcagctcctcttggagaatttcgatgaggaagtgcaagccaagctccgtgtccgcgcggaagatagccacagcgcccggaacagattcgagcggatgctgatggagctaagctgcgcggaactgggcgaatttgccagcttcgatgaccacggtttcctcctgcagcgtgtgccggacggcattgatgccagtgcacgcgctggaatcgagctgggacgttatgagctgccccgtcgctccggcgacgcacacctgtaccgaatccatcacccgctggcttcatgggtcaccgagaaggccaaggcccgtacgcttgaagctgcgaagctcgtcttcgactacgacgcatacggtaccagggtgagcaccctggagccttatcgcggcaaagcgggatggctcacactgaagctgatcgaagtcgatgcgttgggcaaccaggagcagcacctgctggtaacggccatcacgtcggatggcatcactctgctggaagacgatcccaggaagttactgcgcctgcccgccgttgcccagccgcccagcctgctcagcagcgcggccgactccgcactggcgtccgacgtcgaagcccgcaaggccgagctgctgcgcgagatcaatcagcgcaatctcggttacttcgagcaagaagtacagaagctggatgcgtgggctgacgacctgaagttgggccttgagcaggaaatcaaagagatcgaccggcaaatcaaggaggtgcgcagcactgccgccaccgcgccgacgttggaagaaaagctgtcctggcagaagaagcaacgggagcttgagggcaagcggagcaagctccgccgcgatctgttctcccggcaggacgaagtggaagcacagcgcaacgggctcatcggccagttggaattgcagcttcaacagcaagtggaggagcacatgctgttcaccatcgagtgggaactgaaatga

SEQ ID NO: 357714 - DNA, 162 bp, Pseudomonas aeruginosa
atgctcggaaagccgcatgaaacaagctttcccgagaagacttttaccgtcaaagaccggtttggtccggatagtaaacgggagggtcttaacccggcccccggctcgtaccgtcagttctaccgccagcctgttctgctggccggcgatagtcaccgatag

SEQ ID NO: 357715 - DNA, 597 bp, Pseudomonas aeruginosa
atgtacctagaaaccgcagccgacgatttcccttcattaatcggaagaatttttcctaaaaatcaggagacgccagagggggggggaggtgaaaaatccaccgcccttctaggcggaaaccgcagccgaactcattcgcagattatttcgcctttttcaggaccggccaacatgcgccacttcacccagaagcaacgagcgttcatccaagctttcatacgatgccgaaatggctatagagcagctctagaggcaggctatgccgagccagatgctcgctccagagcatccaagctgctagccaacactgcagtaaaaaaggaagtagaaaggttggccaatatagggaagcaaggccagccccaaaggctacccagtcagtacgatgacccgttgaattttctaacatcactgatgcaagacgagacggtcgatttgcgacttcgtctagaagcggcaaaagccttactgcccttcaagcacaaaaagaaggctggagttggtaccaaagaacagaggcaggaactagcgagagaggtagccggacgtttcgctccaaggcaaccacccctaggcactattgtttcaatccgctag

SEQ ID NO: 357716 - DNA, 936 bp, Pseudomonas aeruginosa
atgagcattgaccaggaagatattctcgggcaacagaatgagttcgaggacgaggataccccgcctgccgaaaaaaagaagagcaacaagaacggccagctgctgacttatgggacgtacgcttttgcgtttctcattgttggcttcgcaatgttcaagattttcggcccccggttcttgcatagcgatgaccaaggttacggggccgctccgatcactgttgatcagccttctggccaaggagcagggcagtacggctaccagggccaggggtatcagccacaaccgcagcccgccgctccggtgccggtgccgactggtcagtaccagcaggcgcagagctatacagcagatccgcaaatgcaggctgcggtgacggcatccgaaccgccggcacctccggccacgcagcagcctgtcactccggtcgaacatgctgtccagatgcagccaaacatcacgatggaggcgcaagcggcagctgcggcgccgataccgacatcgggccaggaagcggcttcgattgctcaagttcagaagcagttggagcagcaagatattcagttgaaggcaattcaggaaacgctggacgagatcaagaaatcgctgtcaacaaccactgccaagccggcgctaaagccgagctccgcgagtaagtccagcgcttcccagccagtctcgcagaagaagccgcaaccacaactgcaggctcagcgccaggtccagaaaactcaggctggatcgcgtcagcagaaaaactcgccggccagcatgacgctgaaggctgtgctcgatggccgagcgtggttcgtgacgaagggtggggagagcatcagcgtttccgttggcgacacgatcccaggagtgggatccgtgcagcgcattgatccagaccagggtcaagtgatcatgtccaacggcgtagtttaccgctga

SEQ ID NO: 357717 - DNA, 498 bp, Pseudomonas aeruginosa
atgaatctaaccatcgagctagtccctagatcctgctggtacagcaacgtccgatcgaacgtcagcgaaaccacctggagtcggctgaaaagcatctgcttcaaggccgccaactaccgttgcgagatatgttcaaatcggggccttcaccatccggtcgagtgtcacgaaatctggcactacgatgaccaccggctcatccagcgcctggatcgattgatagcgctctgcccgaggtgtcaccaggtaaaacatatcggtctcgccatcgagcgcagcgagacccacaaagccatcgaatggttgtgccatgtgaactccataagccctgatcaagccctacagctggtgaagcgcgccttcacgatccacgagatccgctccgcttacagctggtcgctcgacctctctctactctccggctactaccaggtgaagctcgctccggataatcgcgaagtcggcgtcaacctcccatcaccaacaagagttcaatga

SEQ ID NO: 357718 - DNA, 909 bp, Pseudomonas aeruginosa
atgaggcagctggcatcgagcgttgttcgatggattcgagacgatctcggctatcctgcatcgctccacgatgcgctcaggtctgcgcaggttagagctgggtcgctgccggaagtacccatttcgatcgccgcatccagcgttgttcgttggcacgagtgggggagtatttgcgacagtcgcggaccacgtttcgctgcgggagaaatgctcgggtggcgcgagcgaggagggcattacagcagcttctatctgacccgggacgatcttgcccggatcggcactcgtgaagtcagagagctctgggagtgcgaaatccaggatgtcgttgggctgtcttcctcgaagtctgagcttcgggacttctccagtctcgacgacctagtcgagagaaactctcgatccatgattgagccagtatcggccgagacgctggatcgaaatctggcttggtccgagatccgtatactccaccgcgacagcacatccgatcactttgcttgctaccggtgggacgggcgacttttcctgatgaatgccggcggctcgcaccatttcgctgctgctcgctacatcgcgtcccggctatgccgccgagttcccttgcgcgggcgtctggtcgtttatgggcttaacagctcttcaatcgcctccttggctcgggacttcgagatattcgtaatatccaatgaaccagcgagttacctggcgtttcatgatgctatgacggcttgtcgggccacttatcttcatcgggccttgcctcgcccctatagtgactgtcgtgccgtgttccttccgcgttcagagtcgcgttcctcccgggtcgctgagctgctgcgtaatgaggggttctttgatcttggggcattcctgcaggagctttctagtcgggaatgccgttcttag

SEQ ID NO: 357719 - DNA, 231 bp, Pseudomonas aeruginosa
atggccagtcgccgccaacccttcacttcgtgcaaattgtacatcgacggcgcagacggactgagcgccggcgattatatcgtcacgtctggtgggtcagcctatctggtgcaagcgactcggcccagcccgagcaaacctgagcgcctgtatctcgactgccttcgctggttgccagaacagattccggctgacgccaggcgctaccagctcaactggtaccgccgttga

SEQ ID NO: 357720 - DNA, 237 bp, Pseudomonas aeruginosa
atgagcaacaagcagattaccgttccatccgaatatgccgggtcgatgctggacttgatcgagcaacgcattcgcgagatcggcaagagctatcaggcgaatggtcagagttatcaagatgacctggagatcactgcatttttggctatggcacggcagctgggtttcgatttggaggttcggtcatgcgagtctggttttatggttactcggcacgcatacaagccggccgagtga

SEQ ID NO: 357721 - DNA, 201 bp, Pseudomonas aeruginosa
atgaatcgtttacgggtgctgaagcagcgtgcagcgcggggcatggccggtgtgtgcgaaaacccggatggctggtatgccgcccatggccgcggctggggtgactgttgtgggccgttatcgctgcgtcaggcgatccagctggctgccagatgggggatgccgacgaaggcagtcgatatcgtggttatgactggttga

SEQ ID NO: 357722 - DNA, 465 bp, Pseudomonas aeruginosa
atgtcgaatacaagcattttgagcgatgccgattggccgcataagcgggacgtcgtcgtgctggtcaagcccagtgcgcgcaagcgggtaggtttcacccttttgggcatcgccattttcctttgcggggctatggcagtcctcggcgaacgtggtcctgttatgtcgtggcttcagtccattgatcgtgaggccgaacgcgctaagttggagccggagatgcgcaaacttgctgagcagggcaagtcggaagcgatcgtctggcttgcgcagaacttcccgaaggagaacagggctgctctcgaagctttggcgagccaagggaacggagcggcgctcttcaccctcggggcgctgcgcttccatgacggcgacaaaggcgaattcgagtcattgatgcagcaggcagcggaggcaggtaacgctgacgctcttcgcttcatcaagcgccaggctgagcgctga

SEQ ID NO: 357723 - DNA, 498 bp, Pseudomonas aeruginosa
atgattgctgagtgtatcggttgcgggtgcactgatatgtgcgcctgtgtttcggaggacgggccctgctactggctgcgggtggattacagccgcggcgagggcgtctgcagtcgttgccccgagcgggtggccgaatgggatgctgcgatcgggcgcaagtcgatcgacgaccagttcattgagctaatggatgccctcgacgggtacgacagcccggaagcgatcagtcagcggctcacggagctccagggcatgattcgggacatcgcggcggcatgccggcagacggtgctattcaaccgagctcaagacgagttcgagtcgaccaaggccgacatcgagctgcgaccggaggatggcggtagcctctacgccgcgtggtatctgctgatggaccgcatagcacggtcgccgaccaggttccacatgcggagttcggtgaggatcctgcttccccttgtcgcggtttttctgccggaggatccgaatgcctga

SEQ ID NO: 357724 - DNA, 480 bp, Pseudomonas aeruginosa
atgagctgctgggagcagagctgccgtgtgcagaaggtgctgcagcgggatcgtctgggatgcggggtggcctgcgccgcgatggtgtcaggcaagccctacggcgtcgtgcgacagctgttcatagacaatggcataggcgcccggaagaaacggcctctcgccaccaatttctcagagctacagtatgctctggcgctccttgggattgagtctgagctgaaacgttggagtggttgggatgctgttgaagggctcggcatcgtggcggtgagtaacggccagggtgctgccagctggaactggcattggatcgtggcggagcggcacgcgagtttcggtatcgttgtccatgatccggatttcgatctgccgagcttcagctcggcaccatcacctgatgtgcattgccatccgttctcggagtaccaggctcgcaagagctggattcgggttacgccccgagggacccatgggtaa

SEQ ID NO: 357725 - DNA, 462 bp, Pseudomonas aeruginosa
atgagcaatgaaaaactcccggatcgcatcaaggcaacgcttaccatcgagctggattttgcgaaggaagatcaacctctaataggtgaagtcctgcaggggatcatcgagaaccttggattctccagcgagggcaatggctcccgcacaacgcagagccattacagctacaagttggaatccaacctcccgaaagaacctatgacgatggagcgtctgttcgatctgatggacgaggcacgtgagccgggtgagccgactgctgtagaacggatcgccgaatccatgcacccgaattacgacgaggcgcaggactggtgggagagtctggtcgaagcgcagaaacaatggtttatcgagaaatacccggaagtgaagatggtgactaaggcctgggaagtgcacaaagacatggacttcgccgaccgggtctttttccagaccttgaataagtcgaactga

SEQ ID NO: 357726 - DNA, 243 bp, Pseudomonas aeruginosa
atgagcagcaagccctatttgaacctaactgccttccgcatcgagcagggcaaagcgacgaccgaccacgccggccgcgacctcgacgaggccgaagcctgggccctgggccagttggtcaagtgtctgggttgggcggactgccgcacgaaggcggtagacgatgccgaagcgcatttgatgcaggaagcactggccaagctgcagcgcgtgttagacgaggctgacataagcccccgatag

SEQ ID NO: 357727 - DNA, 345 bp, Pseudomonas aeruginosa
atgaacggaaagttacgcctaactgcggtgctgcttggcctggtagcacctcttctaaccagtgcagacactttaccgatgtgtgcagaagaggccgctcagaagagtgctgtggaaagcctgctattcgaggctgtgatgctccaggagctgggtgatccacctattgaagcgacctgcaccttctacgccaaccgcgccgcgttcctagcaagcgccctgaaggccaatcgaggtgctcgctggcttgcagttaaccaatttttaaatggacacgctgtgccgaacgacccgaagacccgccgggtgcgtacctattacgaatccaaaaccagcgaccagtag

SEQ ID NO: 357728 - DNA, 360 bp, Pseudomonas aeruginosa
atgaccaagcgcctgcagcaccaattcgaccgcggcgatatcgtttccctggacatgggcagtgccttagcgcatgcgccatgtaaagccctcgtgctctccccagcagcgtacaacgcactcgggcttgccctggccgttcccatcaccgaacacgacagcgcccgctacgccggctttgccgtcactatcctagttccagggcgaacgccggcgagcggcgccgccctgatcaacctggtgcggccggtggatcttgctgccagacacgcaaaactgctcggtcacgcttccccagggacgataagtgatgcgcttttacgtctccaaacgattttgggtaagcagttcaccaactaa

SEQ ID NO: 357729 - DNA, 438 bp, Pseudomonas aeruginosa
atgagcagcttcgtcaatgtcattttccgattgcccgaggacccagccgaggccagagccttcttggattgcatcggggaggccttcgagaacgacaaacccctgcagggtgcgctgattagctccgcctcgctgcatcctcaggatagcagcgcgatcgctttgccccctctttctgcgcctgagcagctcgcacctggcctgcagctggcgggcactattttccgccagatcgcacaagcctaccggcgcgactatgagcgcctggtggcagcaggtgtcgatccccagagcaacaaacatctgctggatgctgagatcgtcattcgaggcgcgatcaagcagatgaaccaggaggctcaacgcctcctctccaaggcagcaggcgagcacgccacggctgactattccccaaccgaccttcattcatctcgatag

SEQ ID NO: 357730 - DNA, 345 bp, Pseudomonas aeruginosa
ttggaggtgaatcgacgtggccacgtcaaagccctcgccggcgtagccaccttttaccggtgcggctacgacgagctgcgagaacaaactgccgcgtggcgtcacgaggcagatcgcaaccgcgaacagttccttctggtgaaggttctgcatcgcgccggcaatcccgaaaccgcaaatcgcaacctgcagattgcctacaccgaaaaccagcgcctgaagcagcgcgtcaacgaactcaacgaagagatccgctcaaccaggttgaggcgcttctccaaacagccgcccaacgagcgagcaactcctcgatcaacaacgccccgtgccacctgcgaattgtga

SEQ ID NO: 357731 - DNA, 417 bp, Pseudomonas aeruginosa
atgccggatctggaggcgctggtcgaagtgcaattgatggtcattggccggactccggccttctgcgacccgaccgatgtggtgtaccacgtcaccgaggaaggcgagcgttatgccttggaccatctgccacagccaccgaagaagtccaagttcgaggaatacctcgattgggattcctgcgacagctttggtgaatggctgcttggcgtgatgaagccgaagttcgaatggcgcggaagctgggggacgtttgagtaccgaatgtaccgctgccggtatagcaagcaacacccggaagtgaagggcgagtggtgcagaaccaagaaggacgccaaggccagctacaaggtcgccctgcggcaataccacgaatcgacggggctacggcgcccgtcagcgcagaaagccgcatga

SEQ ID NO: 357732 - DNA, 231 bp, Pseudomonas aeruginosa
atgtccagtaaccacgccaacggccgtattcgctatttcgtcaacgacacctcgcgcaagacgctcgcggccgcagggcgaggtcctgcgcgacaggccctggaaaacagtttccgcgaggtaacgcaggaggagtatcgccagttcaccgccgagaacgcccgcctgctgcaggcagtcctctcgaacgtcaccacttacattcccctcaaggaaggggtcgcggcatga

SEQ ID NO: 357733 - DNA, 789 bp, Pseudomonas aeruginosa
atgaagaaagtgatgattgagcgcctcgcgaacttgattcgccgcgcccccaaaaacgtttcggttaaacgtaagcgtaagcggctatcgttcgagataaaagcgccggcttatcagttgcacaccctgaatctatctgactatggagatggctcactcagtttcatcctggaaaaagaggccgacggtaatctgtttgtggtggctaagtccccggagacatacggccctgataaaggcgctatgacctcgctgtttcgagcgcaagttgcgagcgagaccgacggcgtctacatgatcactcaagtgaacagtctcctgaccaagaagttctcgatattgaagttggtgggggtcgccctgctcgcctggttgggctacctgttcgtcagcgcctatatcgatattgtttctggcaaggggcgcgatatcgagccgtcggctctctcgtcgctggatgcagtgcgtccagcagtaccggtggcgcagccccgtgccccaatccccatgaccgtccacccggtcgaggagagcatccctgctcacctacaagcagctcccgttgcggacgcggcccagctgcaggccatgagtcccgacgacatcgccaagcagatctacaacgctgccgaagctgctcggaagcaagggatgcgcgacaacgcgccggcaatgtcgagtgatgtggcgactggccttgaatccttcggcctggccccgagcatcgacgctgggcagtcggtagggcccggctgcgatcccaagctcgcattccaagtcgctgaataa

SEQ ID NO: 357734 - DNA, 318 bp, Pseudomonas aeruginosa
atgaagaacttgagcaccatcaccgcccagctttctagtcgccctcccctcaagctcgctctgcccacggcggctatcgcggctggctgcgtggccctggccttcgcgtacttccaggacagcgcccctcccctgcggcccgatgaggttcaggtggtgagagggttcataactcacactggagatcccgtattgatcgcggcctacaacgccgcggtttctgatggtgagctttccagggccgaggctgaaagccttatcgagagggcgaaggccgcaccgccaatattcctgctgaccgttccgccaaaaaaatag

SEQ ID NO: 357735 - DNA, 1578 bp, Pseudomonas aeruginosa
atggggcgggatctggtgatcatcgaggcgccgggaaagcttcggactttccggcgcctgtgcgagggggtcggcctgcaggccgacatttgcgcaaccatcggtcacgttctggaagcgccgaaagacctgcgcgaactgggcatcgctctgcggggcgaggaatatgtggaaaccaatcgtcgcccgatccgcgaagactcatttcgatacctgtgcgactgcctggcacgttgcaaagggcgagtgctgattgcaaccgacaatgatcaagaaggccatgtaatcgcagctgatgtggtcggtctcatggacgctactggctgcaggcagcctgcgtaccgcctggtgctgaacggcctcaccaatgatgcgatggtaaaggggctggctcagctgtctccggtcgaaatcgcgttgtccaatgccggcgtcgcgcggcggattgtcgatcgactcatcggtggcgggttgtctgatttttcaacgggccggaccgtcggtcgagttcagaccgccctcctctcgatcgccgagaatggactgcctcacagcctgatagggctgtcgatgccgtgctcggatggtggtgagccatttcgagcggttcttcctgttactggtgtagccaccccggccgagcttatcgcgcaacttgatgcgttgccggcacgcgaagttgcagtgtcctcgtcggcgcggttgaacgagccaggtaattatggcgacaccctactgtcgctaaacgctgctgcagggctgagcatttcccaagcagccgagctgctgcaggagctctatgagacgggtgacatttcctaccctcgcacgtcatcgcgtgcattcagtggtgcgacggctgaagtgctggaaaagctggccagggtgagggggattcgggcctttcgcaaagcagcagtccctgtcatccagtcggacggggtcgctcacgaggcgattcacgtactgaacaacgaactgttgcaacgactggatctagggcgtcctccttccctgcagggcagcttacgagaagccgcgctgaccattatcgcgaggcaagcatttgagtcggggctggtagtcgctcgtgagcgtccgaatctggacggcttgccggatgtcatcgcgggcctggattggagtcgtgatgcacggcggccgatgctgccttggcggcctgtctcttcggtcgcaacgaaggggggctcgcttgggctcgatgtctcactggtgcaacaaatgatgaagcacggtgttggtcgtcccagtacgtggccgtcccatgctgcccgcttcgcggaccgaggttttgtcgacgacgtctatcagctaacgacgaaggggcgtcgggtgcttgaagctgctccgcaagggcttcgagatgttctctgtacggccaggatcgaggacttgctgcaggaacgtggcagcgaggtttcacaaatggtcaatcatgccctggaggttgccctcgaaggcgatggcgggctggctgctcaactgataagccagctggatgttctgcaggacgatcaggatgaagaacttgagcaccatcaccgcccagctttctag

SEQ ID NO: 357736 - DNA, 1134 bp, Pseudomonas aeruginosa
atggagagaccgcctgttactggggtgttgttggccttcggcgcagcgcccttcaagttcgagaaagacgagtcggcaagcttctacgtccagttgcagctgccaactggcgagaccaaaaccctatggggtgtgggcttggaaaaagcactcgaagactctggggtgcaacctggtgaggtcctgactgcccagaacctgggacggcagcccgtcgaggtcgatatcaaggttcgtgacgaagacgggaaactcacgggggaggtccgtcgagaggtagtgcaccgcaacgtatggtcagtgatgggggctcctgagctcgactggcgtaactcccaggggcagagtggggagcctgagcaaggccatagcgcacaggccgatggcgaccccgcggatcctgcatcgactgaaaagaccaaggccagcaccgctgctcccgatactgatcaaatcttcgctgatgacggaaatgcgtctgctccggactccatgtcggcagggcctggagagaagggagcggtgcggccggatacgcggcgtggaggctccaggcgtgatcgtgcacagccgcggagtggctctccgtcagaccaagctgaagttgggccagctgcacagcatcaaggagccgttggcgccggcggtggaattggccctgacctggtctcgaaggccttctcggcgcctttcaacgtagcaagcgcgctcggcggcttgttctcgacctctttcaaggaggttggccggaagttcactgcgaggagcgtggacggctatggcgtgctggaagggcagctttcggatctcgccgaggccgtcgagcgcaaggccacatggttgcatacacaagggggagctgatggtgaatgggcgccgggctccgcgcagacggctgaggagctgaagcgcctgctaggagatttcgacaccctctccggccgctttgtcgacctagggagcaagcttggctatgactacgccgaaactctcgaaaaacactcaacttccatgaggtccgctctggataagttagacggaaagagcgaaataattgccgagttgcaagagcttgtcaggaaacttgtcgacaggctggagcagctgttctcgaatataaaaatgagtcgataa

SEQ ID NO: 357737 - DNA, 384 bp, Pseudomonas aeruginosa
atgctcaacagcatcccccagcatgaccaggatctcttcaaacagaccgtgctgcagcacatcaccaccaagctaccgactgaagagtgggagtcgttccgctatcactggtgcatggtcaaccagcgcatggatcccgacgcggagccgaatcctgacctgacgcctaatcaactcgtgaacgaggcgctgacctcaatgcgtaatgaggtagcacaccttctcaagagcttcgggaagcagatcgaggtcgttggcgaagctgccggccagcccgtctattttgcacggctcgctgggtactacttctggtctccccggccccacgaagaattgatgctcgacatcaacctctgcttccccagctacccgtgcggttggtga

SEQ ID NO: 357738 - DNA, 519 bp, Pseudomonas aeruginosa
atggctcgccaaaaccctgaaggcaatttcggcaagctcctggaggatgtaacccggggagggctgcgccatgcctcggcggaggcgcttgcggagctggccaagcagctctggtacggccagggagacttggtgtctgtgctggaggacgaggtttccaggcgtctacgtcaggtcgaccagaagcagcgagcgctgtacctggtggatcggctacgccgcttcccctgtgtaccgcgggagaaggccgctgtgctcaaagcgttcgtgtcgtcctggtcatcgctcaagcctgcggcgcggtcgccacgggcgagccagcttgtggccactcaccgcctggataagctcgcgttcgagtgggggctggaggaggacgtgagcccgcagatgaaggaagtcctgcagtaccaaacccggcactatgcggctacgcagggcgtgagtaccggatatagtgacggtactccgtcgccggcggaagaccgcagcagggcggtagtggctatggcgcggtaa

SEQ ID NO: 357739 - DNA, 648 bp, Pseudomonas aeruginosa
atgactatgatcgctgtgaaccggaatgccccgatcgcctaccactttctattcgcgcctcactctccggaacctgagggggttctcgttgacgctgcaggaatgcctgtgctgactgattaccaggcggtagattggaaggcgctggcgatttctgcccgttccgcaatcgacggtgttgtgcccaaaggtatacagctatttgtggctgatgatgctgccgacgtcttcgaggtcctcaatctctgcccgtggtcggtcagcagtcacgtggggagaggtgacttctacagtcgcttcaaaacggcggtagaaaagctcgaaatggcggatatgcgttctggcatcaccagcctctctcaatacgccgacgattatcatgtcaacgttccaagcgccggtcggcgccctccattgggcgggatcattatcacagtgaagtttcccaacgcttcgcatgtgggagactatctccacaatgtgacgcatgccctcttcggccagatacggcgcgataatggactggcccttggggtgggggagatgtcgccggcactgttgagctggttggaaaatcagtttggtgtcgcttatggtcggcgctgtgaatcgtactttgttgggacgacaaggccccgcccgcactga

SEQ ID NO: 357740 - DNA, 249 bp, Pseudomonas aeruginosa
atgagcggcgtcttgcagcgtgcgattttcagcagcagtttgccgaacgcttccaaccaccgcttttccaaccgcctgtacgctagccatcgtttctgcctggctgctcgcggggatactgtcctcggctgcactaccggcacgctcttgggccagcaggtttgcgtcgaccgcctgcttaccctcgaagagcgcctgctgggcagcgagctgttgcgtcatgattgcctggtggccattcactcctga

SEQ ID NO: 357741 - DNA, 336 bp, Pseudomonas aeruginosa
atgtctggtctggatcttctcggcggggttatgaccaaccgcttctggcagggccagcaagaggctggagccgagcgcggctggcaagcacacgcgggcatgcttcagcgcaagctggatcgggcgaaccagcagaatgttttcctgaccgcgctgcaggaggcgaataactacatcctgcagctcgctcttgatgctctgcagcgcggcgagactggctcccctttgctcagcaaagaggcgcgtgactcgcttcgtactcgttacctgtcccagaatctgaaggccaaaggttatgccctcaatgagggcgactggagcatccggcctttgtga

SEQ ID NO: 357742 - DNA, 804 bp, Pseudomonas aeruginosa
atgcgcaagaagaacctcaccctcgctgagggccttgaactctaccgagaaaaggtatcgatcctcaagaaggggtacacccaggagagctatcgcattgctcatatcctgagggctcccatcgcgaccaaaacgatgcgcgagatatccagccctgacatcgcagactaccgagacgatcggcttaagcagttgaaccagcgaactggaaagtcgatctcgccggcaacagtccggctggagatgtcgctcctgtccaatgtgttcgacatcggcaggatcgaatgggggacgtgcgacagcaatccagtggcaaacgtccgcaagccaaagtcacctcccggccgagatcgacgcctactgcccagggaagagcgcctcatcctgcgctactgccatggccaccaaacccaggagctctactccatcgtcatccttgccctggaaactgccatgcggcagggggagatattgaagttggaatgggagcacaccaacctgcggaaccgcatcgctcatctgccagaaaccaagaacgggtccaagcgcgatgtgccattgagcatcaaggcgcgggatgccctcattcggctgggcgtcaagacgaaaggtcgagttttcaactacacaagcaacggactcaaatcggcctggcgcatcatgatgcttcgactcgaaatcgaggatctgcatttccacgatctgcgtcatgacttctcccaacattgcaaatgtttcgcaaaacacagctattaccctgtagggggcgagcctgaccgcatcggcctcatgcgttgcgcataa

SEQ ID NO: 357743 - DNA, 474 bp, Pseudomonas aeruginosa
atgctagtagaacacgaggcgtgcacccgcctttttgaactgggcaccctcgacgtgatggaaattgctgccatcagcggtcacaagagcttggccatgttgaagcgatacacacaccttcaagcttccaaactcgtcaagaagctggaggggaacaagcaccgcggccagcaggtagtcatcaatcacctggtcccctaccccgccatcgcccagcagacgccctcaggcgtccttgtgcgcgtgctcgactttgagggcgtacaggggcaagggcaaacatcagaaatcgcactacaaagcgcccaagatgccctgctaaggcacctaatggtagcgctgcgcgataagcgcccgatcccggcacccgatcagtatctggagactgtcaacgaggcggacatcatcatgcttgaccctctctgcatgcacgccgaaccgccttcaggaggggctcacacttttttacagtga

SEQ ID NO: 357744 - DNA, 210 bp, Pseudomonas aeruginosa
atgcaattacatgaagcggccaaagtgctcgaagtgcagggcgatgatcaggtaaacctgctgctggccgatggctggaagctgttagccgttaccagcgggactgatgtgcgcgacacaacgcgcagtgcggtgtgctatgtcctgggcaagccggccgagaaaccggtcgagttccccgacatcaataatccgcgcgcgctgaggtaa

SEQ ID NO: 357745 - DNA, 192 bp, Pseudomonas aeruginosa
atggctgcacccgaaatcacccccggcatgacagctgatgattggtacgacgctggataccacgacaatcagaaaggtctgccgtatgaggccgggccgcacgacgaaggcgccgaggtcgtgcagcattgggatcgcggctggtatgcggccgaggccgacaagctggctgaagagggcgcggccgagtaa

SEQ ID NO: 357746 - DNA, 261 bp, Pseudomonas aeruginosa
atgaccgagcagcccattccccccgaagacgaagcccgctatatgcagatcatggccgactacgatgccgccatgcgcgaccactacagcggcccggtgcctatgtgccacttcacgccgatgacgtttcacagcaatgacagcgattcaggtagcgacggctaccagtgcgaccattgcgggcacagcgagtcgagcgctgaagcctgggccaaggtcgaggcgcgcaagcagcggcaggacgccgttgtcacgaactaa

SEQ ID NO: 357747 - DNA, 375 bp, Pseudomonas aeruginosa
atgcacgagccactaaccaagaccaaattcatcaatgccctggtcagggagcacgtcgcaattcaccagctgcgccaatcgctcagccgcgacactaaccgggggtatttgagcatcgagcttacctgtaaggggcgtgactcacaggaatgccggctgatcatccgagggaaccgagttggcacgcactggatgattttggatacaggattgccacacacccctgaaggtatccgcaaagctcatcacctggcgttcgatttagctttggcagctgtgacaaaaatcgccgacaagctcggagaaccggccagcatcgtgctgcctgaggttagctttttccggccctggtttaccgagcgggtcactgaatag

SEQ ID NO: 357748 - DNA, 234 bp, Pseudomonas aeruginosa
atggcaattaaacgaaaaaccaccgctcagcttcaggcccagtgcgatgcttggaacgagctgcatggtatcggcacgttgatagcttacgaggaaatccgcggggaaggggagactcatcggggcaagtccacgaccgaggcccagcttcttgaaggccattccgcagtgatctggctggaaggtaaaagaggttgtgtaagcctcgatcactgcatggctctggcgccgtaa

SEQ ID NO: 357749 - DNA, 1068 bp, Pseudomonas aeruginosa
atgaaatccacgcgcccacttggcaccagccaacctacacacatccagggcgtcccagttgcagaagctcccgcagcgaacctgggccgctcaatgagtgagattctcgctgcccagggactgcttggcgatgccgggggcagcccctcaacaacggatcaggaacagtcgaccgcagaaagttttcaccgtgaaaacaagccagtttttcacggtgaaaattcggttattgctcctcagaagcctctcgaaggccagttcatcccggccaaggaaggggtaaccctgctcgatatcgaagtgatcgatcggagcccataccagccgcgcagaatcttcaacgaaaccgctctcagtctgctggcggactcgattcaggcgaacggcgggctcaacaatccaatcgtggttcggcctaaggccgatggccgttttgagctcgttggtggtgagcggcgctggcgagcgcatgagattcttcaatggaaccaaattgaagcgtatgtccgcgatctttccgatgaagacgcggccgtacttgctgtaaccgacaatgattcgcaggaagctctaacggacttcgagcgggccttgagttacaagaacctgctggaccaaaagaccgtgaagaaccagatgacactgtctcgccgggtaggtcgcagcatggcgaccatcagtcgctgtctggcctatttcaagctccccgaagaggtgcttacgctgctcgaagatgacccggcattcatcggtaccaagcatgttgcggatctcgcagcgctggcagatgaagggcacaaggacctggtcgtccaggccgcccagctcatctttgacggcaagctttcccaggaagccgccgtggcatggatcaagacctcggttaagaagaatagtgaacagcctccgccaccacctgtaccagtgaagctctacgcgaaaggccgggagttggctgatctcaaagtgcgtgggcagaagatcactcttgactgcccgaagggcgtaaacccggaggaggttctggaactcatcaaaaagcacttcgatccaccatctgaggattga

SEQ ID NO: 357750 - DNA, 864 bp, Pseudomonas aeruginosa
atgaagcaactgttagccccgagctgcactcccgaagaggcctacatgacctgcacttctgcgatcattgatgaacagcagcgagacagaatgaggcgcgttcttccaagtatcacggccaacgcagctgattttatcgaaagagtcgctgccggatccacatgggaaataccatatctgaggtcgatcaaaggggaagaccctttcgtgatcgatgacattcgaaaaagcgagctggtttacctctatgactactatatggtgaagcgagagcctggccgagcgctctacgactctatcttggtggctgcaggtgatcattgtccaacatgtggaggaataggacagcctcgaaccctggatcattatttgccgaaagccaactatccgaagctggcgatcgttccccataatttgatccctgcctgccgtgattgtaataccgacaagcgcaaccccctgattgaccatccgcatcggcaaccgattcacccgtatctagacaaacgacagtttttcgaggaaaggtggatcagcgtttccgtatcccacaccagcccctgtacgatcacctatagcgctagtccaccggatgactggagtcatgaggacaaggcaagggcagtaaatcattttgacctgttcggaattgccaagcgctacagcatccaagcgggctcagaactcagcatcctgatggacttgcgcgggagctatttcagcaggctcccccccgaagcgttctctgatttcctccgctcaggcgctaatgcagctagcttgccgatcaatggatggaagaaggtgctttacgaagccttggcggatgatgtcgtattttgcaatgccgaactctggccgtaa

SEQ ID NO: 357751 - DNA, 1542 bp, Pseudomonas aeruginosa
atggaattttacattataggcagggaagataaattcccgagtaccggagttagtgctgcctatctgaaatacgaccgctggaacgatcacagcttcatcacgatgttctatgtgatcgtatttgacgaatctggccaagcccacgaccttgagaacgtcaagattggattcaaagggcaggatacgtctacgcccactcgacacaagcttccggattcttttgagaggcttccagagggcttcttttcactcggtaccaatgtcgaatactaccagaagattgcgaactcattctcggacgaactgcggtctgacttcctccatggaatgaatgacatcgttggcaatcctgaaattctggagacgataaaagatgagcccgttttttcaatctcgttgttgcgcgatgtcagcttgagcagcgtcaaaaatcaatttatgagagtgctccttggcggcgctgttcgaaccaatttttccttcgcctatacgaagcaagctgacagctctaccgccgggattgagttgagtttcgaggtagacgttgattcgacgcccctaacaaatgtgcacgcactaatcgggcgaaatggcatcgggaagaccaccatcctcaacggcatcaccaatgccattcacaatggccatactggcgcagatgccattcaccagtttaacccttgggggcaacaacgggcggttattaccccggatttcttcagcagcgtagtgctcatatcctttagcgcatttgaccccttcgatccgcctccagagcagcctgatccagccaaaggcacctgctttttctatgtcgggttgaagtcaaaaggtgaggacgcatggcatgagctgaagcgccgggacgcactcaaatctgacttccttgccggcatggaggggtgcctacaggatacgcataagcgcaatcgctggcggcaggccgttacaaccctgcaatctgacgagaattttgcaggtttgggattcgaacggcttctatcattgagcggcgaagaatggaccgagaccgccaacgaaatcttttcaaaccttagctccggccattcgatcgtgctgctgactatcaccaagctggtcgaacgggtcgaagaaaaaactctcgttctgatggatgaacccgaaagccatttgcatccgccgctgctatcggcattgattcgggcgttgagtgagctgcttctggatcgtaacggtgtagcgatcgtggccacgcattcgcccgtggtgcttcaagaaattccttcgtcgtgtgtatggaaaattcatcggtctaacttggtagcctcagcgcagcggccaacagtcgagacattcggcgagaatgtggggattctgacccgtgaagtttttggcttggaggtggcatcctcgggctttcatacactgcttgctgctgaagttgcagaaggacacagctttggcgtgatccttaaaaaatttggtgggagattaggactggaagggcaggcagttcttcgggcgttaatcgctgagcgtgattcgaaggagcaggcatga

SEQ ID NO: 357752 - DNA, 1128 bp, Pseudomonas aeruginosa
atgaaagcaatcaagcttctgcatgtgttgctcgattatgactacccgcaggtgttcattgcgagtgatctaattggtgttcgctacgtttgcatgatctctgaggtagcagctcaaggccctgcattcctctgtgtgccagtttcaggcaggcgttgtgacgatttactgggtgggaagattgacctgaggcaggtgtacgaggaaccagagattcccgagttctaccttgccacaccagacgacttgatcgagccgttcgatattgagcgtacgcagatggaggtagtgccgcaagagttgttgccagaacctggtttggccttttcgctcaacgacgaggttttgatcaaggcgcaagagctgaatgccaccgtcgcatatgcgtcactcggtgttccagagtctgtacgagagccacgtatcaggacacgcaagttgtccgccttcctgaatatttatcaaggggtgcttaggaatctggcaagagccgctgctaaggcggcgggcaagccgattccgaaaggagaagatccgtacgaatccgatgtatttggtttctgctacggttccttcactgttcagatgcgcagcgccgagccttgtgacatgttgggagagaataaggcgctgatcatcgcattccagacactcaatgagtttctggacgtggctgtcaataccgatgatgccatgcagttcctcaccaaactgaaggggcacgcagcttcatcgttgatcgggctgctgaacttcattacggaaaatgactgccaactcaccaaccgctggtcaacacctgggatgcacagctccaatcaaagccggattcgtgtcgcgaccgcacagaacattattcagcgttgcctactgcgcgaagacttgagcgtggagagccttgagttagttggcgtcgtggactctgctgatgctactactggcttttggaaaatcttcgtcaatggagttgcatacagcggcggagtgaaagaagactcgggtatcaaccttgcaggtattactctgcgtaatcgatacagatttcggtgtgaagagaagatcgagatgctgctgggcactggccgcgagatcaagaaaatcagcctcgtgggtttcgatccagcctag

SEQ ID NO: 357753 - DNA, 630 bp, Pseudomonas aeruginosa
ttggaccaacccaccgcgaagttcaaacacggtgaagcgccggaggctatccgccttggctttcatcgcagcaacctgcgccaggtcacccttttctttcgccgctcgaagcgctgcctgggccaacttgaacttcgagccgtccgggtcggcttcgttcggccagttgagagaatgtcgactcaggtcgatgccgtctggcatcttgaacaggatccggaaacgttcggggttacctactacggtggggtacaccagaggcaaggcgtccaggtccagaccgagcaggtcaaagagcacctgtcgcgtcgccggtacatcgtccacgtccagcgaacatacccgactgggcccgagcactacgcccatgttgtgtttcgggtgcttcatccagaacgcctcagcctgggctgggtcggcaaagtacccgccgggctgattccagcgttctccctttggcgctttctcgcccgggtcaatggggaccagtgccaacccgaattgctcaatgtagcggcgcgcccaggcggagatagggcgtggggaagtctgctcgttcacaggctacctcctttacctacagccgcacgcccggtcaggccagcgcaagcatcgcttgtgcccaactga

SEQ ID NO: 357754 - DNA, 702 bp, Pseudomonas aeruginosa
atggcaagatttctgaatacaagcgctacaaattactttctcgaagagctaatcaaaaatgccaaggaaaggctggtgctcataagcccattccttaagctaaacgatcgaatcaaagagctcctcattgataaggatcgtttaaaaatcgacgtgcgcattgtgtacggcaagagtgagcttcagccggaagaaacacgatggctaaatgagctggcatatattcgaactagcttctgcaagaacttgcatgcaaaatgttatttaaatgaagagctatgcattattggcagtctaaatttgtatgaatttagccaggttaacaataatgaaatgggcatattgatcgagcgtggctcagatattgagttgtataaggatgcctacgaagaggcacagaggttaattcgaatcagtgaagaggagaggatcagccttgagcgaattagcaatgactctgagaggaatgaggatggctcagatgaagagaaaacgagcaagctaacctcctccaagctagggcagcgatacaaattaaaagctgcagagttcctagataagatggttgaattgggctacctggaagtcagcagtggaaagcataagctgacaaaaaagggagttgacatgggcggggagtttaagataagcccgaagtttggagcatactttctttggccggaagatttaaaaattatttga

SEQ ID NO: 357755 - DNA, 993 bp, Pseudomonas aeruginosa
atgcaagatttgatggagagtggcgacaatggcgagttcgccatgctgggtgataagcttccaatatcaatgaaggctattcagagtatttacaatgaattaactggcaaaactgaaactattgggcaaatgcttaatggaaaccatgagatagaatactctgacatccagcaactgaattacaagatactccagcttcacgagcaatattcagtattggaaagcaattgcagcattacagtgtatcatataaatgatagcaaggagcagtttagctcttttgaacgtttttctatgtatgagaaaggctcaaaaagcccgtgtgagaatgtaagaattgagtataacttccttataattttgccagccacaaagaaaccacagtcctataagataaaaatcgacctgcattcgagggcagcattgaagaagaagatggactccgagatgggagttaatcgtcatataattagaatggtctctcttagatctggactgattgagattgactatattgattacactgttgccagaaatttcatgaccgcaattaatgaatggtatgctggcgtaaagaaaaataatggttttatggggtacggttggctgcaagataattcccaccggtttgcgtcgcttttttcgaccttaagccttttttgtctttttttagttatccattttaatagcaaattattgattcctgatgacgcacgcttgcatgatttatttgttgctataatttgcgtgtgcttctcggctgtctttgttgcgtatattgctgggcgttttggcagtgcctgtgagtcactaatagatgtgtatgcgccagtgtccggcttgaagttaaacaaaggtgatgatgatgttatgtgcgaccaggtgcgctcaaatcgagcgaaggtgctgggtggcttattctttgtgggaatgacgattatattaaatgttgcgtcttcctttatttttcttaagctaggaattagtagctga

SEQ ID NO: 357756 - DNA, 195 bp, Pseudomonas aeruginosa
atgactactgctttagccgtgactggcgccggtcttcgactgactgagcgtgttgaccaggcgctccaacagtatcgtttggggctgatcaccgctcaggagcgacaagctcagatcgataaggcgttcgccatctatcgcgccggcgtgaacgcccgcgacgacgcccagggcgagctgccggcgccgacgtaa

SEQ ID NO: 357757 - DNA, 186 bp, Pseudomonas aeruginosa
atgaacaaagaatcgaagcctgtggcagccgaagcagaaacactgccctgcaaacaccctttccaggagatgctgccagcactggcggtctggatcttcctcgccttcggcgtcgtgggcgtcgcgctgctttggaagcacatcatctgggcgcacatcattccccgcgctcttggagcgaactga

SEQ ID NO: 357758 - DNA, 1515 bp, Pseudomonas aeruginosa
atgaacaagccccgcaagaagaaaggccagcacctggagcgggaaggcgaccccgaattcctggccctagtggccagcctgccggatgataccgaggccatgcatgcgcgagctggcgtggtgcgagccatctataacgatgcggttgtcgccgcggaagactctgcgcgacggcgtgccgcccttgagcatgacgcgattgtgttcaagctcaacggttgcactttcttcgggtgtcgtggcgacgactccaggccgggtcgggtgctcgatgcgatgttcgccgccgagcctggccaggttccccattgggggcagggaggcgaattcttggtcgaggtcgatggcgtgcgggtgcttgtcgaatacgactgcgaggggctgcgctcggcgcccggtttcgatgctacggcggttgacttcgacaagccgtttatcagttctaccggctaccgtggcgtctacatgactgtcggtgatcacctgggacgcagccttgagcaagcagtgcgcgccgagatttccgctcagattgaggccgaaggcttgcagccgatcacgaaagaagacttgcgctggatcaagaagcgcccgcagtggctggccgaagcgctggacggcgtgacgcgtgacggccagttggtgatgttcggtgactcacccgccccgagaagggcgctgagcggcgccgaacggcagaagcgccgccgcgaaaaactcaagaagttgcgcgagctggaaggactcaaaccgtataacttggatctcgtcgagcggcgtcacctgctggaggcgtgcgatttctggtttgccttccgtgggtttgctctggagctgtccgaggcgccgaaggtggcggcgttgtatgagcgtcttttcgctgatctacctgagtttgacacggctgcaatggggcgtagccaggatgcgaaggtgctgagagatcagtggcaagaagaactgcgccggcggcttgccgacttcaaggaacagtatgccttggcccagcatttccgcgccgaggtcgagcgcttgcgtgacggcacggagacgcctgccccgctggtgctggatgacttgcattacctctggcaggcggtcgacgccttggagactttgcgcattgatcagggaatgcttgataacgccaaagttcgcgagcgcctggggcgggtgttcggctccacgccctggttcgcccaggacggtcttggccagttgggtcatagccccgacgtgtacggcgtactggactaccagaagaaggaggccgcccgcgcttttgacacggcagcgcaactgcgccgccagttggatgagctaaaagcgcagcgggcgaagttggcagagcggcttcgcggactggagcgcgagaacgcccaggttgtcgccgaacgcggtaaggcgttccgggcggttgaagtattacaagcccggttgaggcttcatgggatcgatggtgactatcatgagtccgatgaggaccgtcggacggtcgcaggaattactgattag

SEQ ID NO: 357759 - DNA, 645 bp, Pseudomonas aeruginosa
atgatcgtcattgtcggtggcaacaaaggcggatcggggaagactacgaccgttctgaatcttgctgtagctctcgcccgccgggaaggcaaagaggtttgcttggtcgatgcggatcctcagcgctcaagtgcaaagtggcatgctgagcgtgaggagtcgcagattctgccgatgatcactctggtagagaagcgcgagaacatcgcaagcacgctcaagactttggacgcaaagttcgattatgtgttggttgacgtagcgggccgtaactcgattgaacttatctcaggtgcaaccgttgcggacgtcatcatcgctccccatcagtgcagccagctggacctcgacaccatggaggaactccaggagcagtttgagcgggtacgagtgctgaaccctgagcttcgtgtgcttgcttaccacagcatggcgagcaccaatccagccgtcaaagagacggagcgaaaggaatttctaaactacctgcaggagttcccatcgatcgagagtcttgaggctgtcggcttctataggaaggcgtaccgggatgcgatttcgaatggtcagtcagtactggagggcgacaacgctcaggcagctgctgagatcgcacaactcgccaaggaggtgttcggtggctaa

SEQ ID NO: 357760 - DNA, 357 bp, Pseudomonas aeruginosa
atgcgttatagcattgagatacaggatgactccggtaaagcgtggtttaccggaaagggcactctcccgggagactatatgttaaagctcgtagcagaccggatgcctactgtagttgaaaaaggactagagttcgcacaaggtgccgtccctttctttggtggagaactggctaagatttgtaagaaagagggcgctcaggaagaactcgacaaagcagccattgagttgattttggcggttctggtggtcgaaagaatgttgggcactcccgaaaaagacctgaacgatagcgactactcattgataatttacgataatggcatcgtccgttatgatcgggtagttactaaatag

SEQ ID NO: 357761 - DNA, 411 bp, Pseudomonas aeruginosa
atgagcaccatttcagatcgcatcgtcgcccactcggttattgatgcggctcgcttcattgatgagtggcaggaggctgatctcgatcacctgaccgaaagccagatccgagctgctgttgcattcgccgtcaggcttcacgaaggctttcaagaaagcgtgctacagcggctcgtgaacgagtcctgtcacgacgagtatcttgagtacaaaggatgggaggaggcgttgctcaatgcggacggtcgcgttgcgagcagcccgtttgccgattggggatggtggtatcgcatcgccaacgtgatgctggccactgcctcgcagaacgtaggcgtcacctggggaagccgcgtccatggtcgtttaatggctatttttcaggacaagttcaagcagcggtatgaggattga

SEQ ID NO: 357762 - DNA, 1269 bp, Pseudomonas aeruginosa
atgagcaaacgtatcgtcgtcaccggcatgggcgcggtcagcccgctgggctgcggagtcgaacccatatggcaacgcctgctggccgggcaatcgggcatcgccacgctcccggcggagctgatcggcgacctgcccatcagcatcggcggccaggtccccgaccgtgcccgggacccgcaggccggcttcgatcccgacctgctgctggccgccaaggaacaacgcaagatggaccgcttcatcctcttcgccctggccgccgcgcaagaggccctggcgcaggccggctgggcgccgcagagcgccgaggcgcaggagcgcacggcgaccgtcatcgcctccggggtgggcggcttccatgccatcgccgaagcggtgcggaccaccgacggcaaggggccgcgacgcctgtcgcccttcaccatcccgtcctttctctgcaacatggcggccgcccatgtgtcgatccgccatggcttcaagggaccgctgggcgccccggtgaccgcctgcgcggcgggcgtgcaggccatcggcgacgcggcgcggatgatccgcgcgggagaggtcgacgtggcgctctgcggcggcgcggaagcgaccatccaccgggtcagcctggccggcttcgccgccgcgcgcgccctgtccagcgatttcaacgacagccccgagcgcgcctcgcgccccttcgaccaggcccgcgacggcttcgtcatgggcgaaggcgccggcctactggtcatcgaggaactggagcacgccctggcgcgcggcgccaggcccatcgccgagctggtgggctacggcaccagcgccgacgcctaccacatgaccgccgggccggaagatggcagcggcgcccgccgggccatgcagcaggcgctgcgccaggccggcgtggaagcggccgcggtgcagcacctgaatgcccacgccacctccacccaggtaggcgacaagggcgaactggccgccatcaaggccgtgttcggcaccggcagcgggctcgccatcagcgcgaccaaatccgccaccggccacctcctgggcgccgccggcggcatcgaggcgatcttcacggtcctggcactgcgcgaccagctcgcccccgccacgctcaacctggaaacgcccgacaccgacgccgagggcctcgacctggttcgcggcgaagcccggcgctggccgatggaacacgcgctgtccaatggcttcggcttcggcggggtgaatgccagcctgttgttccggcgctgggtgtag

SEQ ID NO: 357763 - DNA, 1653 bp, Pseudomonas aeruginosa
gtggcaccagcctcggcggtaccggcgatcacgctaccgttgctcggatcgatcaccggggctgctggcgccagcgagtcgacggtggcgctggtgggactgctgttgttgccggcggcgtcctgggccagcgcattgatcaccgtgccattggccaacggcgtagcgggcgtgaaggcccagttgccgctgccgtcggcggtgacctggccgatcgggttgccgttgccgtcggtgaggatcaccgtggccccggcttccgccgtaccgctgatgacgactccgttgctcggattgatcaccggcgccggcggggcgatggcatcgacggtgacgctggccggaccgctggtgttgccggccgggtcctgggccacggcgttgatcacggtgccgttggccagcggggtgctcggggtgaacgtccagttgccgctgccgtcggcggtggcctggccgatcgggttgccgccgccatcggtgaggatcaccgtcgcgccagcttccgcggtaccgcttatctcggtgccgttgctcggatcgatcaccggcgccgccggggccacgccatccaccgtgatcaccgccggcgcactgtcgacattgcttgggctgcgcgccaccacgttgaccaccgtgccatccggcagcgggatgcctggagtgaaggaccagttgccgctgccgtcggcggtgacctggccaatcgggttgccgttgccatcggtgatgatgatggtgttgccggcgtccgcggtgccgctgatcaccgaaccgttgctcggatccacctgcgggatcgacggcagcgaggaatccaccgtcgtggtagcgggaaggctggtattgccggcggcgtcgctcgcggtcacgttgaccacggtgccgttgggcagttgcgagccgggcgtgaagctccagttgccgctgccatcggcggtggtctggccgatcgggttgccgttgccgtcggtcaaggtcacggtgctgcccggctcggcggtaccgttgagcaggttgccgttgctcggattgaccacaggcgtgttcggcgccaccgcgtccacggtagtgctgccctgcgggccggtattgcccgcagggtcctgggccacggcgttgaccaccgtgccgttggccagcggcgtggcgggcgtgaaggtccagttgccgctgccgtcggcggtggtttcgccgatcgggttgccgttgccgtcggtgaggatcaccttggccccggcctccgcggtgccgctgatggtcgtgccgttgctcggatcgatcaccggcgccggcggcgccaccgcgtccaccgtggtggcggcctgcgggccggtattgccggtcgggtcggtggccgtggcgacgatcaccgtgccgttggccagcggcgtgcccggcgtgaagctccagttgccgctgccgtcggcggtgacctgccctatcgggttgccgccggcatcggtgagggtcacggtggcaccggcctcggcggtgccgctgatgacgacgccgttgctcgggttgatcaccggcgccggcggcgcgctggaatcgacggtcaccgtcgccggcgggctgctgttaccggcggcgtcctgggccaccacgttgaccacagtaccgttggcgatcggcgtggacggggtgtag

SEQ ID NO: 357764 - DNA, 129 bp, Pseudomonas aeruginosa
atgctgatgtgtgagccgatcatcgaggagacccggcaggctttgttcaccggcggctttggttgcgtgggctggcaattactggtgtgtcatgccagtcttggccaatacgtgagccaacacatctag

SEQ ID NO: 357765 - DNA, 291 bp, Pseudomonas aeruginosa
atgagtgagcaagaccagagcgattccgacatccattgcgcggtgtgtggagacgccacgcgtgtaccgggttacggccagcaattcggtaccttgcaggcgttgtgggggtatggctcgcagcatgatggcgagcggtaccaggtgcatctgtgtgaatcctgcttcttcggtgcgttggcctatctgcctcaggagcgacgtattcacactttgtttgatgacgagcaaccagcagacgaccaagtgtttggccgggtcgcccgcgatgacctttttggcggctcttaa

SEQ ID NO: 357766 - DNA, 420 bp, Pseudomonas aeruginosa
atgacgatgcgtatccacttgctgtccgatctgcacaatgagttcagcgcatttaccccgcaggtgctggacgctgaggtggtcatcttggccggtgacatcgatgtcaaaacgcgtggagtggcgtgggccaaacagaccttctctggccctgttctatacgtgccgggtaaccacgagtattacggcggccatctgagtcgcaccctagaaaagatgcgtatggctcaggatgagcgggtgcgggtgttggatcgggatgaggtcgtgatcgcgggcgtgcggtttctcggcgcaacgatgtggacggattttgcggccaccggcaacccgcccatcgcgtccttcagtgcacaaaatgccatgaatgatttccggcagatccgcacggaaaaactttcggcgtattcggcccagtga

SEQ ID NO: 357767 - DNA, 186 bp, Pseudomonas aeruginosa
atggatgctgcgtatgccaatcgctgggaagatcttataggtggcgagcaggtggtgctgtgggtgcatggtcattcgcatacggcggtcgattatgacgtcgcaggtacgcgtgtggtgtgtaaccccaggggctaccccggcgaagacaccggcttcaatgccaacctggtgctaacgctgtag

SEQ ID NO: 357768 - DNA, 789 bp, Pseudomonas aeruginosa
atgcaccgtgaaggtgaagtcggtggtgttatcgtgcgccacgttctgcacgatcatgtcgacttccacattggcggcactgatcggcccgaggatcttgaaggccacgccgggggtatcgggtacgccacggatggtcagcttggcttcgtcgcggttgaaggcgatgccggagatgatcggctgttccatggattcctcttcatcatcgatagtaatgagggtgcccggaccctcctggaagctgtgcagcacgcgcagcggaacgttgtacttgccggcgaactcgaccgcccggatctgcagcaccttggaaccgaggctggccatttccagcatttcctcgaaggtgatcttgtccagccgacgggcctgcggcactacgcgcggatcggtggtgtagacgccgtcgacgtcggtgtagatctggcattcgtcggccttcaacgccgccgccagggccaccccggtggtatcggaaccgccgcggcccagcgtggtgatgttgccgttgccgtcgacgccctggaaaccggcgaccaccactaccctgccggccttgaggtcggcgcggatgtgggtgtcgtcgatgtgcaggatgcgcgccttggtgtgcgcgctgtcggtgaggatacgcacctggttgccggtataggagaccgccggcacgccgcgcttgatcagggccatgctgagcagggcgatggtcacctgctctccggtcgagaccatgacgtccagttcgcgcggaaccggctgctccatgatctggttggccaggccgattag

SEQ ID NO: 357769 - DNA, 1083 bp, Pseudomonas aeruginosa
ttgattgctgacgttgagcgttttctgcgggaaaacccaggctcaaaggcaagggatattgccaagcatctaggggtggacaagggggaggtcaattcgcttctttataagagtcccgataagttcgcccaggatgctgaccatcggtggtcgatggcgaagagtgtgctgaccgtcgtccttaaaaaggaggcgtgggtggacagtgcctcctttgagggtgcgctggctgctgctgggtcgcccttggattctgcctgcacagacgcggtgttcgttgtgcctaagggctgcaagatcatgattgatgctgcggcgcgaatgcttgcgctatgcaatcagctcgtgatggttggtaaggcggtgtcgattgatttcagtgcctgcaaggcaacgctgacttacttcaatcggctaggtttttttgaccacctagctggggccgtgagtgtgataccggagcgaccctccctatcaggggcggcaacctaccgtggcaacaatcatggtgtggttgagcttgcaccgattgcacctcacatccccgatgagtccattccgaagcgtttgaaaaacagcctggtggagtgtgcaggtgaacgctatatgcagtccgcattcaccttcatttcggagctatttggcaacgtgagagatcatgcaaagtccgagattccgggcgttgcagctcttcagtactacccgaaaggccgcaaaattcagacagtgatctctgacagcgggattggtattgtcggaagcctacaacctgttctggaacggaagtacccagagctctttcagcagctcgatttctcgaaagcagagtcagggccggagctggtcttgcacgtcttcaagcaggggcgagtctccagttccgacgaagatggccgagggctcgggctgaaacgaagtggtgatatggccgctgatttcaatgccacggttacggtgagacagagaaactttgagctgacgatggtctacagcgatggtcgattcgaccgcagctacccccgaatggatatgccaaccatcctgggaacccatatctgctttgacttcttaattgacagctag

SEQ ID NO: 357770 - DNA, 183 bp, Pseudomonas aeruginosa
atgagcgccaacctggatatcgagctactgcgtaccttccatgccatcctgcgcttcggccgctttctcgccgcggccagccacctcaaccgcagcccctcggcggtgagcacccacgtccgcgcctggaggaactggccggcggccggctgttcgagcgcgacaaccagtcggtgcggctga

SEQ ID NO: 357771 - DNA, 1560 bp, Pseudomonas aeruginosa
atgcttgattatatcagaattaaaaaccttagaagcttagaagatacaaaagaagtttatataagccctataacggttcttctgggggaaaacagctcaggaaaaagtacattccttagaacctttccattactaaagcaaagtgtggagacaaatactcgaagccctgttttatggtatgggaaatatgtagattttggggattttgatcaggcattaagtagaaacaatgaaagcaaggaaatatcttttatcttcggactgactgtccctaaaatgcttgtccactcaccaaaatcatggcgaagagcctatagaacaacatccgaggaggcgaccttaaaagttatagtagaaatcaggttaacttctagagggaaagacggcttgacgagaactgccggcctcgcgctctctatagaagacaatgtaattgatatagggataaatgagcaaggacgagtttcgaagattcagattaatgacatcgattattcatcatatgcagatctgttttcatatacacaggccgtaaagctgctgcccaacatttttgcaaaacaggatgagccaaatctttatcgatggcgtactagaccgccacccgaaaagctacgccagcaaattttacgtatgttaagtgagtatatgcatggcaaatcgggcgaaaaagctttatcagcagcttattcgaacattagagctggcagccaagctcaaatgtattttacttttagaaaggcatcttctacgctgacttggtctaagcgtacaagtacaactggtagaaataccaagagtgttcgtgaattgctggatcttgtattattatcaagagttccagaaattatctttgccattgatgaggtgttagacgctacgtttaggcgagtgtcctacaccgcacctctccgagcatcagcagaacgttactataggtcgcaagatttaagtgtcgccgagttagatgcaaaaggtgaaaacctaacgatgtttgttaggaatttaagtgagcgagaaaagcagcagcttgactcctggacgaggcgggagtttgggttcaagctcgaagttaagtactcgggggggcatgtaacagcaggtatagagtacgaaggctcaggtgaaagctttaacttaaccgacatgggctttggcttttcgcaggttatgcctattattgtccaagtatggactttgatatatcgtgccaatcgtctgccagaggatgagttcgtatacacctatgtgattgagcaaccagagcttcatttgcatccacggctacaagcaaaactggctgaagctctgataactgctgttactcaagcacgaaaacatgctatcaaaataaacctcgtactagaaacccacagcgaagcaataataaacaaaataggactaatggctgcttccgaggttataagcccttcagatgtaaatataataatattctcgaaggaaaccgaaaggacagagacaaaggttagtgtcagcaactttgatgaaaatggagttctgatcaactggccatacggtttctttgatatcgaggtctag

SEQ ID NO: 357772 - DNA, 1077 bp, Pseudomonas aeruginosa
atgttcctatatcttgacaaatcaatattaaaatgcctttctgatccagcaccccataacgtagtcgatggaatacaggtcttagctcttatgttgagatctggcgtgcatctagtcagtggtgatcgggaagtattaagtgctctatcagagttttctgacatttcgacatccgccagggccatattcaaaaaatcagttgcccgacatgcacagaccggttccgtgtttaaatccatgtctacttatgcactaatagactttgggcggaatggcctagagtcatcttacgagaacgacaagaaaataataaaaatccctattgaacatgtcgcaaatctagtagcccaagcagccacggatattgtttacgaggatgtgaatgacgccctaatatacgacgcagtagctcgctggtactccagtacaatcctaaacaatccaaacttacccactagatcaaccccaatacagggtggcggatctagaacatttgctgcctacgacttaaagcagaaagatgctaatactttttgtctttgcattactgatagcgataagaaatatcctgacgacgaaccgggcgaaacctcatcaaaagttagaaaaattgaagatgcgaaaaagcctctttcctttcacctcgacctggattttcatgagattgaaaatctaattcctttgagttttttggatcgacttgcaggaacagaggaggcgaaaaaaattattgcagagcttcgaaaagccgagaataatcaaaataaagttgcaaagctatattgggacttcaagaaaggcttacgaggccattatgtaaaaacatgcgaaggttttaggggatattggcatcaagcgctagatgcggcacctttgacatgtgctgtggaatgtacgcttagtagatgtgattgctttttaataaagccttggccgcttaagcaggatcttaagtccgctatcgagcgaaaagagactatggatccttcagagtgtgaagtaactcagaacttatggagtgaaatcggaaagacgatagtgagctggacaattagctcatcgccgcagctagcgtag

SEQ ID NO: 357773 - DNA, 678 bp, Pseudomonas aeruginosa
atggatataaaaagcatcaagtctcttattgcgtcctctcccccggcatcagcccttatttctggggttaaaacaaacactgttgggcaaaacgtgtcgtttcagctacttcacggatgggacatcgagctagcccataagtgtgatactgaatggaccgcaaaaaatatcgaaatacttcgctgcgtgcaaagctcagtggcaagtgaagaagaattactaaaaaaaatatctgacctgcatatggaggacgctcactggcgatggaccgctaaagctattcatcatattgcagaagattatgactggtttttttataaggctgaggatgccattcaggctgcttgtcttatatatcatccgaaagatagtattatagatggtcaagggattttttacatagagtatatcgcagtggcaccatggaatagacctaatccgttgagtgttgcacgatttaaaggtataggctctgatttaattaggtatgcgtcaaagtacgcgactgacaccttgggtctgcgccctggtttttcattgcattcgttacccaaagctgctgcgtactacaataagattggcatgacttgcttccccgagagaaataaagagagccttgattattacgagatggctagggaagccgctcaagtattcggagctgcagccaatggatga

SEQ ID NO: 357774 - DNA, 804 bp, Pseudomonas aeruginosa
  misc_feature (10)..(19): n is a, c, g, or t
  misc_feature (221)..(221): n is a, c, g, or t
atgcatgctnnnnnnnnnnctcaagacctaaatttcaatccagtggttggggtggatcgtaccgctgatcgaaattcttgtgtatttacacctgcgattactagagctgtgaataacaggcgaatcgctttgcgtgtttccagcgatgatctggtcagttatagccttattagaacagatattttggatctcatatccatggggaagggtatatatgatcnatgggtgctcgttatagacaacagggtttgcaagggcgttgacgcgattgctcgtggcgcgcagataaaagcgttttgtgcagcagcagttgcggatcatgcatacgaagctattgttatcacaggttctacacttccgccagtagcaggcgacatacttccaactaatagcgaaaagcatctggatcgcaacgaaattgctatctacagcagcgctatctctggactcaccggtcataatgtgatttttggggactatactattgtgagtcctgactactcggactctgatattgatccgcgaaatatgctaaacgttactgcacctaaggttgtttactcttatgaggataagcactacatagtacgtggcggggggattaagacacatgcacgagggtttaagcaatacaacgatatagccgcaactatagtcgcaaagagcttcttccggcacggaaattcggaaggcgatttgtatctggttgaaaaagctgcagggcttggatcgacggtcatgcccggtagtgtcttaaaacctacaattaactcccacatctcatttatgcttgatcttttgtaa

SEQ ID NO: 357775 - DNA, 948 bp, Pseudomonas aeruginosa
atgagtgatatcaaggatttaactgcattccctggtgttctaggcccgggccctctgcagggcgaacttttccatgtcgagcgtcagatcgagatcgacggcgtggaaatgggcgttctcgagaacggcgtcccttatttgactgagagcggcttggccaggatgtgcggcattgaccgcaaggttcttaaccggctcgctgttggctggcaagaggagaagcttaaggaacgcggtcgagcaatcaacgagatgcttgagatcgctaactacttcgagcctggtctttatctcaagtcagaactcaacggttctgagataaacgcctatacagagccagtctgcatggcgctgctcgaatactacgcatttgtcactaaggaacctcgcgctgaagcaattcgggctttccgccgtctagcccgtgaaactttccgggttctcgtatacaaggccgttgggtactcacctgagcagaaggtcctggaaagttggcgacacttccacgaccgtgtcgacatgactgccacatcagttcctttcgggtacttcagcgttttcagagagattgcttcgatgatcgtccccatgatccgcgccggggttatgatcagcgatcgcgtggtcccggatatttcagtcggcaaggcatggagcgagcactggacggcgaacaatctagaagctgtccacggagagcgccaaaagtacgatcacgagtacccgctttactacccgcaggccaagagcaaccctcagccatcattcgcctaccctgattctgcgcttggcgacttccgggcatggctggtgaagacctacatcaccaacaaatttcctacctaccttctcggtcaaacaaagaaaggcacggtgcttctggggacggcgaacaaagcgcttgaggcgttctccgccccagccctcccatcacccaagaagaagtga

SEQ ID NO: 357776 - DNA, 3588 bp, Pseudomonas aeruginosa
atggctgggggggtgaccggcggcacgggagaccagggcaaccctgccgcgtccaatgcgatcaatcgccatggagccgccaatacctccgacaagctcgtcgtggacctgggcagcaatacctcgagcgtcgacgcgaatgccaacgaactgtggcattccggcaacaagtacgagagcggtgtcgtgagcttcctggggagcaaggacacctccgagaaaggcggcgtcacgctcaagtctcagacggctcaactgcaaggcacgatcgccgatgcacagcgggaatacggtgaggccaacccggcgttcagcgcctcggtcggggttcccggcgacgcctccgagaacagtcgggcggtcaagggcgtggacgacttcgtcgaccggcaactgaatcaaaaccgcttcgacgtgaaggtttcgcccaccacgaccgccaccgtcgaatccaatgtgggcgactacagggtcgacggtagcgttcaagccgacggcttcgtcggccagcgctatcagaccacggtcaagcccggcacgctgcatgtcacgccagccgaactgatcgtcaccgccaaggacaaggagaagtcctatggcgacgccgatccggctctcgactacaacgtttccggcgccaagctcggccagaccggcgcgcaattgctcaatggcggcacgctggttcgccagcctggcgaagacgctggccagtaccgcatagagcaggggcagcttgcgctgaacaatggcttgggcggcaactacacactgaccttcgtcgacggccagctgcagatcaacaaggccacgctgctggttaccgcggacgataagagcaaaacctacggcgacgccgatccggccctgagttaccaggtgtcgggactcaagaatggcgacacgcgggaacaggttctcagcgccggctcggtgcggcgagacgccggcgagaacgtcggcaactatgccataacgaacgacgacctggcgctgttgagcagcaactacatcctgcagttccaggacggtgtgttcagcatcacgcccgccgaactgaccgtcgtggcggatgagaagcagaaggtctatggcgacgccgatccgtcgttcacttaccaggtgagcgggctcaagcgcggcgacacctctgcctccgtgctcaatggcggcgcgctcgtccgagagtcgggtgaaaacgtcggcaagtacggcattcagcagggcatgctgaatctcaacggcgacgcgggccagaactacgtgctgcgttttgtcgagggagatttcttcatcacgcccgcgagcctgaccgtggacgccgatggcaagaccaaggtgtatggcgacttcgacccggcgctgacctatcgcgtcaacggactgaagaacggcgacagccagacggaggtcctgaccgggctcctgcaacgagcgccgggcgaagacgtcggcagctacgacatccgccagggcagcctcgatctcgcctccggcaaggggcagaactatgtcctgagcttcacgggcaacgagttcaccatcacgcccgcgcgcctgaccgttaccgccgacagccagaccaaggtctatggcgacctcgatccaacgctgacctacacggttgccggtttgaaaaatgccgacagtcaggccgaggtcctcaatggtggggcgctcaaccgggcccccggcgaagcggtgggtgattacggcattagccagggcgatctcgcgctgaaccagggcaagggcggcaattacgtgctctccttcgtcaagggcaatctcgccatcacacccgccaccctcacggtcgaggctcaggaccagagcaaggtgtacggaaatgccgacccagcgctgacgcatgtcgtccatgggttgaagaacggtgacagcgcggccgatgtgctcaatgacggatcgctggcgcgcgtggcgggcgaggacgtcgggcagtaccgcatccaccagggcagcatcggcctgaacaatcttcagggcagtaactacgtgctccagttcgtggacggctcgctgacgatcacgccagcttcgctgagcgtcaccgccaacgaccagtccagggtgtacggcgatctcgacccggcgctgacgttctccatcaacggcctgaagggtggcgacagcgtcgctgacgtactgaacggcggccagctctcccgacagccgggagaggacgtcggcacctacgaaatcggccagggcgagcttgggctgggcggcagcaaaggccagaactacatcctcagctatgaggcgggcaccttcaccgtcaccccggcaaccctcacggtgagagccgatgaccgttccaaggtgtacggcgagatcgacccgacgctgagctaccaggtctccggccttaagcgcggcgatacctcctcatcggtgctgaaaggcgctctgcgtcgcgaggccggcgagaatgtgaaagccgatgggtacaccattgggcagggcaacctggaactgaccagccagaactacatcctgcgctatgaaggcggcgccttcaccatcacccccgcgtcattgcggatcgatatcgacgaccagacgaaagtctatggcgacatcgatccatcgctcagctatcgcgtctccggtctggccaacggcgacactgcgagaaacgtgctgagcggtacggtatcgcggacttccggtgagaacgtcggcgactatgcgatcgggaaaggctcgctcggagcgaacgccaactacatcctcaccgtcaacgacggcaccttggccattacacccgctgagctgacggtcagcgccgacgacaagaccaaggtgtatggcgacctcgatcctgtcctgacctacagcgtcaccggcctgcgcaacggtgacaacgccgccgaagtggtccatgggcagctcgtcaggacggcgggcgaggacgtcacgcccgacggctacgcaatctcccgcggcaacgtggtgctgaccagcggcaactaccgcatggttttcaaggacggcagcctgcaggtcaccccggcgccgttgaaggtgaaggcggacgacaagacaaaggcacagggtgagagcgatccgtcgctgacctacagcgtttccggactcaagcgcggtgactcctcctccgtcgtccaggggcagctttcgcggcaacctggcgaggaaccggggcaataccggatcgaggcgcgggaagggttcagcgctggcaacaattacacggtgagcttcgaagaggggagcatgaccatcactggtccgctggctcctgcgccgttgccaccgctgccgatcacggcgcaatccccggggaacacccgctgcacggccatcgagtcgccctcctcggtctccgccaactactcggtgtcgccagcggtcatccgtacctatgccgtccagctcgtctgcaaaccgcgttcctatggcgagaccgaaagcaccgtcccgacgcttctggacgtactcagttatgcgaacagccgtttctctgacggcaagttcatcgttccggactggaaccgaagcgtcattccccatcagcccagcaccactgccaagggagggaaatag

SEQ ID NO: 357777 - DNA, 648 bp, Pseudomonas aeruginosa
atgctgttcggccgccgaggatgcagcttcgcgccgcagcgactgcaacgcggatgctcgttcccgtcggcgcgattcaactggtggcactcgccgcagaccagaatgccggcatcgatcgcacgcattgtcgttctccaggatctctgccgggacggtgatggtttgtcgtcgtccagcgcggcggccaacctgtgccttgcccggcagggaatgggcacgggaaaccacctgtcgggggaggctgccgtcggaagacgattctgtccggggcgttacagcgatggcatgggttcggccactcacgcgcatcagttgtccgctcggctcgatctggccaggctgggccggactcgctattcatgccgcttggacgatgatcgagcgctgggatcgcatgatgcttatatagttcacatgagtcaatattgtctcatgtgtttttctccatcgcgctatacggagccaagcggcgatcctgccagggaggcatcatggcattcgccacggaaggaaggacccccggagagattgtggcgcgcctcctgtctcatgccgatgcaagtggcggtatcggccgagaatccctcgacaccgagaagcggcttttccgcgtccaggcatgggacgataggagcactcgggtag

SEQ ID NO: 357778 - DNA, 1098 bp, Pseudomonas aeruginosa
  misc_feature (1066)..(1075): n is a, c, g, or t
atggctgaagcaattctaggtgatttgagcggttcggggatataccagatcagaaatctggtaaatggaaagcgctatgtgggcagttctgttaggctgaagaagcgttgggccgaacatctgaaagacctggcaggcggggatcaccacgctaaggcgcttcaacgagcatggaacaaatacggcgctgatgctttcgtcttttccgttcttgagttctgcggaagagatgtgctgatcgaccgggaacagcaccatttagatcaaggctcgcactacaacacgtgtaaatttgccgcttcgatgcttggcgtttctccatcggctgagactcgggcaaaattgtccgagaagctgaagggtcgagtattcacggacgagcatcgaaagaaaatctcggacgcactgaacgagaagattaaaaatgggtggagtgttccggctgagtctattcggcgttctgcggaaaagcgccgcggtcgtaaggcatccgctgaaacgcgcgcaaagctgagcctaaagcggaaagggaagcgagtccttcctgttggttataggcattcggcagaaattcggcagaaaattgcagaacggatgcgcctgaatccgacattcctcgggaaaatccacagcgacgatacgaaactttccctttctttgggaatgattgagcgctggaatgatccagaaggtagagcagtcctgatggccgctatgcaatcagaggatcgtaggcgacggatatcggaagcggtgaaaggaaataagaacttcctaggccgcagccactcggatgaaacgaaggaaaaactgcgaaatatgttcttggggcgccaattcagtgaagaaactaggcgcaggatgtcatccgctcagaaatcaagattgccaatatcccaagaaaccagggacaagatgagtcaatctcgctcaggtcttcggaatggctcggccatcaaggatgaagtaactctgcgccatgattcgggtgaggtcttaactggaatcccaatggagctaaggcgcgttaccgggattagcccatccggaatgtctcagctgctcnnnnnnnnnngcccaatggcgtccagcgagtag

SEQ ID NO: 357779 - DNA, 2064 bp, Pseudomonas aeruginosa
atgaacagagcctattcagcgcttcatgtgaagcaggtgtcggtggatgccgatgtggttcgtatcaagggcatcgcatcgaccccaaagccggaccgggtgcatgacgtagtgaacccgcttggggctagattcaagaccccgatgccgttgctactccagcacaatcatgacaagccggtaggcgtggtgaccttcgccaagccgaacaaaaacggcattccgtttgaggccgaattgcctcgcattaaggaagctggcgttctcaaggatcgtgtggacgaggcgatccatgctctccaatacaagctgatgagcttcgtctcggtggggtttatgcccgatccggagaagaccaagcgtctgccttctggtggataccagttcgatgaatgggactggtttgagctcagcattgtcacgattccggcgcacccagacgccgttatcacgtctgtgaaatccctgggcgatgacgacgaggccgaagagctgagtcaggaagtcatcgcgatgatcaaatctttcgacccggagaggccagccgcgcttggcatcaagtctgttccggtcgtgcgtatcactcccgccggcgcttcggcaatcaagaccaaaaccatcaaagttccgaagccccaggagggcaacgacatgaagactaccgctgaacaaattgccgagttcgaagcaactcgcgtaagcaaggctgccgagatggaagccatcatgaccaaggctgccgaggccggtgaaaccctggatgccgatcagtcggagcaattcgacaccctcgaggccgagatcgccgctatcgacaagcacatcggtcgactgaagcagatgcagaaggcgcaggctgccaatgccaaacctgtcactgaagaggccggtgctcagcgcatggcaaacgtaaaagctctggacttcaaagaggttcaggtccgcgccaagaatacccagaagctggagcccggcatcgccttcgcccgcgctgctaagtgcctggcgctcggtcatctggagcaccgcgacgctatcggtatcgccaagtctctgtatgagggccaagactcgatcatcgccgccactcagcgtttggtgaccaaggctgccgtcgccgctgctaccacctccgatgcaacctgggctggccctctggtcggtgatgaaaccagcgtgttcgcagatttcgtcgagtatctgcgcccgcagaccatcctcggccgcttcggcaccaacggcatccccagcctgcgccgcgtgccgttccgcgtcccgctgatcggccagacctccggcggtgacggctactgggttggagagggtcaggccaagccgctgaccaagttcgacttcgagcgcaacaccctagagccgctgaaggtcgccaacatcgcggtagccaccatggaagtcatccgtgactccagtccgtccgccgatggcatcatccgcgaccagctcgctgccgccctgcgtcagcgcctggacatcgacttcatcgacccggacaaggccgctgtcgcaggtgtttcgccggcctcgatcctgaacggcgtagtaggcatcgcctccagcggcactgacgcggacgctgtgcgcgccgacctgaaagcgctgttcagcgccttcatcgccgccaacaacgcgccgacctctggtgtgttcatcatgaccgccaccatggcgctgtcgctcagcctgatggtcaacgctctgggacagcccgaattcccgaccatcaccatgaccggtggctccctgaacggcctgccagttatcgtgtcggagttcgtgccgaccgattccagcggttcgatcgtggccctggtgaacgccagcgacatctatctgggcgacgagggcggaatcgatctgtcgatgtccaccgaggcatccctgcaaatggacaacgctccggacaacccgaccactgccagcaccgtactggtctcgcttttccagcgtaacctcgtggcgttccgcgccgagcgtgcgatctcgtgggctcgtcgccgtacttcggccgtggcctacctgaccggtgtgaactggggcggctaa

SEQ ID NO: 357780 - DNA, 297 bp, Pseudomonas aeruginosa
atgagtgttcaagtcattgatgtgaagaccggcaagctgaaatccatgccggtgaagtacgccaacatcctggtcaagatgaatcgtgcgcgctggccggacgctgttggtgctgaattgtcccagccggttccagaagcagagacagcggtgcaggttgacttggtctatcccggcgtcctgtcggttccgaaggaaggcacctaccttctggaaaagagtgagcgcgtcattgcccccgatgcggaggtagaagcgccgaagaagcgcggccgcaaaccaaaggttcaggagtaa

SEQ ID NO: 357781 - DNA, 618 bp, Pseudomonas aeruginosa
  misc_feature (475)..(475): n is a, c, g, or t
atgaccgcaagtttgccgaatggactgaccgactgcctgctctggtctgaagagcttggaatgggtttccacccgcgcccgcccatggactacagcggctcatatttcgagaagtaccaggcgctggatgcaaccccgatgggcgaggcgctgacccgtgcccgcgtcgagatggtgagccgtcacacgggcgttccccctgttgatatcggcatcggtggcggccggttcgttcttgagtcacagggcatgggcttcgacgttaatcctgaggcggtggcgtggttgcgctcgaaggagcgcttctacgacccctacaagcaccatgccgaggccatcacctgctgggatagcctggagcacatcccggagccggagaagctgctcgatcaggtcggtgagtgggttttcgtctccatgccggtatacatgagccagtatgattgcctgcgtagcaagcactacaagcccggtnagcacctgtactactggacgcagaacggcttgattgcctggtttgcgcgtcacggcttcggctgcgtcgagatcaacgagcgagagtcagaactcggtcgagagggtatcaccagctttgcgttccggagattccatggctga

SEQ ID NO: 357782 - DNA, 1965 bp, Pseudomonas aeruginosa
atggactacgataccagcggcttcccgctcggctcgaaagaccctcgcgtcttgtacaaaaacgccaagaatttcgactatgcgatgaatgatcgcgaaagcgtttcgtgggttgaccgcttcggggtatctcgcaagacttggttcggtgtcgaacagcaggtaaatgactacctggcatctcaaggattcgagccaggcgtgctggagtacgtcgacggctccccgctgaccgtagatcgtccgacccaactgatccagcgtgacgggaatctctacagcgtcaagcgcccggcatcgttccccgttgagctgaccgggaactgggcgaccgatcaggatctactggtcacccaggtcgaccgctcgctgcgtcagcaactggctgacccgctggacccgacagctggcgcagctctggttgcgcgggcatcccggcacctcagcgacctgacaggactgatcggcctgatcggtcgatatgccggtgacatggttcagaccgcagcatactggggtggttggtctgtctatgccgatggtccggtcggtggaggcacttacgtatgggacccggcgcgccctcggtccgaacacaacgcgggaaacgtcatcagcccgacagtgccctgggatgggcaggagtcttcgttcgcagcgtacatcgcaaagaccggagaaaccgaaccatctgcccttggttgctgggttcttgttccggagcacggccgcgagttcaacgttttgcagtggggtgcaaaaaacgacgcaagcacaggaggcgccaacgacgccatgatccaaccactattggactatgtagagtcggcggtaagcggtggcttcggcggtgttgtcaacttcccgcgcggaaactatcgattcatgacgtacttctctgtgcgcgacaggacgacactacgtggggagggaacaagtgccagcatcatccagttctacggtacaggtgtaggtaactgcataactttaggtccagtcggtccccgccatccaatcaatcctccagggcattgggtgttcgggacaaggcttgaaaatttagctatttctggtgcgaacatctaccgagggcttgagcgcgccatggtctatacagatggcgcgcatgaacacagcggactattcaacgttgttgtaagagacttcgtctcatggggggttaattacaatactggcaatggtggtccggccttctttaacttttctgacgttgagatgtacggttctaacactgccccaaccgccggatcaaaacgaggtcttgtttgtcaagctggcggagcattgatccttgtcgacagaagtacaattaccggaggtgaaaccaacaaactggaccacgcgatccttatgctgaaggatagcttgattgctaatggtgttcatattgaacaagcgacagtgggtatctctctaggccaaagtgactccacagcaccaaaggttaacgtcctttctggtatcactggaaattcaacggtccctgacctctgcgtagtctcatcaacattcgagggtagcgttaatgctagcggtctagtcaatacgagcttgtctgttacaggactagggaccctcaagaataatcgcaccggcgaggtctatctcgatagatcaatttcttcatacaaatacggattgaatgttggccaaggggttgccgtcagccatggccgcattgcaattgcagcgggaaccgcgtcgatagtgaaatctacagggagaacttttacagcacaaagaattgctacaggagttattcggataactttgagtctggcaatgcccgatacaaattacgtggtaagtccgatggcaagatctacaacaggcatgattgtggagttcgccccggtcagcaacactacatttgatataaagacattcgacgctgctggcaccgctaccgacccgacatctatctggttcgcgctattttcttaa

SEQ ID NO: 357783 - DNA, 1053 bp, Pseudomonas aeruginosa
atgagctttttttcggacgaagagacagattcactcaagatcacccggatgatcctgcacgtggtgggtaccaagcactttgaggccatgccggagcgggctttggaggaggaggcattctttatcggtaaaattgtggacatggctgctgcgccggtcttcatgtttaaagctgtgtctacgacccggaaagaaattgaagctattgcagccggagacacatcgtttgttgatggtgcacagagcctggccgccagcttcaaccggcaacacgtggtcggcagtgctgatggggttctgttgatgttcgaactagcggtcaaagaccccgatgtgaagatctatagcctgatcaaatacgactacaagctggccttggaacagaacgacggagctcctgggaagaagctgcgccgtatcgtgaatgccttggtggatgaaaagagggccattcagaaaactgcactcgtccgtgtggtcggcggtgttgcagaccagaacatttcggctactgatcggacgaaacagggcgtagacctcacggactacttcgctgacttcctggctgtgagcagggcggtctctgacacggagctgagcgagatcacccgcaaggttctcaaagcggcgctccagagttgcatagctcatctgccaggccaggatgtggccaaagcgctgaagaaagcccaggccaatctcggaacccgtagacggatcgatgaagaggcgatcgttgaggcagtgatgctggctgctgggcatcctgaggatgagaaagtagccaatcgtctggagcgtgagacgcgcagccgtgtcaggaaaagcaagctacacgagcttagcttcaagcccgatcggcggatccttcgacagccgtacatgcgcaagatcgtcacgaccgaaggcgtcacgatcctgtttcccgacaggacagagaaccccaatgtgagggtggtggatctgaagggggataaaaagcaaatcatcgtagatacagacagggtcacggaggacagcgttgtcacaccaaagactggcctgccttcttaa

SEQ ID NO: 357784 - DNA, 1464 bp, Pseudomonas aeruginosa
ttgtcacaccaaagactggcctgccttcttaacgacttgtcacggaagcgtcaggcactcatcactgagggaaagacaaccctcatcgtatctgacctacaagcggaggccgcccgggcaattgctcaggcagcctccgctgctacctggtcgatcacgatctttgacagcgcgggtatcgaaaccgaagtcgaagacggtgacgaagacttcgggccgtttcgtgctgagctggagaagcctcttttgggggcgcatgttcaggctgaggtcttgtatgtggcgacggaggagggtttcaagggctttctcgacaagggacatcccgcgcagcattggcatgtgctcggcctgaccaagcccttcaacactcgtgcaaggtcgtatagcgattggggtgaaggagaggctttcgtcgagtctccgctgactaaatcaccccggcttctggtgaaggagtcggctaatgtccggactgtgccagaggatgtgcgccattggttgctcgcagaagggcatggcctggatagtgatgattctttgcacatggtttgggcaatgtatgccttcgatgctttgagtcggtgttttgcgaacgagatcgacactaccgggagcaatctcagtttcaaaggaccgcccaagctgaatctgacgatcaaagaagcggtcgaaggcgacacccagatggctctgaaagacttcgatgtcgtccaggccgccgcagtctgggtgttcgagaatgcacgggaagccgaggttaagcatattctgctttctgcagagattgcccgctctggtagagcagatggagaggtgcagcagtacttcaaggagaatctttctgctgcgttggattgcgcgaagatcgcttatcagatgtcggtttcagagatcaccaaggataccctcaaatccttgggagaccttcgcaaggctgttaccgaggaaacctcgaaggcaacagatgcgacccgccaggcgatcacggcgatctctacggcgctgactgtgggcatgggcttgatcgtcgcgcggctaacattgcaaatcaacccatacctcatttcgctcgtaatggccgttgcatttggatatacgacgctcaatgtgatgtcgggtcggaaattcataaacattcagcgaaagctgcgccatgactggcaaccgaagttatatcgcttcctctccgaggctgagttcaaaaaaatggtgggtgaccccattgaacaagctgagggattcttctatcgggtcagttgccaaggcttgacaatgctcggtgccgcggcgttggggattgcaatttttgccttcgtttatagcgctccgactgcggttacaccgctagctccttcttcgccctccgccccagcccctaaaatcgagcagccttcttccagcgatccggcgccccagtcgaagtcgatattcaagcagaggacttcagcgaagccgtcataa

SEQ ID NO: 357785 - DNA, 243 bp, Pseudomonas aeruginosa
atgaaggtccttggcactgaagtagatggcgcggcggtatggcgagttcttgaagatatgccaaaccgcttcgaattccaggagttcaaattctgcatccagcgggagctttgttatctcccgcatgtctgcgaccgatccgctgatcgagttctccagtctgccaagaagaaaggagctgtgctgtatgccgcaggactctggaggaagcagggcatgtggaccaagtcggagggcaactga

SEQ ID NO: 357786 - DNA, 2190 bp, Pseudomonas aeruginosa
atgcggttgttcatagcggagaaaccccagctgggccaggtgatcgccgaagcgctgggcggcggtcaacgtcgaggcggcagcatccagtgtggtcaggacgtggtgacctggtgcgttgggcacttactcgaactggccccgccggaggagcacaacccggcgtatgcgaagtggaacgcggcggatctgccgctgaagctgcgcccggtgaagtaccagccgattgccggaacggcggaccagttgggggtggtggggcaactgatcgcccaggctgatgagatcgtgcatgccggtgacccggatgaagaggggcagttgctggtggacgaggtgttggcctatttcggcaacagtcgaccggtgaagcggatcctgatcaacgacctgaacgcagccgcggcacggaaggcgctgggtaacctacgcgacaacagcgagttccttgggttgtcgctgcggggccaggcgcggagcatcgctgatcagctctacggcttcaacatgacgcgggcgtacagcttggcggcgcaggcgagggggggccgaggagtgttgtcggtggggcgggtgcagacgccgatccttggcctgatcgtgagtcgatatctcgcacacacggctcacaagggctccttctactacaacgtatcggcagcgctggactttaagggtcggatccgggggcgtctgctggtcgcggatgacgctccgactgacgaaaaggggcggatcctcgaagagagttatgccaacggcatcgcgagcgcgtgtcgcggccagccgggcctagtcgtgtcggtcatccaggaagagaaatcgcaggtcgcaccattgccattttcgctgctggacctgcaggcgcagatgagccgtgaacatgggatcaatgcggaaaagaccttggcgatcacccaggcgctgcgcgagaagcacaaggcgatcacgtacaaccgctcggactgcaactacttgtccaccgagcagcatgccgaggcgccgggaacgctggcggcgctatcgcaagcactaccggagctgcggacgaccttcgagcagcttgacccaggacgtaagggacgggctttcaacgattcgaaagtgtcggcgcataccgcgatcatcccgaccgcggtagtggtggacatgaaggcactgagcgccgacgagcaagcggtctacctggcgatcgtcaggcagtacctggtgcagttcatgagcgagaagcggtatttggccgtgaaggcgctgtttgaggtgcagggtcatgtgtttgaggcgagcgcgaccaagaccacggcgccgggctggacccagttgctgcgcgaggtagccgatgaagcgagccaggccggcgaagaggatgaggacgaggtggaagctacgcagttcgaggagctgtcggctctcgctggaggggagcaaggccattgccttgatgtatcggtttccagggcgaagaccaagccgttaccgctgtataccgaggcgaccttgctgaaagaccttaagcaggtggccaagtacgtgcaggaccagcgcatcaaagcgctgttgctggaccgcgatgatggcaaggccggagagcgcggcggcatcggtaccccggccacccgggcggcgatgttgggcaagttgcaggagcgcggattctacacggtcgagaagaagaagctggtcccgacagcccttggggttgcattcatccaggcgctgccccggatcgcaacgaccccagacatgacggcgctgtggcatgagcagcaggtgatgatcgagcgtggcgagctgtccgtcgatgccttcctggacgagctggaggccttcatcggtgagcaggtcagcacgatcgatctcggcgacatgcccattgccggacgtgctggggtcgagccgctggcggcgcgctgccccatgtgcggtggcgagctggccagaacggcaaaggtggtggggtgcaaggggtgcgagtttcgcgtgtacccgagcatcgccggcaaagagctgaccaccagtcacctcgaaagcctgctcagcaagggcaagaccagtttgatcaagggattcaagagcaaagagggcaaggccttcgacgccgccctgcgcctcgatggccaaggaaaggttgtgttcgatttcccgaagaccagcaagaccagcaagaccagcgggaagcgttacgcgtaa

SEQ ID NO: 357787 - DNA, 648 bp, Pseudomonas aeruginosa
atggccgagatcaatatctaccagaatcctggtcaatccctggctaatatctataagggttttgcccgtcaatgcaatcctggctttgtcttccccgaagcacagactatagaggcatgggacattccgctgaagctacacccggaattcgtcccgggcggagacatcagcaaagcggaccagcagtattcgacgttgcttgcccaagaactagccaacggcgtaaccattggtttcaggatggtcaatgaaaaggaacgtgtttgcaacggtgagatacttcctttgctcacctccatggcgcagaatcttgatagaataaaggctcgcttcggcagcggatatcttgaccgcttcaagggcagcccgaacgtctatccaaccgacgttggtctatctccggacgcctccggaggcatttcgcaggagtccgggctgctggtttcctacggtgtgaacctgcggacactggctccaggcacttggcaggcaatgacgctccccgaggatattaagacgttggtagggcctggtgttggcctacgtctggacgcgccaaatttcagcgacgtattcaatacgatcaaatcgggccttcgctatacgaccgcagtagccttgctgctggcctattttgcagcgatctaa

SEQ ID NO: 357788 - DNA, 522 bp, Pseudomonas aeruginosa
  misc_feature (238)..(247): n is a, c, g, or t
atggtcttaactaatgatgctgaattagcacgaaagatggagctattgcgcagtcatggtattacccgtgagccggagagaatgactcacgcgcctgaggggccttggtattatcagcaaatagaattaggcttcaattatcgtatgacagaactgcaggctgcgcttggtcttacgcagatgcagcgccttgatgaatatgtcgaagcccgtcacttgttagctcagcgttataatnnnnnnnnnntccatctttatgtgattcgtctgcagttagaaaaaatttctcctactcatcgtcaagtttttgagtctctgcgggaacagggtgtaggggttaatctgcactatattccggttcatactcagccctattacaagaaaatggggtttatcgaggatgatttcccaaatgccatggcctattatcacgaggctatcagccttcccatattccaaatgatgagtcatgaacagcagaatgaggtggtgctggcggtcgagagagctatacaatcatga

SEQ ID NO: 357789 - DNA, 1023 bp, Pseudomonas aeruginosa
atggccatcctggaggagcaggcgcctcgaatttttgtgtacagcatcgacgaggccttcgccgatatcagtggtgttcctaatccggaggagtggggaaggtccgtccagcagcagatcctgcgccgggtcggacttcctgttggggttggtatcggccctacgaaaacgttggccaagatcgccaactgggcagccaagcgctggaaggccaggaccggttgcgtggtagatcttcgagaccgggatcgacaggagaagctcctgcagtacgcgccggtgggcgaggtgtggggaatagggccgcgtctctcaaagcggctggaggagctgcaagtgaaaaccgcctggcagctggccaacaccgatcctaagcatcttcgtcgacacttcaacgtcaatgtggagcgaacggctagagagttactcgggatgtcgtgtttcccattcttggacagtgggccggtgcgaaagcagatgatcatttccagccgctcctttggcgagaaggtctatgcacttgaggacctgcaggcggctgtcgctggttttgtcggtatcgcggcggaaaagttgcgcgcgcagggcagcctcgccaactgcctgcaggtcttcgcccggaccagtccgttctccgctggtgatcaatacagtggcacccgcattctggccatgccctatcctgcagatgacacccgcgatctactgcgcgcagccttgaccggccttgaggcgttgtatcggcctggctatgcctatgcaaaagcgggggttgtgctgtctcaatttgctgagcgatgtgcaatcactggcgacctcttcgctcccaagccccgccctaacagccagcggctgatggcggtgatggatgcaatcaacataaagcaggggagaggggccattcggctcgggcggcagcaacctgtggggtgctggtcgatgaagcgagaactcctaactccagcttacacgacgagttggcgtggcctggcgaaggccgattgccaagcgcccagccattag

SEQ ID NO: 357790 - DNA, 639 bp, Pseudomonas aeruginosa
atgtgcagccgttttgagtcgccttcgagcgccgagcttaccgccgcgtttggtatcgacccggcgctggcagtccagagcgacatttttccgggctaccaggctccattcctgcgggccgctgtgcccgagtcgggagaggacggtcagtatcctgcctgggaggctctggttggggtgtttgggcttctgccgccttggtccaaggacgtgaagctggcgcgcagcactttcaatgcccggagcgaaacgatcgcggtgaagccttcgttccgtagcgcctggcgccgagcccagcactgcatcatcccggccagggccatctacgagccggactggcgtagtgggaaagcggtacctgccagaatctgccgcgcagatggtgagttgatgggcatcgccggcctgtgggagcgatggacgtcgcccgatggggagactgttcacagcttcacgatgatcactatcaacgctgaggaccacccgttgatgcggaacttccaccgacctgggcaggagaagcgcatggtggtgattttaccgaagggagtttaccgggactggctgagcgcgtcggcagagcaagccagggagtacttgcagcaataccccgccgaacgtctcttggatgagtactag

SEQ ID NO: 357791 - DNA, 738 bp, Pseudomonas aeruginosa
atggacaaagttgattttgaacgcagcattctagaaatggcaacgccgcttctgctagaaatttacggggaattccgtgttgacctagagcagaaagatcggcctgatgccgccataatcttatctgatcctgccaatacctcgggtagtcacgccaaaccaagaaaggtcggcatcgaaatcaccagcgttgataaacaagctgatcagcagtatctaaacgacgagaaatatggacaagaaattgtcagcaaagaggtagagtcagtcttacagggcggaactcctagcgaaaaccctataaagagaatcgaaatccctatcaaggaaaactatatctatgatgggatttcaaagaaagcggaaaaataccaaagctatgctgagactgagaactatgacgaaataatattgctatgctatagcgatataatctggcctgaccacaggttctacaagggtggattaaagcactggacagacttcaccctcagcaggcagagctatccattcgacagagttatatttgtaagcacaattggtcctggcctctcgcagatatacagtaaacgaaatccgagaattgaaagaccaaggaaatacaaatacagcgaaggttcaataacggcaattcaaccaggaatcattccaccaggaaccttcgatctttccaagaaatactctaaccctcctgcgatcagcccgagggcaagtaaaaagccgaaacgaaagaaataa

SEQ ID NO: 357792 - DNA, 438 bp, Pseudomonas aeruginosa
atgcggattcagttcgaggcgctgacccgcgccatgtggatgctctatgccgcaagcgacttggccatccagaagctggcctcgccactcaccaccgagagcgagcgggccgcgaacagactccccatggtcagcgaaatggtggaatccatcgtcaagcacgcgccggcagaggcctcggcaatgctggtccagttcaaagatgtcacctggagcgccatgaattcctacgtgcacagtgggattcacccactacgccggcatgcagaaggatacccactgcccttggtcctgcagatccttcagagctcaaacggcctgttgacgatgaccggaatggtggctgcgatcttgaccggcgacgaacgctgcatcgagccgatgcggaaaatccagacccgctttagcgactgcttgccggagctggtcaacggttga

SEQ ID NO: 357793 - DNA, 453 bp, Pseudomonas aeruginosa
atgcagccacacaccacagactcccaatccagtcaccggtcgctgttcaacatccttaccgccgttgtgcagcatgcgtggaacatcctgctgtttagacactatggacagggcctggaaaatgtaggccctagacaggcagaggtgctgctggctactgcactagtagtcgtcatgctaacgacctactttgccccaggcctcaacagaggacagaccgcagctttcgccggcgcctggttcatcatggtgagcatgacggtgcgggtttttggtcagcgtgctctagccggctgggcctgcctgtacatgctgacggagccgaccagcatgctaatccgctaccttccgcatggccacgagctggatctggccgctagcgcatggacgatctttgcggcgattctcttcatgaaccgttgtcatgcgcatgaggccgaggcgcgcaaatga

SEQ ID NO: 357794 - DNA, 1464 bp, Pseudomonas aeruginosa
atgaaagcgaccgaggagcaactgccgatcattcagttcgaaggcgaccacctggtggtcaaggccttcgccgggtgtggcaagacatccaccctggttgagtacgcgaatcatcactcgaatctgaggatcctctacctggcctacaaccgtgcaatccgggatgagggcgcccagaagtttcccgcgaacgtggtgtgcaagacctcgcaccagttggcctggccgcagtttggccggcgctttgaacacaagctggggaacgtccgccttaccgacgccgcggacctattgggaacgcggaaatgggaaacggtgcgggagtccattgccgtgctcaacgcctacttggctagcgcggacgagaccttcgttctggggcatgtagcggcagctttggaccaggacacgttctacagctgtggcgacgcccatatcgatcagttgctgaagaatgctaagcagctgtgggatgcgatggtcgacgaggaacacccgttcccatgccagcatgatgcttatctgaagctctatcagctgagcaagccgagcctcgactatgacgtcatcctgttcgacgaaggccaggacagcaacccggtgacagcggctgtagtggcgatccaatcggcacgcaaaattttcgttggggacaagtggcagcagatttaccgctggcgcggagctgagaacgcactagacgtccagattgcagctggtgcccgggcaatgtacttgaccaacagcttccgcttcggcccgatgatcgccggcgtggcgaatgcgattctccggcagcaaggcgagacgcgtcctctggttgggcttggccctcgtgacaaggtggtgacgatcctcccgttcggctgcagtcgttttacggtgctgaaccgaacagtgttcggtgtcatctcgacggcgatcgatgcggtacttgctgggaaggtcgtgtactggaacggagggattgaggcctatcagatattcgacctcgaggacgtgcacgccttgagagaaaaccgtcaaggtgacatccgcaacaagcgtatgttcgggcggttcggaaatttcgcgaccttcagtgaggcggccgaggagagcaaggacgccgagatgaaccggctgatccgcatcatcaaggaccaccacgacatccccaggctggtggcgaagcttcgggagaacatgaccgatgacccggcagaggccgatatcgttgtcagcacctgccaccgggctaaaggcctggaatgggacgttgtgctgttggcagaggacttccccgacattttcgataccgagaaggttacgctagagcagcgcgtggacgagttgaacctgctgtatgtcgcctgtacccgagcaaagaagatcctgtgtatcaacaccatcgcccaggtggtcatcatgaagagccacgccgagctacggcgcgagcgagaggcgagggcctcatcggcatga

SEQ ID NO: 357795 - DNA, 798 bp, Pseudomonas aeruginosa
atgatttggccttgcctcggactactccttctgcccacgttggccatcacactttggcacctggtgctggcgcgcatgtcaccgcgggtgtggagcatgtaccgaatcactggcgccgtgggggttccggtgcacgagctggcgcacgtgatcgcctgcttgctctttgggttgcgtattaccggaatggccctgtatgcgcctgatcctgtatccggctccctgggatatgtccacttccgctatcaccctacctcgccgaggcaggtactgggactgctcatccaaggggttgccccgctgctcatgggcggaggaattgccctgtgggtcttgctcctgaaggtggatttagtgccgccggaccagagcttagtcggggtgtgccgctgggggatatcgaccgcgggaagtgtgatagaagccctagttacgttggccggagggggcccgcttggagcgctcggcgctgcgttcgtcctgctgatcagtctgcactccatccccagctatgcagacgtgaggctgggcctgcgcggcgccatcctggtgggactggctgcagcgctggtcgttggcctggtacaggtgctccacatgggcggttggccgggggggatagccgttggggctgctctgcagggagtgcaagctgtgatcgagaaagggatgtggcttgccttgagcggtgctgtggctgtagtcactcttgcggtgttcgccggcgtgctgttgctcgtgattccggcctcaatcctgcaggtcgctgcgctgattcgcggtgccttgcgcctgtga

SEQ ID NO: 357796 - DNA, 372 bp, Pseudomonas aeruginosa
atggaaaaccaagcaatcgataaaaccgaagtaatcaacctcaccaagttcaaggtaacccgcgagctcgaggagtttggcgtaagggatattgcgagttggaaagagtttcaggagattcgtaatcttctgttcttcccggtaactcctaacaaggacgttatcgctcagcgcgttgagcgcttggcggaaattgccttgaaggaatcgcagaaaacgggccgcacttctgtactggtgagttgcccgccgtggatgactttctcgctgtgtaaggagttggtctatcacaacctgaaaccggtcgtgagcttcacgaagaagaacgatagcgagggcttgtccgtcgtttcgctggtagctgctgcttaa

SEQ ID NO: 357797 - DNA, 960 bp, Pseudomonas aeruginosa
atgcaattcaatgctcaagttgcggtaactgagttcggcttcgagtctgataagaaagccccgggctttgccgacggccaccagtgggttcagttcgttccgccgaagaagaagtatttctttcgcgagagtctgctgaagccgttcatgaactggctctacgctccgttcggggacagcgccatgctgattggtccgactggttcgggtaagtcatcgctcgttgagcaactgacggcccgcctcaactggccctgcatcactgtttcggctcacagccgaatggagatgccggagcttactggcttcaacctgcctgtgaccgacccggttagtggtgacctgaacacgaagttcgtggatggcccgctgactaaggcgatgcggcatggtttcgtattcgttcttgacgagtacgacacccttgatcccgcagtcactgtagggttgcacgccatccttgagggtcgacctctggtgattgcggagaacaacggtgaggttgtacatccccacccgaacttcaggtttgtcgcttgcggcaacaccaccgggcagggtgatagcaacggactgtacgcggcaacgatgatgcagaaccttgcatcgctcgaccgataccgggtcttcgtttgcccctacctggccgaagccgatgaagccgccacgatggttgatgccttgccgatgctgccagcagtgttggcggagaagatggtgcgggttgcgaagtccattcgagaccagcatcaaggtattggcggtaattacctcagtgtgacgatgtccactcggacattgctgcgttgggctcggatctcctgcggctatgtacagcagcaggttgcatccccgcttaagatcgcacttcaagagtcgcttcttaatcgttgtgacgctgttcaagcaacggcgattgacaagatcgctgagagtattttcggatctgactggaaataa

SEQ ID NO: 357798 - DNA, 1107 bp, Pseudomonas aeruginosa
atgaccattcaagcgaatgaaattaaagtccttgagcagctgctgttggtagacctgtcgggtatccacttgtggactgctcgcaaaaagctacagcctgagatgttcgaaggtaagattcctcctgaggatcttgcttcgcttggttcgatgcgtgttattgaccctatccgggttaagccattcgaaaagatcaagcgaaaagctacgactgtactagaaacttatggggttaagtttttgggaggctatgccgtttcccaggacaatattcagagcgtcgtagacgagctggaaaaactcaaaagtgaattttacagtttgaaaaataacttcctccacaactacgaccgttgggtaactgattgggtcaataaagggtggactaaggaagaatggcgtcaggctatccagtcctcggttactccgaaagccaaggttgatgatgggttgcagttcggctacgcggcttgccgtgtggccccggacggcgacaaacacctgtccgacaccctgggcaagcaggttcgaggcctgtctgatcagctctacgctgaaacggcagataccgcggctcgcttgatggagagtggcctggctgtacgcggccatgtcacccagacgacgctgaacacggtccggaagatcaacgcgaaactgcgcggtttgatgttcctgtcctcggatgtcaaagccctgaccgaccatatcgagcaagtcctcgtggcaatcccgagaaccggcccggtcagcggtaccgagtacaacaccgtggttacgctggtatcggcccttagtgatgaggactcgatcaagcgcctggtcaagaacttgaacactgccaatggtcacggaagtgctcccgaggtagtaacccaggtagcgccagctccggttcaagcatcgcttgagccggaaccggatccggatccagccgcacagccaaccgtgcagctcgaaccgggggaggagatcgattttggtttcgttccactggagctgctcgagcctgccggtgctgaacccaccgtattggtggattcaccacaggtagctcagatcccacctgctgttcttgagcaggccactcagaacttctggttctga

SEQ ID NO: 357799 - DNA, 1809 bp, Pseudomonas aeruginosa
atgagcaacaaatcgctgattggatcacttccgatctacgcccagcaccttgccgagcaaactggcgtcaaggtgtttgtcgaaggtgatacggcatacaccaatgcgctgagggaggtctacattcccttcgcagaggatgatttgcaactgtccttcggatacaccgctcatgaatgctcacacgtcagaaataccgacatggagtgctttcatgaggcggcgccgaagcccttcaggaaaaacctgctgaacgccctcgaggacattcgaatcgagcggcgtagcatggatcagtaccccggtactgaagacgacctccgttacctgaaccggagggttctactcgaaccgttccagccggacctggtggcaacgcttcctccgctccatgtggtgcaaaacgcaattctcctgggtggctactggctgcttcaggagccgcaattggaggtgccggcggtggcctatatgggccgcctggcggagctggttgggcagcggttaaccgatcagatcatggaggtggtcaagaacaccctgaagtgtgcagacacctgggaggttcttggcctggtcgacacgatcatcgcaatgctgccctccagcgagaaacaggccggcgaaggtgaatccgatcccgatcagggcgaggagaaaccgggtgacaaaccgaccgaagccaattctggcgacgacgggaaaaacaaaagcgatcagccgagtagcgccgggggcgagcctggggacgacgatgggtcgaatgactcggaagcggaatcaagctcgcgcgatgcaggtgaaggccaggggaaaacccagcctcaacaggcaccgggttctggtgagaaacctaccgatggccctcgcgaatccgcacatgcgggagagggcttgaagggggcgggcttgcgtgagctggcgcttaccgcgaccgaagaagacctgaaagggttgatctcggacgtcggtgatgcggctgctcagttgctaaccgcaaatgcgaagaacaacccacccagaatgaaacctttcaccctggaggggagggccacgcagcgcaatgacgaggcaagtcggcgtcgtgtgcagttgggactcgagcaatcgtctggcctaaggcagtgcatgtatgggctgctgcaggcgcaggttgattgccgcgtgagtctgaaaaggcaaggcaagcgtatcgatactggacgcattgcgatgttagctgctggtgaaactcggattttccggagcaaggctcgtgctgagcagaagtcggccgcagtgcagctgctgctggacaagtcgaccagcatgcacggttcgatggaacaagccgaggcggcgatctatgccgttctgcaggctctggagaatatccctcaggtaacaactggggcgatgtccttcccgaaccggtcgccgggaggtgtcgagcgctgcgcgttgatcaagagcccgaaagagcgattgatcactgcggttcagtcgggcgggttcggagcatcgagtcagggggatacccctctggcgcgtgcgctctggcctgcggcggttgaagtcctgcgagcgcggggggagcggaagcttctcttcgtggtcacggatggacgccccgatagcggtactgagcaacttgtccgcgagctcgtcgagcgttgcgaggcaagtggcatcgaggtgattggccttggcttcggcggggctaccgcggcggtgctgcagcaatgcttcaccaggtaccaagcaattggtcaggtttccaacctcaagaacgcgctctacgggcttgttcgcgaggcgctggtagcctga

SEQ ID NO: 357800 - DNA, 435 bp, Pseudomonas aeruginosa
atggaaaatactgcactggccatgcccctgttcgatctgttcggggagcaggttgtaattcagcgccgcacattcgggcgccgccctcggcgagagacaacccccaacgttgtcgttcaactggggctactcgacatccttgagatgtctgaagaagagttggaacgcctgcgcgccgaggatgaagtcactgacgactacatccagtggctacgggaatacctcctcaagctgacacttcgccaactggttcacccccagtcgagtgaggagacgcgaatggatgcgttgatgtgggttcaaagcgacgagcttcacccgttcagcttccgagcctgctgcaatgcatggattgcagctcaggatggtcaaggcgcagatcatgaggaaatccgcttcgcggtcctaaagatctatgccaagcaccagcgatag

SEQ ID NO: 357801 - DNA, 246 bp, Pseudomonas aeruginosa
atgaatccgatcctcgaagctgcacgcctgcagggcaacgccaaagttatgcggcgggcatgcgcaacacgtggtaagaccaaggtccacatgtgggagctggacgccggcggagtgattctcctgaagcatgtcgaaggggagggctttgccaagccattcaagctagaggaagagatggaagtggtcgtcgaccgtttccgtcagaaacgaggccaaaaggtgttttcaccccaaggcgcataa

SEQ ID NO: 357802 - DNA, 321 bp, Pseudomonas aeruginosa
atgtgcggaaagaaagaccacgaagtcatcgacttcgcagtgaagaacgactggacgctcgtgaccaacaattcagtcgatttcaggggccccgcaggagggcctgccggcggtttatatgcgttggaggatctccacgccggcttggtgtgcctgaactgcgaggatggggcgttagattacccaaagcaagtagaggcctttcgtggggcgttagcaggtctgccccctgacctggtaaatcaagccctggaggtgactatgctcgtcacaggcggctccgagatgtccctctacttcatcccagacgaaaaaccctga

SEQ ID NO: 357803 - DNA, 699 bp, Pseudomonas aeruginosa
atggagttcgcaacccttgaacgggccacaggccgtacggtcgccttcgtaggtgaagggaccgaagtcgaggtcaaccgactggttgacgatggcctcttgcctgccagattcgttcaccacgcacagccaaagcgcgagtacaagctgtgggagacggctcttgccctgaggttcaaccgcaggtgcaaaggcctgctcacgaaggaggcacgtaaatccacaatccggattttggccgaccggtatgttggggaaatcagcacgatcttcatcgagatcatgtcagaaccgtacattcaagccgccgcgataaatcgcgcgattgaacgcaacaattggcgagttagtctcggcgaagtatcggttgatctgactgatgacctgaagagcactgctgagcgaatcaagttgctgagcacggttgaacagtcgatcacaatcgacccagaaaccatggatggcgctccggtcttcaaaggcaccaggctgcccattgaaacggcgcttgcttcactcgactccggagtgaccatggccgagatggtcgaggactacccgatgctgagcgcggaaaagattgagcaagctcggatctacgtcgcactgcatccacgccctgggcgcccgaaaaagctccgcgcatcctcgccgcacattacaaagcggcgcatcaacgccccggccagccggggctga

SEQ ID NO: 357804 - DNA, 216 bp, Pseudomonas aeruginosa
atgaaaaattcaaaaatgaaagactggttcgtagacttctttatggccctaggaatcggagttgttgttcccggcttgctgctgcttggcttgccaccggacgacaaggctgacgacgtgatgtggggtgcctggctgcttgtgataggattaatcagcacgctagccagcttcatcatggctgtattggaagaatggaaaggagaagacgaatga

SEQ ID NO: 357805 - DNA, 126 bp, Pseudomonas aeruginosa
atgagccctcttggcattggagttatctcggtcgctacgttcgcggtccttatgggcatcgccgcgctggttgctgaccattacatccaacggcacaagaagcagcgtcaagctcagcgccactaa

SEQ ID NO: 357806 - DNA, 201 bp, Pseudomonas aeruginosa
gtgaccacagcaaaagcactcttctgtaaagaactcaacgaactcctggtcgagtccgggcgccgtttcctcgtgcccgagcagatcgcgaagaccgtcaactgcgcggatccagatacccgattcgttaagagctgggctgtcatccacaagctgattccagcggatggcgaggtcctcgtcctcgttgaggcagcatga

SEQ ID NO: 357807 - DNA, 2703 bp, Pseudomonas aeruginosa
atgcgcaatccttttcgctttcgaagtttcctggtccgtgtgattagcacggccgtgctcggcctctacttcaacatgacgacctttactgcttgggcggatgcgattactgccggttctggtgccggccgggaggttggtcagcagggaattcaggtcttcagcgcgtccggaagcagtgcgaccctgaaggacgtgttctccggctaccagggagccgataccccatcgctggaaggtgtgttcggtagtgatgctcataccatcgacctcggtcagaaagccaacaccacgctggccaccgagacctcgacgacgggcgacgcatatcgtgtgctccggggcgcttcccagcgggttcagcccgatatgtcgaaggacccgatgttcaacaacgccgacacggtcaggtcaaacgactacatgtcgtcgttccaggacacattctcggattgcaagaaagtcgatcagtttgccgatgcaacgatcaagtctcacatcgccaattacaaaacctgtgagcgtctggtgaaaccgcagggcaactgcgacataagccacgaaatcaaagttaaggctggaccagtagatctcgtgttcctcgtcgataactcaggctctatggacggggtgatcgccgagctgcgcagatcggtgagcaacctggcaacgctcttggggtcaacaaacgagggtgatcttcacctcgggggcgccttgacccggggtagtgactatgtctccaggaatattgacctgacggcggacaccgcagcgttccaaggctggattaactccgtggggacaagccacggcgatacctataacgtaaatgccgccaattatgtattggacacattcagctggcgtagcgacgtgcaaaaggtcctagtgatcatcggtaacgaggatggtccaggcggggacactgccgcgctagttcaacggatggctgcacagggtgttaccgcgtacatcttccacaacaacaagggcgtccagtcgctgggcacgtacattgccaacagcttttccgccaccgggctctacaagatggctcaattccttgtggtcgttgaagattactggaccccaaaagactgcctggatgcagccactgcgacgatggaggaattctgcaccggctcctacagcacgaccgtggggagtgacgggagcagcgcaagctgcgtgaatctatcggggttcgacgtctgcccaggcgacccgatctactccaagttgcaggcaccgcctatccccaatgtcgatcggttggcccagaaggttcatgtctcggctctacagtgcgattacaacgttgggcagatggactgctacatcgatgcacagggccatcagcagtgtccgcataatgacggatcgaatctcgatagttgcgccagcttcgagcagaacaactcgtgcggcttcgtcagtcaatcttgcgtgcagggggcttcaggctcaaaaggaacctgttacgtctacaacgagatctgggattgcggctacgacgtgactgttccgactgtggtcaatactggccaaaaaattgagtgcccaggtgccgcgcgttgcatgggcagtgaatgctttgatgcgtcgaatactaagagtggcgacttcgcatatgcagttgcgatgcttcaggtcacccagtttgctgaacaggacatgacctgtgcctctccagatagccttgattgcaaaatctttggtggagaggcgatggagtgcaagaaggcgctgggcggctacgtagactgctgtgaggcccctagcggtgtcagcataatggactacgtgaacctcaccatggcctctctgaaaatggcttcatcggttgaggcgcttaacaggacggggagcatgtttgcgccaggatactggcaggcaggtgaggccgccctggagtcggccgcgggaacgttaatcaaggggcaatggggcgacatcgtgagctcggcgacaggagcattcaccgaggaaatggcggggaaagcgtcgatcagtgtgctgcaacagcaattgatgcaatgggcatatgatgggatggtgcagatgggcgccgcaaacgcagcaaatgcagttttccaaactggttccgacggtgctgtttcgggtctgagtagtcaggctgcgatggttgttaatgttattggctggatttatacggtatatgtcataaccgacatgcttattcatataatttgggagtgtgagcccaaagagtttgagttggatgcaaagaaagaaacaaggcagtgctcctttgtaggaagctactgtgcaagcaagtccattggcggatgcatcgagaagagagacgcttactgctgctttggatctgttgttggtcggataattcaagaacaaggcagaaaacagcttggattaaattttggcgaagctgagagccccagttgtgaaggtttgacccctgctcagttgcaactattggattggtctaagattgatctttcggagtggattggtatgctgagcatgacgggcaatctacccactgttaactctgtttcgataaccgatctaactggtaatggtagtcagttgaacgatatatttaacgatggagtcggtagatcagacactgtccagcgtaacattgagcggttaaatggagtagacgtggatacggttaaaaagaacgctgcagagcaaatgggtgggttagattaa

SEQ ID NO: 357808 - DNA, 810 bp, Pseudomonas aeruginosa
atgaatcgacaacttcaccgtgtttccacgatggccctcgctgcggccattgccatcctggttgggtgtggttccaccccccagcagcacacagtcaccctccccgatccgcaaaccgtgccgcgggagcagtggtccgaagctctaactgtcttcgacgcgatgggactaaaggggcagcgcgatgtaccaaaagaattggttggccaggctcaaggtcaaggcgcagccgcgaacgtgagcggcggagcgggcgacctcgttgctgggccttctgtaggtctaggactcggcatgttcctgttgggcggtggcggttcgcctgctgaaggtctgcctcagattgccgcttgggtccctgcgagactcgcaggatcgccggaagaagccacagcgcttgcagttaaaacctgggaggcagcgcgaaaagcggcactgggcacagagcccaagcagcttcaaactatcactgcaaaatatccgtatggatggaacccaagggtcgcatttgctaatactaaggatgccctacttgacatcccggtccagattactgatggccccaagaacggccctgcagtgttaggaatgagagaggaactcatttatggcccgatattcatttatcccaaacaactctctctagataccggtcttgacgaaagagcatatgttgctcatatgcgcaaaatttctgaacatctacccaactggttctatctttactatccaggttcaaagttcaacaagcaaccggtacccgccgcggtatatcatagcggccagacgctaactttcgtatcaaagtaa

SEQ ID NO: 357809 - DNA, 1155 bp, Pseudomonas aeruginosa
atgtcaggaaaccttatccctttcgggatgcgagacggccaactctatcaggccgacgaggtcgacaacggcctaagctgcggttgcatctgccctgagtgcaagcggcctctagtagctgccaacgagggggaaaaggtcctaccgtacttccggcatgcacaggcggcgtgtgctgacggtttcgccgccggcattcgccggcgtgcaatcgaagtgctgcagaccgaagggcaaatcatgcttgccccctatcgggagcaactgattgccaaaagcctctatggcaccctgcttcagacgactatcgaattcggaacacggctgcttgcagcggatcgggtagaggcgcacgtcaccatcgacggccaagtcatcgatgccgccgtgtggaaggacggtcaccaactcgccgttcattttcgcgtagcaaagcggccggacctcgccaaagtttccaggcttagtgctcttggagtctccgtgctgcaggtcgacctgagccagctggatatggaaacggtgctagatcgagaggcgttccgacaggccatcattttcgagctggggctgcgatcctggttgttttctgagcgtggccatcgactggcaaagatcgccaacgatcggttactcaccgagatcgaaaagttgaacgtccaggagcgagaagaacaccaacgccagctggacaaggatcttgaggagcgcgcgcgtcaacgagctgcagctgccctgcggagccttcagcagcacgaacttcgcgaagccagtaggctggcccgagccgcggctgaggaggcttacaaaaacaccccggaaagcttggctgcccaagcaagaatcgacgggctcaaacaggtgaccaaacagagggccgacgcaatcagcgcgaccatttgccaagcagtgctcgcctggggaggcattggcgcggaatgtcagcggtgcttccttgtcagcgagccaaacgcccggcactgcgtctactgcaatggaagcggcccattcacaacgatgactttcggccgtgactacctggcaaacgttcaccagcgaatgaagtcatcgcacaagccctacacctcatacactcgtgtcccagcgctcacctgcgagcctacagaagtcggcgccagcgatagccagctttga

SEQ ID NO: 357810 - DNA, 1263 bp, Pseudomonas aeruginosa
atggccggtgagaaagtctcagcactgcgtctgtcgatgcatggccaactggtcggctacgtggccgggttcgataacggccgcaacgtactttctctcgccccggagttcatcgaaaaccccaaccgctactccctgacgttgtcgatgtcgtctgaggaaaaatttcgcgttctagctccgagatttcctcgtgctcagcggatgcaactccatccggtcttgagcaatttgctgccggaaggatcgttgcgggagctcctcgctcagcggctgaagatcgaccagatgaatgagttcccgctcatggcgcacctcggcgcggacctgcccggggcactcgtggccgagccggttccagcggaaaaagttccagactatgcgttcggcgaccacggccgactggaccgtatcgcaatcgatgttgtcgatagggtcgcgcacttctcactggccggcgtgcaaatgaagttctccatgcacagccgtgacgggcggtacatcatgggcgactcgaatgagccaggggactggattatcaaaaccccctcgaccaggcatccctttgtaccggccaacgaatacacctgcatgtcgctggcgagacttatcggggtagatatcccagagatccggttggttggtatggagcagctggagcagctccccgaaatcaacctccccgatgaaggagtggcctacgggatccggcgctttgaccgagacggcgatcgccgagtccatgctgaagacttcgcacaagtcactttcacctacgccgccaagaagtacgaaggcgcgagttatgagtcgattgcgtcgctgatctaccagaacgtctacgctggccaactcgacgtcatccaaatggcaatccgcctgctagccaacatcctgttgggcaacggcgatgcacacaagaaaaactggagcatcctctacccagatgggatcacccctaccctttcgcccgcctacgacatcttgttcacacgggtgtacatgggggacgagcaggagttcgggctctcgatggcaggcaccaagcgctggtacgacgtcaccatggagcacttcatgaggtgggctgatcgagcgggcttgccaggctcgccgatactctacaacttgcggcaggcgatgaatgccgcacgtgaactgtggccgcgtgcattggaagaaagcccgatggccgagacacacaaggatgcattgcgggcacactggctagccctgcaaccggacttccgaatcgaggcgtga

SEQ ID NO: 357811 - DNA, 393 bp, Pseudomonas aeruginosa
atgaagacaacccttctcgaacagatccgcagacgacgcaagcaactgggcttgaagggaatcgacatgccggcaaggacgggaatcaatcgccagcagtacggcctcatcgaaaaagccggcaacccgaatctggaaaccctcgacaaaatcgccgaaggtttagaggcggagctcatgctgattcctaaggaatacctggtacaggtcaaagacgtgctgcagggcattcccaacgcatcattccgcacctctaccatcagcccccatagcagccaaatcagctccaaggtcgggagccctaccgtgggacatgcaggcttgcaagatacgggcggggaggatgtcgaggacccgtggaaaatcattgagcaagcaaaaggggataactga

SEQ ID NO: 357812 - DNA, 309 bp, Pseudomonas aeruginosa
atgttcagtaaactcgtgccgaaacctgtccccctgcggttcgaaatgaccggcgccgctaccctcgctcacctgcgcggcatcaactcgaagcgagaggaaatgtttgcgcaactgagaggggctcagagttgggaaggtgtgtcctcgatcctgcatgaacagggttattccctgatcagtaacgatggggagcctttcgtggtgaacttcaccacccaccaactctttccgctctcggactgcggacacagtatgctggtcttcacagagcggctggggccctacccgaccgcgcatggcgcttag

SEQ ID NO: 357813 - DNA, 888 bp, Pseudomonas aeruginosa
atgccaaactccaacaagagcctgatgaatgtcattggcgttgctgtcgccaccgccgctgtgagcattggactctctttctccatgagtaccgcgtacaccaatgccaaaatcaccaaggccatcggtgagctgaacgaacaggcaccggcaatgctggacaagatcctccaggatcgtgaggcgaaagcactggcagagcagcgccagcacattttggcgaactgggcgggcgcgcccgacgccatcgcagacggccgccacgtatatggcaatctcaaggccgaattcaccttggtcgagttcagcgacctcgagtgccccttctgtaagcgcttccatgacactcccaagcgcctggccgactcgtctggcggacgcctgaactgggaatggcagcattacccccttcaattccacgacccggcagcccacgttgcagccactaccgctgagtgcgtgaacgaactggtcggtaataaagctttctgggcattcactggcgagtacttcaaccacacccaactcaacggccagggccctgaggacatcactcgcatcgcggaatcggtaggtgtgtccccgtccgcgttgaagacctgcgtggacagcgggaagtacgccgagaaaatccagaagcagattgccaaagggacgagcctgggtgttaccggtaccccggcgacggtcgtggtcgacaacaagaccggtaaccgtctgctggttaagggggctgtgcctgcgcaagagttccaagctgcgatcgctcaactgatccgcatgcgtgatgagcccaaccaggaacagcaacaaggccaaacgcagtctccggccaccgtcccggcccccatccatccgcttgccttaggagggaaagatgttcagtaa

SEQ ID NO: 357814 - DNA, 579 bp, Pseudomonas aeruginosa
atgcccaaccgtaaatctctgctgttcctggccatcaccgcaggactgcttctgtctggaggatgcacgcacacccctcctccatctgccgagcccagcttaccgcctggggttccgttcgttgtgggtagctacacccctgatatgcgcgaccactacaccagttgggggcataccggccgtggcggcgcagccctgcgagagccggcctatcaaccggtcctgagtagccaggacgagctcgacacgcgctacggcaaactctatcccgatctgcaaccgcggcaagaattgcataccgaggtggccatccctcctggaatggtcgcgagcaaatgtgccgatcgcaactccgtcgctcaggccttcgccattggtcagcaacccagtgaccaattcatcactactctggccaaccccaggggctccgttaacgagtacatcgaggtccgcaacaagctgtgcaaaggcgctgaccggcttacctacaacgagtggctgattctcgtaaacggaacccccaaggacctgccggtccgcctgcaagccccctcccaatccatccaaccccgtaagtga

SEQ ID NO: 357815 - DNA, 1104 bp, Pseudomonas aeruginosa
atgagcgagaaatttcagtcggctttgtcagttatcgcaaagcaagaagacaagttcatgtcgattgtcaagctgagtaataccgaagtcgtttttcaaaatgagttgctgtatgcagcccaggcgatgatgaataacgactttctgtgcagcgcggcaatcaagaacccgctatcgcttcgcaatgcattcagtcaggtcgccgcgtcgggtcttactctcgacccatcacggcaattggcttacctggtccctcgggacggacaggtcgttctcgacgtgtcctggcgagggatgattaaggtggcagtgaacgatggagcgatcagggatgcgaacgtcgaacttgtgtattcgaacgatgagtttgagtacctgggtaagcgcaaatccccgattttcaagtgcaagccttttgcaccgatcgatgaacgtggtgagcttttggggtgttacgtcgaggcggaactacctgacgggcgctttcacgtcgaagtcgtaaccctcaaggaaattaatgctgcgagggatgcgtcggatctgtggaggaagcacaaaaagggcccgtgggttacctacgaaagctccatgcagaagaagtcttcgatcaagatcgcgcggaagtattggccattcgcagaagggaagctggacaaggtaatcgagtatctcaacaccaccggtggggagggattcgctactaccggcgtacctatctcggccatcgaacgctacatgggagccgcagatgttgttgattcggttgagccgctacctacctcgaatgaggcagcaccgcagcctgatcaggtcgacgacgaaccggcctcggcgccagcggcagaccaacagtctgtaccggaaggtgtcgtgcttgagggtgaggtccagctggcagatgaagaaccggaagcagcgtcgaaccttccggagaagacagtgaagaaggttgccgagctggttcggcgagcgcagctgtcttcggcctggaatgccgcgcttgagtacgtttcgacctggccggtcgatgcgcgcgcttacgcggagaagcaaatcaaaaccgcgcaagcggaggcttacaaaaccgcctcacaaggcgaataa

SEQ ID NO: 357816 - DNA, 180 bp, Pseudomonas aeruginosa
atgcgcacttacattcacaccctcgttgatctgctgaccaacgaaacgaaacagttccgctgccaggcggcatcgttccagcagtcaattgagatggcagagaaggcacacccggatctgttcctgctcctgaaaccttcgctggccaaggagcaagccaatgcggccgtccaccgttga

SEQ ID NO: 357817 - DNA, 504 bp, Pseudomonas aeruginosa
atgcggccgtccaccgttgaaagcctgaagcaatcgctacgcgactggcggcaggttctcctcgagggtggtccgttcgcagtctgtgcgggagaggtgatcgaaaagacccaggcgaagttgtttctcctggaatacctcgtcggtcaacttgatgtcggtttgaccctgaagcactgccggcgagacgcttggggaatcatcctccccgacgcatcgcagcctggccggtatcgctggcaggcgttccagcgcgatggtttcaccgggcatgccaccttcgactctatggaggagtgtctcggcgacatggtcgatgacggatacggtgcacctgatcctggggtgctcgaccgactggctagcaccattgagtggcgccgcggcatggaggtcgtcgggttgatccagtcctgcaacgcagggctgctcagcttcgaagatgccatgcggcagcgagaggaaatctacgcccgttatcaggcagccgcgttggctgcttga

SEQ ID NO: 357818 - DNA, 603 bp, Pseudomonas aeruginosa
atgacttacaccgaagcacgtcgggcgtatcggaagttggcaaatcagtggtccgaactgatgaattcgccagttgctgttcaagctcgcctcgggaagctgcagggagacctgcaggtgtacctcgacctcaagttcttcccgtctagcccctttgtcgtgggtctgaaccaaggggaacgcgagattgcactgagggcggcacagccagcttttctggcctcgtgtcagtttgcgaagcgccgttacgaacttcgaaaggcgctggcgcaggctcttgccgctgcattacatgcactcggagaacgaaccgggctcgagtaccttgcgatgccaggggcgtttgataaacgggtgcaaacggttctgtcccgcgcggacatgacccgcaagtaccagctcgatgggttgggctacgccaacgtgatcgacgaggacgacccatttgccaaggggttcttcgccaagtcgaagctgcagcgtgaccagatgtatgctgacctgaaactgtgcaccgggtaccgctaccgtgccctcatgctcagcgatgaggagttgtaccgcctggggcttgctgaagaggtgtgcgatgaaagtcgttga

SEQ ID NO: 357819 - DNA, 1044 bp, Pseudomonas aeruginosa
atgaaagtcgttgacctcgcgcagcgctctccagagtggcaggagtggcgccgagaaggggtttccgcgacaagctgtgccgttatcgtgggtgagaatcccgataaaacccccctggagctctggaaggagttggttggcatcgttaccccgccggatctgtcggttatcccgcaggtgcggcagggtgttcagcgagagccaatggcgctgcaggcgttcgaagagaagtatggccagcttggtttgccgatctgtggtgagtcgaaggagtacccgttcatgcgggcttccttcgacggactgctagccaacggcgcaccggtagagattaaaaacctctccgactcaaaccatcttgctgtgcttcgcctcaaagaaaagagcccagcctacctgctttatcggtggcaggtatggcaccaactcattgtcagcggtgcgagtgaagggtacctgtggttttggtcccccaagcatgagccctgctgtctaccagtgtcgctagacgaggtgactcgcaagaggatcatcgccgcggaaatgcgattttgggagttggttgagactggctacccgccggcagcagaccccaagcgggacttcatcccgctggaccagctcgacctggacgcctggcgcaagttggccaagccccggagagagttggaggaacaaatcgcgaagttgaagacagagctcaaggcactgaccaatcaggccaaggaacaggatgcttcgttccgaccgctgatggggaagttccgtcgagccgaggctttaggcgtgcgcgttaccagctacgagatggctggaagtgtggattgggaaggggtcgcgaaggagttgagtgattcaattcctgaagaggttcttgaacgccaccgtactggtggcgctttcgcctaccgacacactgtcaatcccaactacgacgaagcaaccgctcagccggaaccgaaacctcgaatccgaaggctggcgcaagctgaaccacaggagaccgtagagccttccagtgcattcggaaccttctggttctga

SEQ ID NO: 357820 - DNA, 2547 bp, Pseudomonas aeruginosa
atgcctcctctctctttccttcgccggctgctaaccggaaaaggctccctgccgagcaagggcttcgcgcacccggctgaggagttgatcaccccagaactcaagccttacctcgagaaccacaactggcgaaacctgcgataccccccatatcaggagggctatccgggacaggtagccggcacttggttcatgcgtaagtaccaggccgagttgattgaccggatagcaggttcgatcgggcttcctgacgatgagtattcccggtacgtcgaacctatcctcagtaactttgccgagctggcgcacctgttgccggcctcgcaaaaccatcatcacgatggccctggagggctgctccggcatagccttgaagtggcggcatatactctggatgggtgtttgacgactgcattcgatgccagcgaaacgccggcgcggcgcagtatgcgtctacgtcgttggtatgtggcaggggttgctgccggcctgctgcatgacgctggcaagccgctctctgacatccgggctaccagtttcgatggtgtagaggagtggaactacgagagagaaacactgcatacctggtctgtacgaaccgggctttctcggtacttcttgcactggaactctgatcgtcacgaaaaccacgtccaggtctcggtttctttggtccgaggcatcattcctgacgaagcccgggcttggatcagggatggtggccatgacatctacgaggccatgctcgatgccatatccggtaccggaaagtccccgctgacttccttggttgcctgggctgacgaaacctcggtaaagcgagaccttcgcaaaggtcctcgtaacggatctggtggggataccggcgtcccggtaccgcgtttggtaaccgacgctatgttgaggctcatcgacgatgggacctggaaagtaaacacgccaggcggtcgggtgtgggttgcaaccgatggcgtgtacatcgcctggagccaggcggccggcgaaatagtgaagatggttgtgggggacggtgtagtggccctgccgcgctcgccagaaacccttatcggtacgctcgcttcccatgggattgctgagcgcgccgccagcggcgatctctactggtacgtcactccccatctgttgcgcaaaaacggccaggcgccggcgctgcgttgcctcaagctctcgtcgccggacattctgttccccttgtctcctgtgccaccgcccatttctgtgagtctcggcaaagagggcaagcttcaggacttaatcgcgccaaacgacaagcaaggcgcagtggcgagtgttgtcgacactacccaagccgatctgtttggacctgatccgagcggggaggccgttgtggcgcttaatgccgaggctcctacacaaaagaaaccgtcagaagggaaaaccaagcggaaaaaatcccccggagatgccgctacgcaggcaggcccctcgacgggcatcacgccacttcctgctcccgtcgccactacggccgactctgcaagccctacagaaatcctaccgccaagccaagacgttgatacgtccacttctgaagatgcattggctgatggcatgggggagcagcctgtttcgttcaccctcgaagagatgctgggagacctcagccaggtcccgggcgagccaggccatcccttgagcgatgaagtcgagccagactcagtagtagggcagccagaggccagtatcccggctaccgaacctgaaccagcacatcaaagcaccccgcagcagcaggagccgacacagcggcctgcaaaaatttccctgagccaactcaagggcgttcaggtgaaagctccgcagccagcactcactgtgactcagtcgcagtcgcagtcgcagccggagcaggggaaggcgccggcgttgccggctgtgcaggcaactgacgctcatcgtgagattcccgggtcatgcattaagcctgagcagacagagcggctgaccgagcacgaggtttatctgttgcagcagcatccatcccttgcgtcaaagctatttgccgcagcacaggacccactgtcacttcgcggcgcctacaacaagattttcgtccggctcggtggcgccttccttcaccaggacctcaacgacctgctggctgccggttggctctggcagaacatctcggtggaaggtgcgggcatggtcacgaagctgcagaaccgcgatggatttgtgcttagcacggactacagccacatagtgtgcaagctcgccgacctcgacttgcacgtccctcatgtgagccgcttgcctgagagcgacctcccagtgctgcgccgctgcatcgaccaggtgatggccaagtcaacaccggaacaggttggtgggctgcatctgcgcagtatttcccctaatcaggttgccaccattgccacacaaaacggagtcagaccggatcttgtcgaggaggccatttttgccttgcgagacgcggtgaaggtgtccgttcgcaagaaaattttgatccgcgctttgcccgaggagatccccagcaaatga

SEQ ID NO: 357821 - DNA, 1836 bp, Pseudomonas aeruginosa
atgagcgaatgggaatacacgagatactggcgaactaacttcgaggcccgcgaggtagcagcatggggcgcctcgatcgtgggcagcagcgcagtccaattgctcacaagcatgccgatgacgccgtatctggttaccgtagcagttcaggctggattcgcactcgccgcgcttcccaaagcactgcgggtacacaatgccaaggcctgcctctacggtgtcggcgtacacaacatcaccatcgaagaccttgtcggcatggttcgaaagaacaaggacgatatctactttggtgaagccttttcgtggcgacagctgcatggtcagtactccttcgagctgctggccaccgatcttcaggaggtcctcggcaagcgcgggaagcgcaaggcgacagtcaaaggcactaagtggatccacggcatcggcatgcacgaggaggaggcctgtatgcggccggctgactcccggaatatccacttcctagtgtgtggcaccaccggcgctggaaaatcccgctggtttgacctgctgattgcccagtgcgtggctcgaaatgagcctgtaatcgtaatcgatccgaagggtgataaaggcctggctgaaacctgccgcgcaacgacttcgctcattggtaagccacaccggttcaagtatttccatccggcgttcccggagaaaagcgtacgcatgtcgctgaccaagaatttcggtcgagcaactgaaatcgcatctcgcgtggccgtactgatgaagagcgaagccggtgaccccttccaggccttctccatgatggctctgaacaacgtcatccaagccatgttgatctgcaatatccagcccaacctggtgggtctgcgccgcactttggaaggcgacgtgcctgggctgaccatcaaagtggtcatggcctacggcagcgaagtgttcggcgaggcccagtttagccagatggccgacgcagccgtgattagcgccaaagtaaaaccgggtgatatcgaggctcgggcaaaggtgcttcgtcgtgtctattaccaagacatcgcgccggtccagccgaacagcgatatcgaaggtctgctgacaatgctggagcacgagcgctcgcacttcaccaagatgatcgcaggcctcctcccaattcttgtcatgcttaccgcgggcgcaatggggccgcttttgtctccggttctggatccggaagatacccgcccgatctgcgacctcaactcgatcatcaatggcgaccaggtgctctacatgggcctggactcgctatccgactccatggtggggtcaaccatcggctcgctggcgctggccgacctcgcttcgaccgccggcgaaatttacaaccaccgcttgccgaagccggtgaacattttcatcgacgaggcttcggaggtcatcaacgaccagctgatccagctgctcaacaagggccgcggcgccggcatcaatctttacatcgccactcagaccattgcggactttaaggctcgccttggcgatgaggctaaagccatgcaggtccttggcaactgcaaccatgtggtcgcgttgcgggttctggataccgacacccaagagttcatcgcctccaaactccccaagacgcggttcaagtacgtcatgcgcacccagggcaacagccctgaccaaacgggtgtcagggtcggaggcaacgtgggcgagcgcttgatgcaggaagagggtgagaagttcccctcggccttgctcggtgagctgcccgatctcgaatacttcgcaatctttgccggtggggacctccgtaagggacggataccgatcgtgcatttccctaaagctgcttga

SEQ ID NO: 357822 - DNA, 357 bp, Pseudomonas aeruginosa
atgtccgtttcgactcccctggaaattcaacgtcgtaccaaactggatgcggagagcaccaagctgctgcgcaccttcgaccttgagtggcgctgtggtacgcggcttatccatatgatcctggaggctggattccccccccaagtcgtcggccaggcgctagttgaggttctggttagctaccagaagatgtgccgcgacaggactagcgactttatccgtcttcgtgaggttcttggccacgtgctcacgcagcttcggaccgtaaatgatctgccttcagccgatcaggttcgcagttggtgcgatgccgcaaatgttcccccggtggtgcgggagtaccttgcccatggctga

SEQ ID NO: 357823 - DNA, 657 bp, Pseudomonas aeruginosa
atggctgacacgatcgaggagaagtggcctaagggggtattcgcatcgatcctgttcttcttcgtgctcatactcatgctggccacagccgcgccgaatacctgggttgaccgggtgatgctcaaggaacgggcctggggtgtttctctgctcggaggtgctgatatggccagggtggaggaaaaaactcgcgcctggttcaccgctctggtgctcgactctggagcaaaggcgatggtttctgatgtgttcatgcaaaagagcgactcacgaggaacggtcgatgcgctcgagcgcaagacgcgttggtggttcgactacctggattcgcgtggtgtcgcgctgcagaagatcgtctaccagatgctatatcgcatggtcctaacgatgttctggctgccattgttgggggtcgtcgttgtaccggcagtctatgcagggtggatgcgctggcatgctaagcgcgaagggttcaactacacctcaccgttcctaaacaaccatgccactaacctgctttcatggggaactgtgttgcttgtgctgagcgttctctgcccgctgccgcttcctccgctgatgatctcgacgttcattatcgtcatggttccgatcctgctttccctgctgatcagcaacctgccgaagaaattttaa

SEQ ID NO: 357824 - DNA, 813 bp, Pseudomonas aeruginosa
atgtccgctacaacgccaacgactccggaaaacaccaactggaaggcgaccatcgccatctcagctttggcctctgcccttacagtaggtgcttacttctactacgacacgacccgcgcgatgcaaagcaggatcgactccctgcaggatcaactgacggcggtctcggcgcggggactgtcccctgacgaaatcaacgatctggtcagtagcatgaaggctactgtcgcgcgtaacagttccgacgaaaaggtcccggacaactgggtctacgggaacgccaatgcgcgctacacgctcgttgaaatgactgataccgagtgcccttactgtaaggcgcacttccccttactgaaatccctagtcgagtcctctgcagggcagatcaatgccgccctgcttgaggtccctttccttggcgaggcttcccgacgccaggccaatgccatcgaatgtgcaggcgagcagggcggttctgatgcagcctggaaatttgcgcagaaggtctttgacctgacaggtggcgaaggaaaaggcgtcagccaacccctggtgtctctggctaaagggatggggctggacggccctcgtttctcagcgtgcacagagtcgagggcagtggccaatcgagtgagtaaggatctcgatcaggttatccagctaggagtttctcaaacgccgtccaccctggtggtcgacaacaaaactggcaagtcgatattgctgcagggtgagaacgcgaacccagacggcatcctaaaagccattgcgacaatttccccctcgaaaggagctctaggccatgagcaatga

SEQ ID NO: 357825 - DNA, 291 bp, Pseudomonas aeruginosa
atgagcaatgagccgacagatattcccgcgcacatcgatgagcccccacatgtcctgttctggcgcctcgacgaggtcatgccgatcggcatcggactagtcgccggcgtattgatcgcgcagctgaccatttgcacggggctcggcctggtgctggcgcgcttctaccggcgtttttgcgataaccgtccggacggatttctcttgcacgccatctactggtacatggggtctatcggtacgaagcaagctcgaacgatgcctaactcatacgaaagggagttcatctga

SEQ ID NO: 357826 - DNA, 636 bp, Pseudomonas aeruginosa
atgctgcttgggtcgttgaaaaattccttccagggcatgcgcagtgaggtcaagttcacccgtatcgctctgatcctcgcgatcttctcaacgatggtcacatcttgctcggcgctccgacgtgatcaacctgtagtagttgtaccgcccacaatgaccgaaaaggcgtgggtcagcaaaacgcaggcgcaggatgagtacaccatcgcctgggctctgtacattgcgatgatgttgggcaatgtcaccccacaaaatgcagacatagtgaagcaagcaatagggcctctcctcgatccatcgatctaccaagaaaccatggcggcgatagacaagcagattcaacagatccgccaagaccgagtctcaacccacttcgaaggccaaaaggtccttcgggataacaccaacccgaacaagtttttcgtcaccggtcattcagttgcagagggcccagccggcgatcgcaaacgcgagaatcgcacctatgagtttgagctgaagatccacgactatcaccccgtgatctcctggctatctacaaatagcggcgaggcccgtactcaagacgtgcttgatcgcgaggccgaaaatgccgagcgcctcctgaagcggcagcaaaagcacaaaggttga

SEQ ID NO: 357827 - DNA, 795 bp, Pseudomonas aeruginosa
atgccgaagtccctccctccggctcctccggtggacaccaggcaggatgtggtcgttggcaacggcacaaacacgctgatccccatcagcctcggccagattaaccggatcgtcactcctttcgacaatcccaagatccagaccgtttcgcaggcccaaatcgacaccagtgggaacgtcatctacgtgaccaccgacgtgcctgaacaaccgatcaccatgtacgtcacgccggctgacgatgagtcggtcgccatctcgctcaccctactgcctcagaaggtgcctcccatccaggccaacttgatatttgctcggagcctgcaaagcacgtcgaccgcgactggcgctgcgggaggtagcggcaacttcagttcacttagttcgtacagcggacaggccaaaaagtgggaacgctccatgccctacatggacaccctgcgtgagctaatgcgcgacctcgccttgggcaagctgcccaggggctattcgatgggggcgccctccaacggtggtcacgttcctgcctgtgcacaaccgaacctgagtttcgactttgcgcactcccagctgattgagggacacgacttccgggtgttcgtggccacggcagagaacatctcggcatcgacagtggagtttgattacggcaactgcacccaccccaaccgcgcagctgtgagtgtctggccacgagaggtgcttgagccggggcagaaaaccgaggtgtacgtggtcacccgcatccccatggatgtgccggatacatctgtccgtcccagcctgttgaattga

SEQ ID NO: 357828 - DNA, 1374 bp, Pseudomonas aeruginosa
atgaacgcgtttaatgaatttgttcaaaagctcagcccgcgcgccaaaaagctactggcaatcggcagcacttttctggtgatcggctccctggttggtgttgctctgcagtttgcggggcccaaccacaaagagcgcacgcccaaaaaacccaaggtcgaagcggtcctcaccgataacgatccgcgctcgctgggtatggagtcactggcaacccaggttaagaacctccaggcggacaatgctcgtatttcgcgactgttggagcagaagggcaaggacgcgaataagcccgaaaccgatgacaagctcgaccaactgagcgggcaggttcaggccctggcgacagagctcggacgtgtgtcgaaagaagcctcacaaggtcggagcaaaaagagtgcggaagagggggactttgccgacgatgacgagggtgatggatacgaagggcgctccactcccgggaggtttgttcctaaggccacggcatcttcgactgatttgcgcgatgtctacaacagcgttcccccgccacccaaggaagatccgaaggtccgctcctcggtcaagcaggagcctgccaagatccggaccatccagagcaaggaggagcagaagcaggaaaagggggaggacatctccgtaacgctgccggctggctcaattctctcaggggtattggtcaccggtatggatgcgcctaccggccaaaaggcccaacgcgacccctttccaacgttggttcgcatcaagtcggaagcgatcctcccgaaccgctttcgtgctgatttccgtgagtgcttcctgatcgctggtggttggggcgacatgagttccgagcgtgcatatttgcgcgccgaacgcctttcctgcgtacgccaggacgggaagactctcgaggcctctctggaggctttcgcgactggcgaggatggcaagaacggcatccgcggcaggctggtcagtaagcagggccagcttcttgcccgcagccttatggctggcttcatgcaaggtgcctcttccgtattcaacgtccggcaggttccatcgatcaacatcacgcgcagtggctccaacggatccagtgcccagcaaaatccagtttatgagcaagtgctggattcgaatgctctgcaaggtgcagcagcgactggtgttggttctgctttggagcgcatcgccgattattacctggaaatggcgcagaaccttttccctgttattgaaattgatgccatgcgggatgttgattttattgtcaataaaggcatgacagttaagttcaactctaaaaccctgaaaaactcggaatcgtcggtggatttgaattccaatcgtggcgacaacactcagcgttcgactgctggttaa

SEQ ID NO: 357829 - DNA, 618 bp, Pseudomonas aeruginosa
atgtttaagcctttcatggtggtcgtgttctctagtctgctactcagcggttgcgcaaaaatgctgaatgttggtgagagtgagtatggttgtaagggaatgcctactggcgtgacgtgcatgtctgctaaagatgtgtacaccgcgactgaaggcgacagctataaaacgcagatgaagatggagcaggaagaagctaaaggcggaaaaaattccaagtcttcctcgggaaatggcggcggtgatacccgcgttctgtatgcggaaggtgcagacaatgcgccaatgccgatgcgtgctcgcaaccccatccctattcgtacgcaggccgttgtgatgcgcatcgcgatcgatccatgggaggacgataatggagacctgattgtcccgggtttcatctataccgagattgagccgcgccgttgggaaatcggcacgcggcaacctacggtcagcccgacacttcgtccgctcaacattttgagttcccaggatcaggactcgaaggccccacagagcccgataagtgggaggggccagagcgttcaggggcagcgctcggcgtcggcaaaaggaatgcctcacgcccaacagccgatacagatgagagctaactaa

SEQ ID NO: 357830 - DNA, 5097 bp, Pseudomonas aeruginosa
ttgacactgagcacgccggaagacacgccggcgagcattacgcttccggtgcatgacgtggacctctcgttcgaaggggactcgcacaccttcgcgatcatcagcggcccggccgcagcgcagggtgcagcctcgatcagcggtaacaagctgtccttcacgcctacggctaactggaacggcacggcgaaggtcacctaccaggcgaccgattcccatggcgccaaatccaacgtcgcaactctcaccatcaccgtgacgccagtgaacgatccgcctgctgtggacgatctgacgctgaccacgccggaagacacaccggctagcatcacgctaccagtgcatgacgtggacctctcgttcgagggggactcgcatgccttcgcgatcatcagcggccctaccgcagcgcagggtgccgcctcgatcagcggcaacaagttgtccttcacgccagcggcaaactggaacggcacggcgaaggtcacctaccaggcgaccgattcccgtggcgccaagtccaacatcgcaaccctcaccatcaccgtgacaccggtgaacgatccgcctgctgtggacgatctgacgctgaccacgccggaagacacaccggctagtatcacgctaccagtgcatgacgtggacctctcgttcgaaggggactcgcacaccttcgcgatcatcagcggcccggccgcagcgcagggtgcagcctcgatcagcggtaacaagctgtccttcacgcctacggctaactggaacggcacggcgaaggtcacctaccaggcgaccgattcccatggcgccaagtccaacgtcgcaaccctcaccatcaccgtgacgccggtgaacgatccgcctgctgtggacgatctgacgctgaccacgccggaagacacaccggcgagcatcacgttaccagtgcatgacgtggacctctcgttcgaaggggactcgcatacctttgctgtagtgactcctcccgaggaggaacacggagtcgcatcgattgttggcaatgtgctgtcgttcactccaagccaggattggaatggaaccctaaccttcacctaccaagcgaccgattcacacggtgcggtatcaaacgtcggcaagatcactgtgacggttaccccggtaaacgatgcacctaaggccaccggggcaacgatcacggtcaaggaagggcaacctagcccccacgtcatgccttgggttgttgacccggacctcgacaacggcgacaccttcactttttccgtcctctccaatccggcacacggtaccgtggcgatgaagagcgatgggttggtttacacgcccaatccacaatattttggtgacgatgctttcaccatcagggctaccgactctggcggcctgtcggttgatggggatgtaaacgtgaaggtggcgaagttcaactacgcccccaccgacatcactccgcacagccttttgatgtttgccggcatcggtggtagcggccagcttgcagtgactgaccccaacacatggggaagtacgacgctgacggtggttcaacagccagcgcatggcaccgtttcggttgatggggccttgctcacgtatcgaaccgatggagatcagaacaccagtgtgcgcattcgcgcgaccgaccaagacggcctgtatgtcgaacaagacattgcgctgaccttcggcccagcctgggatttcttcaagaatcgcgaggtcgttaaaacgtcctcagcgccgcaaattcctgcagtcgcggcacagctgaccaacacaaagggtcagcaggcattccagatttcccaaccagaggtaattggtgcccttggcagcgatatagtggccatcgtcacccccgactcttcggttggggttacgctccagaaacgcgacctggcgccgggcattggtatgcgcctcaccccaaccgtgctggcgagcgatgatcttgaagccggtatgggggggctggatgtcggtaaagatggttcggcaaccgtatacctcagtcgtgctgatggggctgggccggtttatgccgtgcctgttcatgtatgggcattccagggagccctgcaggcagatagctggacgatattccaggcggcaggtcggacttcgatcaaggtcgctcagacaaacagtgcctgcaccctgcttaccgacgcccagatggcgaaggggcgtaacgcactcgactctccaacctgttatgtgacctggacgcagacgcccgaagagtggcgggacaacagctcgagcaccaacctgctgatgactgcaaccgggaatacggctggtccccagcaagtggctgcgacggtgtacgtgttcgatcagaatggcgtgcaacaaaagatgctggacctgaccaataccctgacgatcaagccgatctctgggcaggtggcctttgcgcttacacctcagattcaggacgtctaccagaaggtccaagctctatcgttcaacctgaagcaggtttcggcgccgacgagttgtgtgccgactgtcagtgcagatgtggcgaaaaagagttcgcagcagtggcagagtaatccaagttgcctcattcagtggatacagcttcccgatggcctcgcccagcaggagaacagcaccaacccactcctgaatggcgcgatgaactcgggcgacacccaaaccgtggggtggaaggtttcgattttcacgccgagcggtacccagatcgatgtagggtatggtgggcaagacttcaacgtcacaccgccgccgcctgcagtggtgacgatgcccaccaccaattttgttaaggaaggtatgtactgggtgtctcaggctggcggatcagtgggcactattacggctagcgcgatcgccgcagacctgacttaccaagcctcgctcggaggtgcccaagtcgaaaactcgatcgtactgagctatggccaggcgcagcgtttcaaccgttacatgagtgcgaacgcagctcccctgtggtctcagaccccattctctgttgatgtgggatatcgagcgatgcctgaggtgcacacgcagcaatcggtgcagttactggctgtcccccaagcttcaatcaaacctgtaattctcaatgaccaacagaaggtgttggattctcaggcgttggttattaccgccggaattcgcaacaccacctacctgaaggacccctacgaccttgcgtcgatgggggattgggatatccgtctactttcaaccacggccggcaccaactaccaacccctgaccgattggcagcctatagatgcctcagggaatgcctcgttcaacatcgacctttccacgctgaccaacaaggcggtgcggattatcgctgaggcacgtgtgcattcgcctgtgccggagtactcgctgattcggcagggcagctctccgctggtgctaaccgtgctcaacgggaatcccctggatgggaagattcaagccttacgtatcatggggccggcgccgcttcgcaacagcttctacgcggtgacgacagaccgtatgaaaagtagcgacctaggtggtgtcgtatggcagttgagcagcgacgatggggcaacctggaacacggtaagttctgatccgaggattccgcaacacctgagttacaccttccagcggggtcattatctgctacgggcgcaattgaccaaccgcaactccggggccgtctcgatgacgccgacgatcgacatcacggcattcgttgttccgcaggcccgcttgaaaggcccacagaacgtgttcattgacgactatgccaggttccttcttaccgatactgcagggaagccactggataccactgggatgaatgtcgactggtcactagaccgcggtaagacctggagccccagcacgaccggcgatgggacctacaccctaacccgcagcgaggcgcagcggattaccctctacgggcgggtgaagtactcggactctcctgatgatcccagcgtttacaaaaaggtcactgcgggcgttgctttccgccctgttcgcccacccagggtacagatcatcgggccagggcatcctgaggttggcaaacaagctacttggacggcgaacatgatgctgccgtacccgaacatggacgtgaccatggatggatacttcatcctccccaatgggcagcaggagcaaagcaagcaagttcagtacacgccaactcaagaggacatggctactgagaagagttacatcgggttccaaggctggatcaacggctatgaggaccgcggcggtagcggtctaacccagcacctgctgcagttctggaagtacatatggccggactggtacatccagagcaaagtaagcgcgcaatacgcaccggcggatctcacgatgaccgctcgcaatcgtggcaccttccagcagttcgaagggctgaaggtcgattgggacgtaccaccgtatgacggtatgtcgatcatcaaggactctgaccagatgagccgcattgtccgcgtcactgagccggggacctatagcttcggttatacggtcaccgactcgcgcgggaatctgagcacggttaccaccgaggtagaattccttccgcctccaccgtggaaagtccagctggcctggtccggggataacaagttcgatcgcgctcccctgggcatcttggttcggccgtcaatcaccggtggccatccgaaggatcggatactgagcaaggcctactctcttgatggtgccaagctggacagtactggtgattatgggcgcgccacccttctaacgcctggtgagcacacggtatccctgagtattacgacagagatgggtaaggccgagaaaggagaggtcaccatctcagtagtagcgaaccagcctcccagctgctcggttgacgtcacgaatgggcgtacctcctggttggcaaaggctacttgcactgatcctgatggccgtgtgctgaagaacaactggtacatcaacggcgagctgcaagcactgggctcaaacaacatctccgttccaatgtggagataccccgatggtgagccggtgatcacgttggtaggtgtggatgacgctggtgctgagtcgacaccagtctccaacaagtaa

SEQ ID NO: 357831 - DNA, 348 bp, Pseudomonas aeruginosa
atgcagatccaaaaacccaaaatgaacacgctgctgatcggcgcggccttgatggtcgtcgccggcgttgcgctggccggtaccggtggtgacaccttcgacacggtgtgggtgaccctcaccgactggatgcaaggaaccctcggccgcatcctgatcggcctcatgatcctgactggcatcggtgccggcgtactccgccagtcgctcatgcctttcgtaaccggcgttggcggcggtgttggcctctatgctgcccccgatgtcatcgagtcgatcatgaccgctacccttccggcgatgcagggtctgaacgacgcgttgctcagcctgccggtgtcgatctaa

SEQ ID NO: 357832 - DNA, 717 bp, Pseudomonas aeruginosa
atgactccaattatcagtttgacccgtgtcgctttcggtttcgcttcgcttgcgctggttgcccaggctggggctgtaaattttcagcagtcgaaggacgtggtgatgttaccggccaacgcgatgatggccatcgagaagaacggaaagttcgccatcatcagtgacaccggtcgtttcattatccaggggactgttttcgacgtctggcaggacaaggaaatcaagacgctggatgacgctcggtttgctgctcaatacgtgccggtcaatcgcgtgaagatggggttcagcgatcttgccccgatgagcatcggccatggtgacaaagtggtcaccatgttcgcagacccggcctgtacctactgcaaacaagtcatggatgaggctcgtcgagacctccccgaaggctaccggcttgacgtcctggagttgccgttgctgacggagcggagcgggccaagaacgaaagagttgctgtgtgcggaggataaagtcgcggcgtggaaagctggggtgtctggagacctagacacccccttggtgcagaagcccgaaggcgcctgcagcatcgacatcatcaacaagcgccgactgacagcgcagttcctcggtgccagaaacgtaccgttcctcattcgtgatgatgggttgacccatgagggcaagccggccgaaggcctgcgcgcttggatcgaatccaatcggtcgaagtga

SEQ ID NO: 357833 - DNA, 2472 bp, Pseudomonas aeruginosa
atgtcgagtctttcctctctcctgaccaatactccccgcctttcgaagctgatcaacgggctggcctacgagcctgacctggagctattccagctggagggtaaccgcgtcggttttgcgttccgttgttcaccgttgtctgggtctaccggcgatgaaggtgagcgtctgaaagcaggcctgaccgtcgactggcccgaaggtacggcaatcagcttcagcttgatctgtaccgagaatatcaaccacctgaagactggctatctgaacctgcgacgtgcattcgtagaacgtggggtctcggaccttcatcctgaaacgcagacactgatccagaaagtcacgcaggcgcgggcgcagtacctaagcgatcggaccatggtccccgtcgatagcatttcgggtgtgaaggttcggcaacaagagcttgtcatctcggtaacgctgcccattaaggactcgctgcccacgaacactgaagcgacctttgcaaaggagctcgccgatggtctcaaaacttcgttggacagctgcaacctggcgcctgtccccctaaccaatgactcctatcgggaagtcttcagctcgatactcaacaagggtcctactgcctcgtggcgcgagacgcctgaaattcgtgccgagactgataaacccctgaatgaacagttgctcgatttcaatcgcagcctaggggtcaagaaggatcacttgcagatcggtgaggactgcttcgtcaaaaccctctcggtaaaggcatatccagattcggtgtggcaaggggaggcatcgcagtacctttccgacatcctttcgcagcggggtggtatccgcggtaactgcatcatcaccagcacgatcttctttcccccgcagcttcctacgaaggacaagctgagtcgaaaccgccaatgggcgatcaaccagagttttggccacatggtccactttgtgccgatgctcagaaagaagaaggaagcgtacgacaccctattcgacgatctggataaggggctgccgaacatccagctgaacaccaccctggtcgtttttggcaaggacaaagaagacctgattcaggccgcgtccaatgccaaaagccatttttccacgaggggattcaacttcatggaggacaagttcgttgtcctgccattgttcatcaacagccttcccatgtgtgcggacccccagattattcgtgatctgttccgctaccggacgatgagcctggctcaggctttgccgttgatcccgatttatggtgattggcgtggaaccgggaccccggttgccccgttcatttcgcgaaatgggcaaccgatcagcttccatctcttcgactcggacaccaactacaacggcaccatcgctgcagcttccggctctggtaagtccttcctgaccaactacctcatcacctcgtatctcagcatcggcgcgaaagtgtggtgtatcgacgttggccgatcctacgaaaagctcgcaggagcatacaaaggggactttgcgtgcttcgacaagggctcgcagatttgcctaaacccattcgagctgatcgaagacttcagcgacgaagaggacgtcctggtaggcctattgtctgccatggcggcaccaacgcagccgttgctcgacttccagacggctggtctaaagcgccacctcacggactgctgggcggagcatggcaaagcgctgctggtcgaccacattgagcaggcgcttctcaaagatcctgatcagcgcgtcagggacattggtcaccaactttacgccttcacgtcgcgaggccagtacggcaagtacttcaacggcaagaacaacctcaacttcaagaaccccttcactgtgcttgagcttgaggagctgaaagggcgggttcacctgcagcaggttgtgctgctgcagctgatctaccagatccagcaagacatgtacctgggggagcgtgaccggccaaagatcgtcatcatcgatgaggcatggtccctgctggcgcaaggtaacgtgggcgaatttatcgagcacggctaccgtcgcttccgtaaatacgggggtggtgcgattgtcattacgcagggtgtcaacgacctctatcaaaacaaggtcggccaggccatcgccgagaactccgcttacaccctgcttctcgggcagaaggccgaggcgatcgatgccatccaggaaaataagcgtcttcccctgggcgaggggggatacaagatcctcaagacggtgcgatcgtacaaagggcactactcggaaatcttcatgctcacgccgaggggcgctggcattgcccgcctgactgtcgacccgtattccatgctgctctactcgactgcaccggaagacgtccaagccatcaggaactacacgctgaccggcatgccgcaggacttggccatcttccaggtactgcgagaccgtggtgttgacgtcacctttggtgaacaggaggcagcgtga

SEQ ID NO: 357834 - DNA, 567 bp, Pseudomonas aeruginosa
atgccccgactgttcagcatcgaggccaaggttcagaaggccctggccgacgtcgaaaagggacgccgccggcgaccgagattggcggttttccttctcaaggggaccacccttgcagttgtgctcgccggcggcattgtgctgctggccagccgcttttcacttgccatcgcacctcaagctgctctttgcctcccaccgtaccgggtttggttgatcgataaggacgataccgaaccagtacgagatgaaatcttcgccttcaagtcgaaggggctggcgccggtgtttgctgatggcacgaatatcgtgaaggtactcaagggcatgcccggcgataaggtgagcgtctcaaccgcggtgacaatgatcaatggctcagttgtaggggagggcttggccgtcgcggctcagtaccacatcgatccgcagcgttacgttcgccagggtcgcattgagccagagcatttctggttcctcggccgcacgttggatagcttcgactcgagatactggggctctgttgagcgcagccaaattttcgggagggcttacccgatatggtga

SEQ ID NO: 357835 - DNA, 1248 bp, Pseudomonas aeruginosa
atggtgatcgcacgagtttcattggcaattggtcttgcagccgtttgttcattcgctggcgccgaggaccttgatattcagcggcccgaccttgaaaagctcgatccagcaattctcaagcaggtaactgcaattcgcgaacagggagcagccatcacatcagcgatccctcaacgcaaggacgtcgactgggtagaacacctcgcccccaattcacttcagtctcaggaggcgcctaccggggccatcagcgcctcgaacgatgcagaggaagggggaggccagggcagagctcatccgcttggcgagggggctcatacgcttatcttcgtgtcttggtccatgggggcggccgcgattcaggacatcttggttgcatacgacggagtgccaggggttggcgtcgtattccggggcgttccagatggaatgcctatggctcaggcagtagcgaagatgcagaggttgactcaggttaccaaggcaagcacgccgatcctgctcgatcctttggcgttcgaacgtttctcgatttcagctgtgccgagcatagcccgcgagacgccggcgaagatgttggtcgcggtggccgctggcagctcctcagagagtttccttcaagcgaaaattgcggaagggaagcatggcgaccttggaactgtcgggccaactactgaaattctcgagccggatctgatggacgttgccaagcagcgaatcgcccagctcgataccgatggaatgaagaaaagagcaatcgcgagattctgggaccaacagcaaggaactcctttgccaccggtgacgaccagcaccagaagagaggtcgacccgagcgtcatcatcccccaggacattcttgatccttcaggcaaggtgctggtgaaggccggaaaattgaatccactggacatcatgccgttcggtatgaagctcgttgtgattgatcccgctcagcgttggcaagtggagttggcaaagcaggaggtcgacaaccgcggtcagctggccgtcaccaccatggcgacccacattgccagttcatccgaagatggctctcctgctggatgggatcttttcaaccaggtgcaggacaccatagaggcgccgctgtatctgctgcctgcagatttagcggcgcgattccagattcttcgcgccccatcaatcgttacggcggaggggaagcattttgtggtcagtgaagtggcccgcgattctttagaggagagggcagatgctcaataa

SEQ ID NO: 357836 - DNA, 1032 bp, Pseudomonas aeruginosa
atgctcaataacctgatcgcaacaatgctgctgctcctatcgatgttgttctcactgtcgagtagtgctgaagaggtcatgtgcgatgactccggcctcctcggtccgaagttgttcacggacatctgctgggcatgcctgttcccaatccgtgtatctggagcccaaattacacccggtgaagcgccatcaggtgcttctaagcaggtcctgtgtgtatgccaaaaggggtcatcgggcatctacacgcctggggtggtgacctccatgtggcaaccggccaggatcgtggaaaacgttcgcaaggcaggatgctcgccgacactgggaggtgtaacgctaccgatgggtaactcgcgcacctatggtcgtttgcgccaggacaacctcacaccgaccggacaagcagcgggctcgttctatcacacgcactactacgcattccctctgttgcaactgctagacctttacacgccgacgaagtgcaacccggacgggtatttggatctggacatcatctcgttctctgagatcgatcccacgtggacctcacctacgctggccttcttccagaaccctgaggcggcagccgtcgccaaccctctagcgattgctgcttgcgcggcggattcggtgtctgttgcatcgggccatgagccattggaaagcatgtggtggtgctccggtacctggggcggcatctatccccttactggtgtcactccagctcaggacgtcaaccgctcctctgcactattggcagccaggctattggcgcagcaacaccggcgcggattggctcgtcgcacaatgggcgacgataacctctgcaatgccggaatctacccgaccttgccgaagagccagtacaagctgacccagttctatccgaagtcgcagaaccagaaggccatgtggattggtacgccgcctcagttgtgggatggcggtcctgcacgtcacgtgcccgggaccggaaacgactcgatgtacatggtctggcgctggacggactgttgttcgaacctgtga

SEQ ID NO: 357837 - DNA, 726 bp, Pseudomonas aeruginosa
atgaaccatttcctgtggctctatcttccgcccgtcatcggcctaattgcagtcgctgcgatcggccactacctgttgctcaatcgcccggcatatcgtggatggtggggggaatacaaggtcaacttcatgctacggctgtgtctgtcaggcgagtaccacgtcctgaccaacgcgctctatcgtggccagctgccaggtgaaacgacgcagattgaccacatagtggtgtcgcgctacgggcttttcgtccttgagacgaagtgtttcaaggggaaaattattacggatccgacggagccggagctctggattcagatcgtccgccggcgcaagtacaagctgcagagtcccctgattcagaactacgctcacgtcaaagcgctgcagaaggtgacgggtatccattcgcagcagatccatagcttcgctgtaatggcgggttcggccagcttcccctatgggatgccagaaggtgtttttgggatctggggggtagtcagaatgattcaatcattcagaacgccagtctttacccccggtcatgtgggatcactgttgaaggggctggagcggaggcggatgaagggtgggtactgggcggctaagcgtcatgtagatcgtctgaacagtaaacatcagcaatcgaattctagtgggttagggacatccagaggtacgtcccaagtggaacgcccagaagcaccccgagaactaggcctgtga

SEQ ID NO: 357838 - DNA, 213 bp, Pseudomonas aeruginosa
atgccaggccgcagagaaaaagcgaaaacccctgatcgattccagcagtctcgctggatggacctggtgcaacagcgagagttcgaaactcccccccaagaagcccctttctgggacaaagaaagcgtggcggccgtgttcacaggcctagttctcggggtgcttctgggcgttccacttgggacgtacctctggatgtccctaacccactag

SEQ ID NO: 357839 - DNA, 729 bp, Pseudomonas aeruginosa
atgaccacccaagacacttctgcacccgccccaaccaatgggaaataccaatactcgaagccgagcttcaacggcgagctggtactgaataccgagaaagccaaagcctttgggggcaaccgcttcgatcaagtgatgacggggcttttcatcattgatgtcgtcgcgcgccagctggccaaaaatctgaaaacctacgatcacaaagcggtcgcagcggccgtttcaaccaaaatcggggaagtcgagaaaatcgtttccgatgagaccgcgcgcatcaccgcccttctcggcccgcgggcggaaaagctaccgaattacagcaatcccctggtgcgctcctacgagattaccagtccagaaatcgcgcgattcgctcgcctgctcagcgacttcgataagttgatgatgctgattgatgttggctggctggacgagctgatcgagagcgacgatgccgaccaattcagggaagagaaggagcggcagattcagcgcctcattcgctatctgtacgggacggggcaatcagcgcgcagtaaggcctatgccagcaaatctgcggaagccgcacaactcaaagccgatatcgagaaggccgaggctcgtgaacaggttagtaagaacgagcgagccgccgccggcattcttgagcccaaagaactcgatgcgatcgagcaaatcgaagcgcacgacgcggcacacaaggccgaaaacgccgtggcctaa

SEQ ID NO: 357840 - DNA, 321 bp, Pseudomonas aeruginosa
atgtcccaagtaacagaaaccctgaaggctaaggtgctcatcgggtacggcttcctggtcgcaatgatcgcggcgttctacgccccgggcttgctcaaggcggtcatgcctattgccctctgtgtagttctggctgctgtactgctgaatgctcctcacgtgtgggcagtatgcaaacagctggtacacaaacgtcagcgcgtccatgcaacaagagccaccgtgcaggtgggtaccaagttcacttggtgtacgcacgtcgactacgacaactacttcatgccgacctacctgcgtgacggggagaacggccatgaataa

SEQ ID NO: 357841 - DNA, 627 bp, Pseudomonas aeruginosa
atgaataaggtccgtgttgattttgacgtccccagctatctgcgcatgtaccaaggcctgtgccaacactcggatcgcttctcaagggtcctgcctgcttttcttgcagaagaagacaaccaacctttggagcctgtagtgatcaaccgcctgtaccggccgggcgatcgcagggtttccgccgtggttgaccaggtggccgaggctcgtccagttgagggcgagctgctagcaccggaagctgaagtgcagaacctactggcggatccttcgtcagtcgttcatgccacttccgatgacatctctgagtctgagatctcattccgcgaaggtatggaagggcagggggttgccgggatctacaacggctcaggctcagctccttaccgtttcagaaaaagcaacggaagatcgttctacctgcgcgtcggcaagcacctcatctggggtactgagttgggtgcggagatcatccgttgcggtgcccagcaaggagacaacatcaaggtaacgttcctcgggaaaaacccggtgaccgtgcctgtgactgtgttacgcaatggccagaaggagaccgactggaaacctactcatcgaaactcctggcgcattgaaaaaatcgattga

SEQ ID NO: 357842 - DNA, 1134 bp, Pseudomonas aeruginosa
atgtccaatccctcgacgggcgaatacgccccagagaaagttgatgtgctggctgccgcggaaggtggctggagcgacatcttccgccagctagcgccggcattgtctgcagcacacgacaagccaggccggaactttccttgtcccgttcacgggggcagggatggtttcaaaatcttccgcaagacagctggtgagtctagcggaggggtgtgccgaacctgcggcatcaaagccgatggtctggcgctgctgatgtgggttaacaaatggagctttcatcaagccctgcaggaagttggaaccctgtacggagtgaaggatccgtatggcagaacctcgatgtatgagcgcactgcggcggcggtccgccagatcatggtatcgaatccaattccggcaccggtagcttctggtccgagcgacgattggattcacaaaacgctcagaaagctgtggcaggaaagtttggatctaacccatccagacgccgaacctgcccggctttacttgaggtcccgcggcattatggtttgggacaggccagaactgagtcgcttcgtgcgctatcacccgagtctttcccacaaggatgagagtggagagcgttcggagtatcccggcatgctggctgcgttgatttccccacaacgggaggcggtgacgcttcagcgttacttcctgaccagcaagggggaaaaggcgccaatcgaaaaacctaaaatgatgttctgtatcccgagcgatcggacccttcccggctgcgcaattccaaccgcgcgcccaggggaggttcttgatgtctgtgaggggttagaaacggcgctagccatcgaaactggacggggtgttccggtctggccgttggttaacacgtacttgatggagcaattcgtaccaccgcctgtaacgaaagccgtccgaatctgggcggacaaagacaggaaaggtgccgggttcaactccgctaatgtactgaaaaaacgcctatgggaaatgggtatcaaggcgcagatcctgctccctgatctccctatcccgcaaggaagcaaaggagtcgactggaacgatgtgctgcttcaatgtggcccagccggctttcctggtcgggaggcttaccgcgcttcgcggtag

SEQ ID NO: 357843 - DNA, 735 bp, Pseudomonas aeruginosa
atgctgccgaagctgcgcgatgcggcaatggataacccgagccgggagaacgtggaggcgtactactacgcccaacgcatcatgctcgacaaggcagaacggttctctcgcagctcggtcgagacaatccgcaacgatccgttcctcgatgaggatatgcgctatccggcttcgaacgccgcggcagacgctctggcaaccgcatcgggaaaacagcgggacgcgctgatgcatgacatcgcgaaaaaatcggccctggtgttcttctaccgggggcagaactgtctgctttgcgagcaggcactttccgcggtatcggcgttggaatttcgttacgggtttaaggtcatgccggtttccatggatggccatcccttgcccagcgggaagtatccgaacacgaagtacgacacgggcctggctgaaaagcttggtgtcatgagcgcaccggctttggcaatcgcgatcccccccaatgacgtgaaggtgatcgccttcagcacggtatcgatggataccactaccagccgaatactgatcgccgccaaggatgcggggttgatctccgaacaggagctcaactcaacctctcgaatcaacaacatgggtttggtcgactcgcagaaactgaaagacctccctcccgacgtaacagcaaaaccccaagcctttattgacaggatgcgcgaggaagcacgacgcgcgttccaagaatctgtgggaggtgtgaagtga

SEQ ID NO: 357844 - DNA, 1404 bp, Pseudomonas aeruginosa
gtgaaactccgtcaacttgcaatctcggccgtgctggcaactatgccgcccatggcctctgcgtcaattcagaatcaggtcgaccagatgttcaatggcatggtgaatacgaccgtgccgggggcctaccagaccgctactcgtggcgtggtaactggcggttctattgttctacgtgaccgcatctcaacagccaacctgatcagcattacgccaccaagtgctaaggccgggtgcggcgggatcaatctatattccggctcgttttcgttcatcaacggtgatgagttcgtggccctcatgcggaatatcgctgctaacgctgcaggggtcgtttcaggtttcgcttttgacctcgcactagacgccatggatgcgcagaccgccggagtaattcgaaacctggcgaataagatccagtcgcttaaccagatgttttcgaatagctgccagatagcaagtggcctagttacagatgcaaaaaaggcctatatggaggcgagtgaccttagctcggcgatggcagcatttggtaataacgtggccactgacttcttcagcgcgaagtcgacagcagatgactcaccggcgaaccgaattgtatcggcaggaaaggcaaccctgtgtaaggaggtagggaacgtcctttggtgcgccatgcagaaaacgaatctcgtatcccaaattctcttcggaagtgatgagaatgccgaattcatcatgtcgatggtgggttcatatattgtgactccagcgaccgatgataagggaggaaagaatttcaccgtgaatcctcttccaaccttaatcggtagcgaaggtctgaagatttttgttgaaggaacaaagaacagcgggctaagagtctaccgctgcgataacaatgacaatagctgtcaaaaaccatcgatcgcgaatatgagttcctttgacggcttagcaactcgtattgttaaagaccttcaggacaatcaggtgttagagcaccttgccaatggtgtgctttcgccaggtgacgagaatcgctatgcatatctcgggtcgagtagggttggcgtgaatctcgtccgtattgtccagaagaatggtgcgcaggctggttatgactatctgaataagtatgccaccaccattgcggcgcaggtcagctacaacttaattataaagctacttgctataacggagtctggcgttacgggtttagatatgactaatgcgaaagaagccctttcgagtattaaatctacgcgagagcaaattagtagcgaatatagtcagtacgtcgctaatagcctcaaggataaagatgccgatgctgacgctgccagcatgatggaaatggctccccccacagataacggaagtcttacacagggctccggcagccagagttcaggatcgtaa

SEQ ID NO: 357845 - DNA, 2568 bp, Pseudomonas aeruginosa
  misc_feature (722)..(722): n is a, c, g, or t
atgacaaggtacggtctgttttcaagtcttacgacaatgtcacgtgtgcgagatgttcttcgtaaccccgttgctcttgatcagttccagaactatcgaaaggcagaggggtgggaccttggaagatcatttgaagaatacatgactttctgtaattttaatcctgtgttcctgcgtaataacatgtcggtcgatcagttgtaccgagcgggagatgtcggggtcttgttctcaaacacttctgaagctcagtatgtttatgtctataatcaatacccgccgcagcttatgacctgtgctgctgcgggaaaggctctgagcacagcaatggccgatgttcttcctctggttatggatgacgtgatgcaaaagggctttagtgatcaagtacagtctggcgaaatgacaaacttcgctcagatgcaggcttcccttgataattctctacagtccttcggcttatccaacaagaaagcctccgactacgtagcttcctctctaatccagcgttacttcagccaagggcgcgttgatgcgttgaaccattggcaagaacgtagagcggcaatggctctgcagcagtcattaagccaacaagagattcaatgggctggtaagggcgacagcttcaagttctacatcaaaccgatgatggcttttgttgagggtcttgtatacgcggtagctccattcatggcaatggtgatgcttatgggaggcgngggtgtttcctcgctagcaaagtttgcgacgttaccgctcactagcgcattatgcatgccacttctgtcattcgtgaatgcttttaccctgtggttcgcaggttcgaaaattcaggcgatattgaatggttacgatccgatctcaaccggcttcgcccaaatgcaactcatggacattgaccaggccttaggaactgccctggggttgggtgggtatcttgcttcttcagtgcctgtccttgctgcatcgattgttggcgcaggtgcaataggtgttagctcactcttgtccggggcgagttctgattcgaagttcaatagtgaggatgtgcagccgaagacccagaagccagcaccagtgttggctactgaatctcattacacagctgatcagatgagccaaggtgttagcgttactggagcggtgaacaatgctgagcagattagtggtcagcaagcagcgtcggcgctagttcaaagcacacaggcggcttcacatactgccacccaggcacttcagcagactactcagtcagcagtccaacatgcagcttccactacgcaagggcagcaagtgctttccaaccttggacatcaagttgcatctagcctcaacctttcttctaattcgcaatacacggatgcagcgaatcgactgaaaggactcggttggagcgaaagcaacattgcagctgggacattcgctgcgagcgtcggtgcctcggctcctgcagggctcgctagtggaaaacttgaggattccgagcgttaccagaaaatgtcatccgagcagcagcagcaaacgcagcaagctatggcccaattgacatctgcagttcaggcaagctcgaacgatcaaacatcttataactcagcagaggcgttctcgcgtaactctcagtcgatcgtttctgagtctatgagcgagtcgttaggtaagtctctgacagacgccaaacaggcccaggaggcttactctactgccagtaagatggaaagtgtttttgcggcttcacaatctttaaacctgaaacaggctgcggtgaattctctaggtcgcgggacgaacaaggccgagtcagctgaagcgcttaaggaaatggctgggcgtaccctcagcggaagagcagcttatgaagcggctcttaaaagcaattctattgaaagtctatctacggatctgaatgagaaaaaagcaatggccgcgattagagccatgaaccaggatggccgtctaggagacctggtaaattccaagatgtcgccattcgacttccatcttgataaggttgatgctcagagaagctctcaattgatgtctggaaaagtggacacttcaggattagcagggcgtgttgaaaatggagttaacagcgtccgcgaggcatatgcatcttcgaatgatatgcttgtaagtggtcttgaagcccagcagagcgacggcaggattgttgttggtgaagcaagcgaagctcatggcagtcgggttgcagagtccaacgatatgaattttggtcgtctgcaggcgggtaacgaggacagtccaattaataagcaggatatagatgttaaatcagttactcctgtagaagatactgcaaagggatttgcacagcacccaagcgcttcaacaagcttagccgtcgagcaaattgccgacaaggtggcagatctgggcggggtctctaaagacaacgccgcatttaatactgttcgtaactatgttgctcacccgatcgactccacagtaaatgctgtgcatcaaataggtggagccatcgattcaatcagttccccgagctcttcaaagtcgaccgctaaggaggggccgccaaaaattgaataa

SEQ ID NO: 357846 - DNA, 321 bp, Pseudomonas aeruginosa
atgaaagcaatcttcgctctggccactgtgcttgcagctctttcttccaccgcttgggccgagagcggtggtgatcgcaccttcgcccgaatggaggaggcgcgtacccaggccatgcagaactacaacgaggagcaggccgtagcccaggctaagcagtatcactctgcgaagtcgttggacattgccaaggtggtctccatcactcctgacgacggctgcggagttgtgcctgtcaccatgcgttacctcgactccaaaggtgccgaacaatccatcgagtatcagactgagcgtcaacgctgcacgggcaccaactga

SEQ ID NO: 357847 - DNA, 1299 bp, Pseudomonas aeruginosa
atgctctctgtccttgccaatcgcacctatcgccacctgttcctggcacaggtcgtagccctgatcggaaccggccttgccaccgtcgccctggggcttcttgccttcgatctcgcaggagcacaggccggggccgtgcttgggacagcgctggccatcaagatgaccgcgtatattggcgttgctcccatcgcggccgcttttgccgaacgcttaccccggaagacgatgctggtggccctggatctggtgcgggcagccgtagcgttactgctgcccttcgtgaccgagatttggcaggtgtacgtgctgatctttgtccttcagtctgcctcggcagcctttaccccgacgttccaggcaaccatcccagacatcctcccggatgagcgtgactacacgcgtgcgctgtccctgtcacgtcttgcctatgacctcgaaagtgtcttcagcccgatgctggcggcgttgctactgacagtcgtcagcttccacagcctcttcgctggcaccgtcgtgggattcgtggtctcggctgccatggtggtttccgtgacgcttccgctcgcacagaaggggcccaagcgcggcatctatgaacggacgacacgggggctgcgaatcttccttgcaactccacggcttcgtggacttcttgccctcaacctggccgtcgccgccgcaagcgcgatggtgatcgtcaacaccgtggtgttggtacaagctcagttcagcctcccgcaaacctcaacggctactgcactaatggcgtttggcggcggctccatgctggttgctctgatccttccccgactgctggacaagttggtggatcgcaacgtgatgctctttggagcattcatcctggtcgttgggctgttcgccggcatgctcgtctccagcttcaatctgctgctggtcctttggttcgtactgggagcgggatactccctcgcccagacaccctccggccgaatcctgcgccgctcctccaattcactcgatcgacccgcgctcttcgcagcgcaatttgctctctcgcatgcctgctggttgatcacctatccactggcaggatggctgggcgcgaatctaaacatgacagccgcgtttgtcgggctagcgatactggcgggggcagccctggcggtcggcctgaagatttggcggccagagcatgacgaagacgtgatccagcaccggcacgatgacctgccggaggatcacgaacatatttctgaaggaaaagaacacgcccacagctatgtgatcgatgacgaccaccgtcgttggccataa

SEQ ID NO: 357848 - DNA, 738 bp, Pseudomonas aeruginosa
atggagctggaggaactggctaaggggatcaacttcatgctccatcgtctggatgacggtgttcaacagctatcgcaattctcagatgaccttgcacacgagctcagagccccgatcaccaacctgatgggtaaggcccaggttgccctcacccgcggccgatcatcagccgagtaccgggaggtgctcgaatgctgcaccgaggagctcgatcgtctcacacgcatcgtcgccgacatgctgtttctcgcacacgtcagccacccggccgcgctggttcaattcgaagccatagcgcttgaggacgaagcagaacgggtaaaggatcttttcagtctctccgccgaggagagcggcgtccgtttgctggtttccggaaccggcctggtcagcggcaaccgcctgatgattcagcgcgccatttccaacctgttatcgaacgccatccgccactgccctcctggcgaggccgttcagatgcgcgccagtcgaaacggcaacatggtccgcttgagtgtcaggaaccccggccaaggtattccgtccgagcacctgccgcacctgttcgagcgcttctatcgggtagacaaagggcgtgctcgcagcgaaggcggtacaggtctcggcctgtcgatcgtgcgctcaatcatgagccttcaccaaggctccgcatctgttgaagtgaccgacgatcgagtgacggttttccacttggacttccctgcacgcagaagctga

SEQ ID NO: 357849 - DNA, 675 bp, Pseudomonas aeruginosa
atgcgaattcttgtggttgaagacgaggaaaaaactgctacctatcttcaacaagggttaaccgaaagcggttacatcgttgatcgcgcaaacaatggagtagatgcactccacctcttcgggcataacacctatgagttgattatcttggacgtgaacattccgaccatcgacggctggggagttctagagttcatccgaaaaaccagccgagtcagaattctcatgctgactggacggggaagacttcacgatagaatcaaaggtctcgatggcggagccgacgactatctgacgaaaccatttgagttccccgaattgctcgccagagtccgagcacttatgcgccgcggagatagtctcgaagaaaaagatacgttaaaagtttctgatctagagctggaccccggacgccaccgtgctttcaggggcgacctgcgtattgatcttacaaccaaagagtttgccctgctgcagttattaatgagtcgcgcaggtgaggttcttactcgcacccagattatatcgctcgtgtgggatatgaactttgactgtgacaccaatgtaatcgatgtctctatccgccgtcttagagcaaagatagatgactcgttcgaggcgaaacttattcacactattcgaggcgtgggctacgtgctcgaggaccgcgcatga

SEQ ID NO: 357850 - DNA, 1113 bp, Pseudomonas aeruginosa
atgaaaattaattcgcaacttggctccgtgaaggggctgaccctcgcttgtgcatgcttgcttgccgctcactctgttgctgccgagaagctcgaagtctccgatgagcaagtgaagaaccttggcatcgaactggtcggtgtccaggacgctcggggcggagtgaagcaacgcttcccggcccaggtggttgtgccccccaaggccgagcatgtcgtgagcgcaccactgcagggcctggtggtacagcttttggtcggcgagttccagccggtcaagaagggcgatgccgttgccaagctctctagccctgcaatgagtcagcttcagctccaggccctgcaggcttccgctcgggcaacgcttgctcgccaggcttatgccagagagcaggccctcttcaaggaggggatcattccccagcgccgcgcccaagaagcacaggctgcgctcagggaggccgatgcaacgcttgcccaggcgaagtcggagttggcgctggcaggcatgtccggggctgctaccgagaaaatgctgcgctcgggagtccctacggacagcctggtacttgaggcagcccaggacggcgttgtgtctgcaatttcggtgaagccgggccaacgggtcgatgcagcaactgcagtactcagcatcactcagctggacactctttggctggacgtgcagctcccgatcgaggccagcaagggaatgcgtcccggtatgccgatcgagatacccggtaagcagctgtcgggccgggtcctgagcctgagtccaaccatcagtgccagcacacagttcgtcatccttcgtgccgaagttgatggtgccgcagggcaactgcgaccgggagagctggtgacggtcgacgtgcctctcgaggcggcaggccaggcctgggatctgccgctatccgcagttgctcgtaacaaggacgagtcggttgtcttcgtgaagaccgctggcggcttcgaggctcgtccggtgcgtgtacagaacagtgccggccagctggtgcgagttgaaggcgacatcagggccgaggatcgcattgccgtttccggcgtgattgcgctcaagggtgcatggctggaagagggcgaagagtga

SEQ ID NO: 357851 - DNA, 3084 bp, Pseudomonas aeruginosa
atgctgagtcgtctcgtccaattctccttgtcgcagcggctgttcatgctgctagcgacgttgttgctcgctggtgccggttggtatgcctaccgaggcctgccgattgatgcgttccctgacgtggccagcacacaggtgaaggtgatcatgaaggctcctggcatgacaccggaagaagtcgaaagccgaatcgcggtacccattgaggtcgagatgttgggtattcccaataccaagatcctgcgttcggttaccaagtacggactggtcgacgtcaccatcgacttccaggatggcatcgacatctactgggcacgccagcaggtggcagagcgactcggcaatctgaacgatagcctgccggaaggtatctccggcggcatggcgccgacgaccacccctctgggggagatgttcatgttcaccgtggatggcgagtccatgtcgctcaccgagcggcgtagcctgctggactgggttatccgcccagcgctgcgaactgttccaggggtggcggatgtcaactccctgggtggtgaggtgcgcaccttcgagattctgcccgatgcggtgaagctggcagccaacggtgtcagtctcgagcagctgaaccaagccgtcagtcgcaacaaccgcaatgatggtgcaggtcgcctcggcgaaggtgacgaggtcctgctggtacgcagcgagggcagtatccagtccctgggggatctgcgagcggtcgtcgtcaatccaaatggcgtgtcgccggtacgggtaggcgacattgccgaggttcgaatcggaacgctgacccgctacggcgtagtcacccaggatggcaatggcgaagcagttcagggcctagtgttgggcctcgccggcgccaatgccagtgaagtagtgaggggtgtacagcaaaagctcaaggagcttgagccgactctgcccgaaggcatcacgatcacgagcttctacgaccgctcatctctggttgccaaggccgttggcgcagtctccaaggcgttgctggaagctaccgtgctggtaatcgtcctgctcgctctgttcctgggcaacatccgtgcggcgctcacggtggcattggttctgccattggcggccctcatcaccttcattctcatgcgcctgttcggtatgtccgccaacctgatgagcctgggcggtctggccatcgccatcggcatgctggtcgatgcggccgttgttgtcgtggagaacattgttcaacggctggctaccgatccctctgcaggtaagttgcccaggctgcacatcatttaccgcgcggttcgtgaggtagcggtaccggtcacctcgggcattctgatcatcatcacggtgttcttgccgttgctgaccctgcaagggcttgaagggaaattcttcgttcccgtggcactgaccatcgtcttcgcgttggcgggctccctggcactgtcgctcacggtcatccctgttctgtcctcgtacctgctgaaagaggtcaaacacgaggacccatggctcgcccgcaagctgctgggcatctacgagccgatcctcgaatggggcctgcgtcagcagaagctggtcgccatcggtgctggggtaatgctgattctggcggcactggtctacacccaggtgggcaagaccttcatgcccaccatggatgagggcgatctgatcatcggcatcgagaagctgccatcggtcagcctcgagcagacagccgagctcgacaagaaaatccacaaggcgctgatgggctccatcccggagatccgcggcatcgttgcgcgcgctggctccgacgagattggtctcgatccgatggggctgaaccagaccgacacctacctcctgctcaagccaatgagtgagtggcggatgggtagcaaggaagagctgatggacgagatccgcaaggtcctcgatcccatgcccggtattggctacagcttcactcagccaatcgagatgcgtgtgtccgaaatgatcatcggtgttcgcggtgatctcgcggtaaaggtctatggccctgaccttggcacgctgaaccagctcagctcgaagattgaaggtctactgaaaacggtgcctggcaaccaggatgtgtacaccgtccagaacgacggcgttcagtacctgcgtgtagagattgatcgcctgcaggccggccgtttcgggctggacgtcgagacgattcaggacgccctccgtgtgcagatcgagggacagcgcgccggcatcgtcattgagggcaaccagcgcacgccgattctgattcgtgcaaacgaggccgtgcgtacgtcgccggccgagttcgatgccgttcgtatcactgcaccggacggcaccacggtaccgctgcgcagtgtggccaaactcgtgcgcgcagatggtccggtgaagatcgatcgcgagatgggcagtcgctacagcgttgtcattgccaacgtcagtggtcgcgacctggtcggcttcgtcgaggaggccaaggggctggtggcgaagaatgtcgagcttcccaacggctatcgcattgcatggggcggtcagttcgagaaccagcaacgtgcggcagcgcgtctgtctgtggtggttccggtcgcactgggtctgatcttcgtcttgctgttctccacgttcggctccgtccggcaggcactgctcattctcagcaacatcccgtttgccctggtcggcgggatcgtcgcgctctggatcaccggcgagtacctgtctgttcctgcgtcggtgggattcatcgcgctgctgggcatcgcggtgctcaacggcatcgtcctggtgagctacttcaaccaattacgtagtgaaggcatgtcgatgcgcgatgtggtcgtgcaaggcgcgcgcaggcgtctgcgcccggttctgatgactgcgtccatcaccgccttcggccttgtgcccctgctcttcgcgacggggcctggttctgagattcagcgcccgctggccatcgttgtgatcggtggcctgatcactgtgactgcgctgacgctgttactgctccccatcctctacctgcgctttgccatttccaaacgggagattcctgatgcctaa

SEQ ID NO: 357852 - DNA, 303 bp, Pseudomonas aeruginosa
atgcctaacatttggctgaccttgctgtgcccgccaaccctagaagaaaagctcatcgaccatctgttggtgaacatgggtagccaggtcttcatgagtacctccatcgccgcccacgggctggcaaccgactccatgagctcgatggaacaggtcatgggtaggactcgtgccattcagatccagctggtggtgggaatgcagcaactcccggagttgctggactcgctgcacgaaaactttccgcagaccggtctgcgttactggaccagtcagatcacccagcagggggagctgaagtaa

SEQ ID NO: 357853 - DNA, 1236 bp, Pseudomonas aeruginosa
atggaacggcttctcgcactattcctgttgatgggggccggcgggtcggcggcctcgcagacaatgattccactgcaggttctcccgaccacccaggtggcacccatcctgaattcggacccacgcgtagcctcggcgaaagccaacatggaggctgcctttgaagaggcggggctgattcgccgctcgccctatgaatggattgctactgccactgcccaggagcgtcgagtcaagagcggaccgaactacaacgagtggaatgtcggggtggaacggactatccgcctgccgggcaaggtcaacgcggaccaaggcataagcgacgctacgatcgaggaggccaaggccagttatggcgaggcacgccacgaggcggcgcgagaattcatgaccttgtggctggattggctggctgctgagcattccctcgatattgcgcagaagggagtatcgtctgccaagcaaagcctgggcgccgtgcaaaagcgcaaccaggcaggtgatgcctcgaatctggatgtgaacctggcgcaggcggagcttgcagatcagcgacgtcaaaccaacgaagcgaaggtcctggtctcctcgacctgggcccgtctctccggacgttttcccggattgccgagggataaaatggcgcttccccaacccatcaaggatctgggaagcgaactgacctggagagagcgaattcttgctgagagcgatgagatccgtcgcatcaacgctacgtttctgaagtcgcaaggacagtctgctcgcgccaaggcagacaagcttcctgaccccaccctgggcgtcttcaccacctcggaacaaggtaatcgggagcggctgtacggcgtcagtgtgagcatgcctattccgagcggtgcacggagtgcgcgatacagtcgggcgctcgctcaggaggaggcggcgaggctagatgccgagctggtccgccgtcaggcagaggcgaacgtcgctcgtgattacgccgtggcagtgggcgccttcgatagtttcaccatggctcaggacggagctcaggcaatggctcgcaacgaagctcaaatgcagcgagcgtacgaactgggtgaagtggacctgcagtcactgttgctggccagacggcaggctctgacagcagcaaccaacgccttggacgcacatgtcgagtcgttgcgtacccatctatcgctgctgatcgacgctcactggatttggggcttggaggaagcctga

SEQ ID NO: 357854 - DNA, 1323 bp, Pseudomonas aeruginosa
atgtcccgtatctcttctttgtcacttgcagtcatctccgccatctccgcgatgagccctctggctcatgcagccgaggctgaagaaggctttatcgaaggcagcagcctgacgatcctcaaccgcaacttctacttcaaccgtgataaccgcaacggtgagcaggcgccggggggcgctggttactcagaaacctgggcgcaggcgatcatcactaagttcgagtccggctatacccagggcaccgttggtttcggcgttgatgcgttcgccatgatcggattgaagctggataccggcgatggccgcaatggcggacgtggctcgttcgatgtcatgccagtcgatagcaacggacaggctcgcgatgaatacaccaaggtgggtggcgctgttaaagccagggcgttcgacactgaagtcaaagtcggcgacgtgttcccctacacccccgtggtggcttacggggactctcgtctgcttccggaatcgttccgtggtgtgacgctcagcaacaccagtatcaaggacctgaccctgcagggcgggcggctgcactcgatgagtcagcccacatccagcgacatgcgcgacaccttcgccaccttctacgcaggtccggtcaactcgccgtggatgggatacttcggcggcgactacgccgttaccgagaacctgaacgtatccgtctactctggccgcctgaaagacgcctgggatcagtactacttcgggacttccggcgagtacccgatcaatgacgacctgtcgttgatcggagccttcaactattacagagcggtcgacgagggtaagcgcctgctgggcaagttcgacaacaacatctggagcggcaaggtaggagttcgatttggtgcccacaccgtcgcactctcgcaccaacgcaacaatggcgacgacgacttcgattacctgcgtcaggccgactcgatcttcctcgacaactcgatccagtacagcgacttcaactcgccgaaggagcgttcctggatggttcgctacgacctggacatggagtcctacggtatccccggcctgtcgttcatgacgcgctacgcgaaaggcaccgatgccgactactccaatgccaacagtgtctacatgcgccgcgacgccgatggaaatccgctgactgatcagaagcgctgggagcgggatatcgaggtcaaatacatcgtgcagaccggttcgttcaaggacatgtcgttccggattcgtcaggccaacacccgtgcgactcaatacgagtcggacctggatgaattccgcctgatcgtcgagtaccccatcaccgttctgtaa

SEQ ID NO: 357855 - DNA, 717 bp, Pseudomonas aeruginosa
atgaggcaattggaacccgcaaaccggcacgccagcctcgacctgatcaagtgggttgccatggccaccatggtcatggatcacctgcgctacgtttggccggacatgaatgcgttgtttgtcattgggcgcattgcctttccttggttctgcctggctatcgccgccaatgtcggcagaacggcaaaaggacagttctacaacgatgccaacgccaactacctctgctggatcgtggtttttgcggtgatctcggagctgccgtatcggctgctgacgccatccaccacaacactcaacgtcatgcccactctgatgctcgggctgatgatctgctggggtgtgcaccacaaaactcgcgacagtctcctggtcgctggagccagtgtcctgctggcgtgtgtcctgcattccaatctgatgtatggggctccaggcgcactcctgccggcggcctttctgcttgcgctgcagaagcctcgatcgctctggttggtccctgcgattacctgcgtgcttgcgaaccgctggctggcaaccgcaggcttcagcagctactcgctgacagtattcctcgtggcagtcggtgccccggtagctggaatctggctggtcaaccatccagtcaagatgcgtatctggccggttcgcagatggggctactggttctacccggtacacctgggacttctccatctgctgcggcaggtggtctga

SEQ ID NO: 357856 - DNA, 339 bp, Pseudomonas aeruginosa
gtggcgaagcagcaccccgcggcgatgttgttgctggtggcgaccatcggcaacgtggctggctcgacggttaactgggtactgggccgatacatcgagcactggcgtgacaagccgtggtttcccattaagccgaacaagctcgaacgcgtgcagcgcacctatcaccgctatggccgatggtccttgctgctgagctgggctccggttattggcgacccactgacggtggtggctggccttatgcgagaaccgctctggagcttcctattgatcgtcacttttgcaaaggcagcacgctacggcgtgctttatgccattacccaggggctggcatga

SEQ ID NO: 357857 - DNA, 1140 bp, Pseudomonas aeruginosa
atgtcagggtttgcagagatacttcaacaaggtacgacccacgcgtggctgtatttccctagcgccatcctccttggggccctccatggtctggagcctggccactccaagaccatgatggctgcgttcatcgtcgctgttcgtggcaccgtcaagcaggcagcgctccttggcctggccgccacgctttcacacaccgccgtcgtctggctggttgcgataggcggcatgtacctcggccagaatctcaatgccgaaacaactgagccttacttccagcttgcttccgcgggaatcatcattgcaatcgcactgtggatgctctggcgcacgtggcgcggcgagaagatgtggcagttcgagcagggtgaaggtgagcacggccacgatcatgaccatcaccacggccatgacgaaacccgcctggtcgacaccggacatggccgtgttgagctttcgatcttcgaggaaggcgtaccgccgcgctggaggctgaagaccctaacaggacacagctggggtgcaggcgatgccgtcgtgcaaaccactcgccccgatggtcgtatgcggcgattcgcgttcgccgacaaaggcggttacctggagtccgtcgatgaaatcccggagccgcacgaattcaccgtgcgcctgagcctggggcatgctggtcactctcatgactacgacctggagtttgccgaacaccatcacgaccatgatcacgccgagctccaaggcctcgaactgaccgtagacggttatcaagatgcgcacgagcgtgcccatgccaacgacatccgcaaacgcttcgccaatcgcgacgtcaccacaggccagatcatcctctttggcctgactggcggcctgattccttgtcctgcagcgatcaccgtgcttctgctgtgcctgcaagttaaagaagtcgcactcggtgccgtgctagtcctctgcttcagcatcggcctggctctgacactggtaacggtgggcgccgccgccgccattggtgctcgccaggcctccaatcgctggccgtggctgagtacggtggcgcgtcgcgcaccttacctttcgagcgtgctgattatcggcgttggcctctacgtgggttaccacggttggattggcctcagcggttga

SEQ ID NO: 357858 - DNA, 738 bp, Pseudomonas aeruginosa
atgtccacagctattttgcgcgtgcagacggaacccgtctggcggctgcaacgcttcgcctggctggcgttgctgtttctcatcctgtttgtttcggcgatgcccgaagccatcgcccatggagtacccgagggggataagggcttcattcaagaaagcacgggtgtgctcctggctcccttcatctacatgggcgctaagcacatgatcacgggatacgaccacctgctgttcctctttggcgtgatcttcttcctctaccgcctcaaggatgttggcctctacgtcacgttgttcgctgtcgggcattcggtgacgctgctgttcggagtgctcaccaacatcagcatcagctcgtacgtcatcgacgccatcattggtttttcagtggtctacaaggcgctcgacaacctgggagcgttccagcgctggtttggatatcagcctgatacccgagccgccacactgatcttcggcttgctccatggcttcggcctggcgacgaagatccaggagttcgagatctcgccggatggcctgattccgaacctgatcgcgttcaacgtgggcgttgaaatcggccagctcctggctctgggcagcatcctgatcctcatggggtactggcgccgtacggccagcttctggcgccacgcctatgccgcgaacgtcgcgatgatgagcgcaggttttctcctgatgggctaccagctcaccggtctgatcgtttcccagtaa

SEQ ID NO: 357859 - DNA, 717 bp, Pseudomonas aeruginosa
atgtttaacagcaaaatccctactctgaacgagctgccgtcgtcggcgcagctgatgaaatccacggtgatcgctctgggggcgtcgttggtcctgctggtcaccatcgtcatgccatccgaatacgccattgatcccactggcgtgggccgtgtcctgggtctgacccaaatgggtgaggtcaaacagcaactcgccgaggaggcggcggcagatgcgaccgcggcatccggtgtggcggtgcagtctgtcgtcagcccggttggaacagcggtcgcagcaacctatgagcctgaggaggaggaagctccggccgtggcgcaatccgcggcacctgcagcaccgtcgacgccagcagcccctgtcgcttccgctgcaaaggctcaggcgggacagcgccatgagatgaccatcacgcttgcgccgagtcaaggtgctgaagtgaagctggagatgaaggaaggggcgaaggttgactacgtctggtcgaccgctggcggggtagtcaactatgacacccatggtgatccctacaacgccccgaaaggcttctaccacggatatggtaaaggccgagctactccccaggatcaaggcaccctggaggctgcgtttgatggcaagcacggctggttctggagaaaccgtaccagcaagccagtgacagtgactctacgtactcagggtgactacatcagcattaagcgtgtgatctga

SEQ ID NO: 357860 - DNA, 294 bp, Pseudomonas aeruginosa
atgagcgaccacgacagcaagcatggccacgtgcatcagagccatgaggcaatcatcaagcggctgaagcgcgcggacggacacctgcgcagcatcatcgtcatgctggaagagggccgtggatgcgtggacgtggcacaacagcttcacgctgtggaaaaagctgttctccaggccaagcgaactctgattcaggatcacgtcgaccactgccttgaagcagccatccatgacgaccatgctggccagcacaaggcgatcgatgagttcaaagagatcgtgaagtacctctga

SEQ ID NO: 357861 - DNA, 1005 bp, Pseudomonas aeruginosa
atgcctctattcgagcgcttatcgaagcgacaagaggctatcggaacggaattgcaaatgcccactttcgcaaaagtcttagcctgcgtcgctgctctgcttctcgcgtgctcagcccagacagttgtagctgaacccaaggtcatcacgagcatcaagccgctccaactcttggctgcggaaatccagaatggccttggacaacccactgttttgcttccgcctggagcttcaccacacaactacttcctacgtccttctgacctcaccagactccgagacgcggatctggtctattggatcgggcctgatctggaggttttcctcatcaagactctgaaccgtcgactaagacccacggtggctgttcaggagttaagcggcatgcatttgcggcactttggtgaggtcagtacggcggccggcaaggagtctgcagcagagcttcctggagatgagcacgacgacgttcatcgcgagggttcgctggacgcgcatatttggctgcgcccgtcgaacgctctgatcatcgccaggcacatggctgacgatctgtctgctatcgaccccgctaactcagccaggtaccaggcgaattttgaatccttcagccaacgtttggcagcgaaggacctgcaactgaagtcgcggctgggggcattggtgcacaagccctttttcgtctttcaccagaccttcgactatttcgaagaggcgtatggcctgaggcacgccggagtattggcggtcggttcatcggacgcccagccaggggcgcggcacgtagcggatatgcggaaaaagctcgagctggccggacccagctgtgtcttcagcgagccaccgttacggccacgactcgccgaaacgcttacggctggactgcctgtccaatttgccgagctcgacgctttggggtttggttttcaggcagtgcccggtggatatgaaaagctgatcggcaccttgggcgacgacctcgcgcgctgtttggaacgtctatag

SEQ ID NO: 357862 - DNA, 345 bp, Pseudomonas aeruginosa
atgaagtcgaagtatttaatagccgcagtaatcaccctcgcatttcttttcgtacagatagcgatggcacaggctgactcgctgccagatggcttcgtagagcgggtggagcagaagaattacgaagcggtcaaacgatatgcggacctaaagaaaaaggaggttcccaagaccgttgactataagtttggtatgaggttggatgtctcaaaggtcatttacatgacccctcaagagcaagtttgcggaaatatgccgaagataatgagctatgaagatagcaagggagacctgcatagcattcgatatattgtccgggggagttgccgtagcgagcgattttag

SEQ ID NO: 357863 - DNA, 1371 bp, Pseudomonas aeruginosa
atggctgacatccatttggaggcagccgatcagccttcacctccccctggcagcattggtcttttcgaagcctttctcttctggctgaagctcggattcattagctttggtggccccgctggacagatctcgatcatgcaccaggagctggtcgaacgccgtcgctggatcagtgaacgacgcttcctgcatgcactgaactactgcatgttactgccgggaccggaagcacagcagctcgccacctatatcggctggctgatgcatcgcacctggggcggcgtgatcgccggggccctgttcgtgttgccatcgctgttcatcctcatcgggctatcgtggatctacgtcgcctacggagaggtaccggtggtggcagggctgttctacggcatcaagccggcggttaccgcaattgtcgtccatgcggcacaccgtatcggttcgcgagcgctgaagaatggttggctgtgggcgatagccgcagcctccttcgttgccatcttcgcgctcaacctacccttcccggtgatagtgctgatcgcaggtatcgccggctaccttggcggacgattgttaccaggcaaattcgtcctcggcggtgggcatggagcggcgaaggccagctacggccccgcactgatcgatgacgatacgccaacgccggagcatgcgcgtttccgatggtctcgcttgctgcgcctggtcgtacttggtgccgctctttggctgctgccgatggggttgctgatgctcagcttcggctggcaaggcacgctgacgcagatggggtggttcttcaccaaggccgcactgctgaccttcggcggcgcttacgcagtgttgccctacgtataccagggcgctgtcggccattacggctggctgtcgcccacgcagatgatcgatggcttggcgcttggcgaaaccacgccgggtccactgatcatggttgtcgctttcgttggctttgttggaggctacggccatccgatgttcggtgcaggacatcccttcctcgccggtgcaatcgccgcgagcctggtcacgtggttcactttcttgccgtcgttcctattcatcctcgccggcggtccgctggtggagtcaacgcacaacgagctgaaattcactgccccgctcaccggtatcaccgccgcggttgtcggggtgatcctgaatctggcgcttttcttcggttaccacgtgctgtggcctaacggcttcgaagggcattttgactggccctctgcggtgattgcactggcagcggcggtggcgcttttccacttcaagcagggtgtgattagagtactcgtagcttgcgcccttgcaggccttctggtgcacctcgtaccagggatcacctaa

SEQ ID NO: 357864 - DNA, 939 bp, Pseudomonas aeruginosa
atgaaatggctactgctcatactcggcttaccaaccgcgaacgcaaccgagcgcatgcgcgcatggcgcgcgctgaaggcatgtggggcttccgttctacgcgacggcgtgtacctgcttcccgagcatgaggagggccgcaccgccttcgaggccatcgagcgagacgtcctggccatcaacggcaccgcgttcgtgctcgcgtttcaggaatctggcgagcgcttcattcagctgttcgatcgcactgaagagtacgacaagcttcgtagcgacatctcgaactgccacaacgagctcactcttgaaagcgccctccaaaccgctcgccaggtccggaagctgcgcaaagcgttcggtcagctcgctgcaatcgacttcttcccaggctctgccaaggagcaggttgacgcggcattacgaagcattgaaacggcgatcagtcgtgcactctccaccgatgagccgagtagccaggatgcggccatcacccgactttcccgctccgaatatcagggccgggtctgggcgactcgtcgacgcccctgggtggatcgactcgctagcgcttggctgatccagcgttttgtcgacgcagaagcgacgattctctggctgaactctccagcggactgcccagcggacgtgcttggatttgatttcgacgatgcaaccttcagccatgtgggtcagcgagtcacgttcgagaccttgcaggagagcttccaggtggaggcgccggggctcactcgtatcgccagcctcgttcactacctggacgttggcggggttcagcctcctgaggcgtctggcattgagcgggtcctggccggcctacgcgaaagcatcaccgacgatgaccaacttttgctggcagcaagcagcgtgttcgatggcctgctgatagcgttcgccaacgaggagaagagcaatggctga

SEQ ID NO: 357865 - DNA, 1035 bp, Pseudomonas aeruginosa
atgaagttccaaatcaaccgaacactggttcaaatggcatgtcggtggctgattcacgatgaagaagccttcaagctggttcttatgcagcagcgttaccggcaagatgacatcgtttggatgtccagtgttgtagccagcgccgtaaagataaaggctctagatgccctgccagtttctattaaccgaatcgagtatgacactctttcggttgggaacactttgcttgaagatgatcagttcttcacgctcggcttacggttgacgatgtttactgagctcttcaacttcaccaggttgaatgacctcaatacgatgactgctattgggttagacgatactgcgtaccgtctaatggaaacgacctcgtttgaccggcggcttatgttgatccgatccggggggttcaccatcagtatccgatgccctgtacgcaagttgaagatgaaccccaattctcctaaagatcaactccacgatacgactctgattttactgggagacctcaagtacttcttgaaaagaaatcctgagggcgctgggcggatcaaggattttgcttcgaccatcccacctgaatccattgcacgtgagctccttctctaccgcatccagccgaagctcgttgcgctcgctacggggatgagcgcggaagatgcaggccgtctgaaaaggaccatcattcgcgacacgcccggagctcagtcacaaagcggtcgaatccaggttccggaaactacattggccgagaacccaaaccacagcctgctgtacctgaccatttacaggctcctggcccatgaccccctgcgaagcactaatgctcgcgcagtcatggcctcccataaagagtatgaaaaaatctgtgccttcctgcagctcccacgggcggaattgctgtccccgacaaacgcctatcaactgagtaacgcgctcaagagtggagagattcagttagcggaatgcacagcatgcaaagaggtttacgcccgctacgtgctcaaacctgggcgatgcatctggtgcggagcctga

SEQ ID NO: 357866 - DNA, 930 bp, Pseudomonas aeruginosa
atgaagatcggttatgcgcgagtgagcactcgggatcagaaagccgacctacaagtcgatgccctgaaacaggccgggtgcgaacgcatctaccaagacatcgccagcggcgcgaaaagcgcccggccggagttggacaaactgctggccaacgtgcggccgggtgatgccgtggtgatctggaagctggatcgccttgggcgttccctcaagcacctggtcgagttggtcggcgaactggcagagcgcaaggtcggcttacagagcctgaatgaccccatcgacaccacccacgcccaaggccgcctggtgttcaacctgttcgcctcgctggcggagttcgagcgcgagctgatccgcgagcggactcaggcgggtctgtcggccgcacgggcgcgtggccggatcggtggccgtcccaagggcctgccagccaaggctgaggccaccgccatggcggccgaaaccctctaccgcgaaggtcgcctgagcgtcagcgcgatcggcgagaagctgcacatctccaagagcacgctgtacagctacctgcgccaccgtggtgtcgagatcggcgcgtaccagaagagcgccaggtcacgcgaccagcagccttcggccgcgtcgccggcagagccgcccgccgccgagcgggtggccaccgtcaccctgcgcctcgcggtggtgaataacagcaagttcgtgcgcggccggaagcgggccacggagaacattgagcgctactgcctggagccctatggcatgaagcggctggatgccggccactatgagttgaccattccgtatcggagcgacgatgagctggacaagagcgtgcatgacctgctgaccgagatcagccaggaggccgacatgcgcaactgttttgtcgagatgggcgcctgggaagaagacaccgaaaagcgttggtag

SEQ ID NO: 357867 - DNA, 1257 bp, Pseudomonas aeruginosa
ttggccaccatttacgaagtgcgggtgaacaacacccagaagaaatactcgaaggaattccagacagaggtgcagtttcaggccagctggaagactgtcctgcagcgtgcccacggcacgccggtcacctgcctctgcccgggtacggggcctcggcagctagcagtcaagcatcttgctggcgcggacagttaccacctggcccgattcgcgaagactgggccggaacatgccaacgactgccgattccatgcccatgccccggaccggtcaggcctgcagggttatgctgaagatgttgtcgaggaggcagacgacaacacgctgcgtattcgcctggctcacggtctccgggttaaggatgcagcccccaacgacgtcgccggcgaggtacatgagccaagagctcccggcgtaaagaaaccgtcgatgcgcttgcttgggctattgcagctgctctggcttgaagctggcctcgccagttggtacccggcaatggaagggaagcgtacttcggatcgggtgccgtactggatctccaaggccgcaaagcgcattcgcgcaagctacatgaccgtcgacgatgtgctattggtgccggcagacaaagactctgcccgggctcgacaaaacgccgcggtattccaaaaagccaaggaacgttcgcggaggctgatcgccgttgcccccttggccatctatgatgccgcccgccatgacatgagcaagttgccgctctcccggccgttcggcatgccaacgatggatattcgcggggaggtacttcgtcgcgttgagcgaagcttcgccaacgagctgaatgcgtggaagaacgggcacaaggtcatcgctatcgcgcaactgaacttgaaaaaggaccggtacgccgatgttctggactttgccttgatgcgtgtgagcgatcgcatgatcccgctcgactctgcctacgaggcgatgatcgaggcacaactccacgccgagggccgcgctttcttgaagccgcctcgcttcgaggctgaggacgagatttttcctgacttctggctgctcgacatgggcaagaccacggaatatccgctcgaggttttcggcatgaacacgccggcctaccaggcacgccggaacgagaaaattcgctggtataaccgtgagtacaagcccggcggctggtggtattgggacgcctacaacgatccgaaaggccaggcgattccggcattccccgagcgagtcactgactatcggaagggatag

SEQ ID NO: 357868 - DNA, 249 bp, Pseudomonas aeruginosa
atgagcagcaagccgtacatggccatctcggtttccctcgttggcgagagcaatgtcccgcacgccggcggcagtcgcctggacgtgggcgagacggaagcgctgattgccctgctagccagtcttggctatgagcagtgccaggccgtcgcagagagccaaggacaagcacacctgatggttgcagccctggacaagctccgcggactgcttgcgtcgccagcgccggcaatggatggtgcggcatga

SEQ ID NO: 357869 - DNA, 372 bp, Pseudomonas aeruginosa
atgatcttcagggcgatgtgcagcggctactcgcatgagtttccagaccgccggcaggatgaaaccgtcgtatatatcgatgcggccaaccgtgacgaggctcgccagagatttcccgaaatgctcgctgccgtatggcagcttcccgctgaatcaatcgaagtctggaacctagagagcgagtttcagctgcaggcggatcccttcgctgcaggtcttgcccccgaacaggcgctcttcgtgatcggcggtagcggtaagatggggcccgcatacgttagggcggagattggtcacccgcttttcctgctctccaaatcgcttaatcgtgtcatgcaggcctacctttccctccataggtctgcgagctga

SEQ ID NO: 357870 - DNA, 399 bp, Pseudomonas aeruginosa
atgatcgataagcccccctttgatgatgagtacattcgcttgcacgcgcgcccgggggaggagtgggaggacgcgcgactgcggctcacgcttcagcatcgccggcgccttgctccggggccagcctgccgcgcatgcgcagaacgcatcgtttacatgaggggccttggcgaatccactcgcaagcatgccaaggcactattggaacgtgtcgaccaaaccttaattgtcctcgacaggtacacctatgcgatcgaagcccaggcctacctcaaagtctgcagaagcctgaaactgattccggagcaggagttgctggagatggagaagaaggcctatagctgcaggcgcaaagctgagcttgagatcgaagcgctccttgttcgcggccctaggtga

SEQ ID NO: 357871 - DNA, 837 bp, Pseudomonas aeruginosa
atgaccaattcccccctccccgcctggctggagaactaccagaacggcactcgcctcggccgagcccaggccgaactggcctatgccgactactactgcatggacggatctgccgatctggacccggaaatcgaagagcggatggggttcaacgcgccaccgatggtggggtacgcaagccgcacaggcaccagatcaaccctcgctgcaatgcgctctgcaggttggcggttgctgatatccgctgccggcgcgctgcgcaccgaaggcttccagcggtacgctttggacaacggcgcctggagcgcatttcaacagggaacttcctttgacgagttcgccttcggccgtgcgctggagaaggttggcgagcgtgccgactgggtggtactgccggacatcgttgccggcggcatggcttcgcttgagttcagcctgaaatggcttgaacggctccaaggcttccctcagacgctgctgctagcggtacaggacggcatggagcccgacgatgtcagggagatgttgaatcccgcggtgggcatcttcctgggtgggtccacggagtggaagctacagaccatggaagcctggggaatcctggccagacggcggaactgctacctccacgtcggccgtgtgaacagtgccaagcgcatcgcgatgtgctctgctgctggtgcatacagcttcgatggcaccagcgtcacgcggtttgccaataccctaccgcggctggatgccgctctggcgaaagcggaaggtcagggagacctcttcgacctaggcaacctgcaggtgcaagaaacaccattcgactgtcattggcccctgtaa

SEQ ID NO: 357872 - DNA, 774 bp, Pseudomonas aeruginosa
atgaaccaacccgtgatcacggtcgatcacctcaaggagcagcttctgccggagctgtttcgaaacccttcgcgaattagcgaatacggaaataccgagggcgcggccaaaaacatcgatcagctttcagcgctgatgcagcgcggggcaaccggcgcgctggctaagcagatcgcagagatcctgtcgaagatggcggatgcatcgccagagaagatcagcaaggctcctaccttcatggaccgtttgcttgggcacgggctggaaaagcaggtgcgctatcaggtcgcgagaaaaaccctggacgaaatgatcgctacggccgaggtccatgctcagtcggtgcgcgatacggtggccaggctgtcgcagctgatcgactcccatgccaacgacgtgctgagcatccgtatctacatccaggccggccgcgaatacctcgacgagaaccctaacgccggcgcgagtcaggacggcgctatggagtttgaccgcccccgcgagcgactcgcccgaaagctcgccaacctgactgcgcttctggcatcccacgaactgagcgtcaaccagatgaagctcactcgagctcaggctgtcgatctgcttgatcgcgtaagcgaaacggtcgacgtgctggtaccggtgtggcgccaacacagcctcacgctcatcaccacgctgcacatgagccccagcctggttgccgaggccagtaaggcgcaccaggcgctcatgcagagcctctcgcgcagtctcgaaggtatttccggatag

SEQ ID NO: 357873 - DNA, 456 bp, Pseudomonas aeruginosa
gtgcatagcactttctccccgttcaaaaccgtcatcagtgtgaccctggagagcctcaaggtcgcattcctctccctggtcgtgttgccggcagttgtcactgccttggtgcttgctggttcttcagcatggtccgttgagggtctggccgcagacgtcgtccagctaatggccgaatcgcaacagctcggccgcgcggcgaagacaacggaaatccgagtgaaccgctgccgcgatgacgtgcagctgtcctcgcgactgccgcaaaagatcacctgctccgagcaggtcgctgtggatctgccgatttctgcggttgctgccagtgcgagcaaaacgctggggcgcctgtacctggtgcttgccgccttcagccttgttctcgttctgggctatcgcacgatcaagcagccggcgaatccccaggaacttcccaatttgaacctcaccgcgtaa

SEQ ID NO: 357874 - DNA, 1092 bp, Pseudomonas aeruginosa
atggccactcaatctctcgttgctattacccccgtagtgctcaaggacctcggcctgcgtgaagccgaccttccggctatccaggaagtcgccaatcgtatccagcgtggtaacccgacctcgatcgccgagtttggccgagacgtcgctgatcacacctcgagctacgccgactccttgctcgaccaggttaacaaccgtgatctggacgatgcgggcgccaagctgactgccgtagttgccgccgcgcaatcgttcaatgtgaccgccctgcagggccgatctcgaattcctgtccttggcccctggattgaccgggtgaccttgaaaacaaagagaatccacgcagagttcgagaccacccgccagcagatcgagcgcttagtcgaggaggttggccaaacgcagacgaacattgacgcccgaaacatcgccttgagcgaaatgtttaccggtgtgcgggaagagcatcgcctgctcggaatccacatcgctgccggtaaatcccgcctgcaggagttgcgtgcggaggcggaggagttgcgcggcgccgttggcaatgacccggctctgctacaggagctttctgatctggatgggatggtcgccaacctggacaagcgcgtaggcgacctcgttgcccttcagcagtcggcaatgcagtcgttgccggcgatccgcatcattcaagccaacaaccagatgctggtcgacaagttccacaccattcgtgaaaccaccgtgccgacctggaagcgtcaattcatgctggcgctggcgctgaatgagcagcgcaatgctgtcgacctggccaacaccattgacgacaccaccaacgaactgctccgtcgcaacgcgaagctgctccaccaaaatgcggtggccaccgcgaaggccaaccaacgcttggttattgacgtcgagacgctgcaggagtgccaggccttgctggtacagaccgtcggcgacgtgatcaagatccagcgcgagggtgttgctcagcgcgccaatgccgaaaaggcaattcagggcatgcgtcttgacctgacccgccagatcaccaatcagcctgcggtgaaggagttgcactga

SEQ ID NO: 357875 - DNA, 996 bp, Pseudomonas aeruginosa
atgcgcagcattcgcacgctcttcaattccttccgcaccagcaaagcggcgcagcccgaggaaaaccagaatctggcatttgttgaacggatcgtgaatggccccttcagcgagttgcgtcaccgcctgagtcggtttcagaaactgtcactgggactactggtgtctgctgtttctgccgcagtggcttggggcgccttctcgctgatggcgcaccactatgtacttgatgcctcgataagccagctgcaaatccctcagtcggtgtacggagtcctcgatgccgtctcccccggtcaacctgaggtaacctggaagggaagtctcgccgaggtacaaagcccctttgagggaatgtcctcgacaatgcttgagatggtgcgttggctcggaatcgccctccccatcatgatgggctttatgggtgtttacatggtgatggcgcacgggagttttaccggcctgattggtgccatcgtcatgggagccgcgcttaacgttttgccagcgttactcggagaaagcgctaatcctggccattcgccgcagaatatttctcgtaaggtcgatgatcttcgggccgcagtgaaggacgggaaattctctgagattcggaccatgatggagactcggggtatttctccagacgacaggttgctcgtacttgcccagctcgacctggcattcaggaataccggcaccttggcgcagaaggcagctgctggctccttgcgcaaagtggaacgcctccctatgggcgatggccagtgggcgtatgcgatggaaatggccgcggatggccatgtcgcgaccaaagccggtaccacgtacatccgagaaactcaggagtctcgccgtgcctggctcaatgcctcgcatatcgcgcgaagcgcgacgttggccatggtgtttgcctgcctcgtcgtcggcgcactatggagcatcttgcgacgtcgggttgccaggatcagcggcatgctggagttgctcgcgtga

SEQ ID NO: 357876 - DNA, 576 bp, Pseudomonas aeruginosa
gtgctggcgctggggctcttaggagcattcagcctgattgcccatttcagcaccctcgatccgaagatcagtcggttggaggttcccgctaacgtctacaaggtgatcgaggccccgagcagagaagaacggctcatgcgctctcgctttccgctgcattacgcggtcatggacaaccggtaccagacggttgcttctttgcttgacgctgcccagttgcctgcagatgaacgccggtacgtgattgcccagctggacctggtgcgcggcaatacgggcacccttgcccagaagatggttgtcgcggatttgcgcaaaggcaacaggctcaccgcagcggaaggccaatggatctacgcaatggaaatggccgcatatggccatgttgagacagaggccgctgtcgactacaaggacgcaaccctgcgggccgggcaggcttggagcagcgtcgctgccatcagcacagatgtaggggtcggcatttcactggtcaccatcttgtgcagcacgctcagtttcattctgcgccgccggatcgaacgaattgacgccatgcttaagctgcttgcttaa

SEQ ID NO: 357877 - DNA, 297 bp, Pseudomonas aeruginosa
atggccagcgagactctagcgcgaagcgcttttctggtgatggcaaccgccatcgacaaacagcctattccgttgcgagtgtttcaagagcgctcccaagccgagcacctggctgctgcactgatcgagtatcacctcagcgctccccatggcctaagcgatgaggaaacctgggaagagttcgacgcaaagttgaaaaggtggcgcgagatgcatcccgggggcgttgaggtatctcgccaccagaaattcggagtttacgaggtacccttcgggctgcaggaaaccgatctgtga

SEQ ID NO: 357878 - DNA, 384 bp, Pseudomonas aeruginosa
atggctaaagagttattcgacgaatacgtggcgcgtgttgaggagaagtccgccacggtgctcgcacgcaatcaggaaatctgttcccgcttgaaaaaagaacgtgaggtgctgttcgcgctgctcccaaacgatgtttcccaggcgatttcagctctccccggggaaggatgggaagcgctgaaagtgcatctagcgcggagctttgcggatctgaaaccttcaccggcgaacggcccagagttctaccggctcgacggcatgcttgattgccttaagctccagggcctgctctcggagatgcagctagacattctgcgaaaatacagccgagcgctgcattggccaggcggtcccgcgagcgatcgctatccacaagcatga

SEQ ID NO: 357879 - DNA, 345 bp, Pseudomonas aeruginosa
atgaatcctaaaggatcaaagccgcctaccaagttggtgctgactggcgacgaaaacgttcctgccatgccgatgaacgaggctcaggtaaaccatttgcgccgccttcttgcctggatgcgctgtgaatggatgttggatgatgacatgcagcggggcttcatcagcggagctgagagcagcgtggaggttggtgcagctacgtcggaagaagccggtgcactgctcgctaagcaagcagagaaaatcaaccagtgtccggcctacgtccgccaggcagttaaaatgctgtcgaaagccttgcgggaccatgagcgagccactggcattttggaaactcattga

SEQ ID NO: 357880 - DNA, 249 bp, Pseudomonas aeruginosa
atgaccgaatctcaccaagccacctacgaacttcctgccgacctactggaaggaatctacgcagtcgctactggccagttggtgcatgtctacaacggtgcgtgccctgatcaagtggaaggggccattacccgcgatgacgaatgccctgcctgcctcgcgctcatggcagctgatgctgcattgcgcacgtctggtgtctccctgtctaactacgtgcccagcaccaataagcgcctccccgcctga

SEQ ID NO: 357881 - DNA, 252 bp, Pseudomonas aeruginosa
atggaagccatcaagttcaatcgggaaaaagcccgtagcacccccggagtggccgtagtgcagacgctagacgatcaccgtgtggaagctgctcgaatcggggcaagcgtgccagaatctatcctcggattgtctctgcaagccaaaaggcacggcgggcgggtcgattactacctggatggcgtacgcacggcacgcgataaggtgctgttcgtggtgaccacccgagttgtaagggacaacaactcctag

SEQ ID NO: 357882 - DNA, 366 bp, Pseudomonas aeruginosa
atgactctctccggcgcctaccttgaaacaaaagccaaaatttctgctcacctttcccgcctgggctggtcggtatcgggtggcggcccgatcgccctaggcaccaagacctatctaactgctgtaggggaaaaggaagccatcgcttacctcgctccctccggaaatgatgcagccttcttccaagccacctacatcagcgagggcaataacgtcctcagcactattcgcgcaggctggaaagctatcaccttcaccgaatctgactctgaactcgctgaggtggcagctgcattttccgccgaggtggataccgaggtgtcccagacctatgccatgcgccttcgcgccaatcgcgtgctgtga

SEQ ID NO: 357883 - DNA, 408 bp, Pseudomonas aeruginosa
ttgctgactgaaacggaagtgctggcgctgccagaaaacgagttcatgggtccggcaatgcttgaattcttcaagcgccgactactgctcaagcgcgaggaggtctcgaccagactaagcgccggccggatgaatattggcatcgagcgacaagcagatgatgccgataacgcagcaaatgaagagctccgtactttggctatttccatggcagagcgcgaccgtaccgacctagttaacatcaacgaggcgctgcgccgtatcgaggaaaatgaatacggctggtgcgccgtttcgggcgagccgatctcggtgcaacgactgctactggtgcctgagtcgaaatactgtgtcgaggtgatggccaatctggaggctcaggcactgcaccgcgccaggatccagtag

SEQ ID NO: 357884 - DNA, 999 bp, Pseudomonas aeruginosa
atgaagcgcctcaaaactgtaggagtagcagtatttgcactggcgttaactggttgtgagtcatggtcaattattacctcttcgaagattgagccttccccaacggatgccgaatactctgctgtagtgcctatcgatggatatagtgcgtttgcagatttgttcggcgcgggcacgccggccgatgactatcgtgacctttgtaagacgaatccgcgggacgagcagcacggattcgttggaccagccggggccgccgccctaactgcccttggcggggccgcatgggatttgggcgtcatagcaattaacgataaggtcgaaaagattcaagagcgatccagtagcacttggaacgcaacatggacgacgacatcggatcaattgaaaagcctgaaatgtatcgccctggtcagatacaggtacaccacaaaagagaccgctggcgggaagacgactattgccgatccacaaatggtcttgcttctcaagctcaccgactttgacccgaaaaaggacaagctgacagcagtccaatttgcgccactgctctctgcgtcaaaaactagcgccgctttgaccaccgatgacggcgatggactgggcaaagtcggtctttcggccgcaggggtgatctcctattacgttgacggcgagttgaaggattcgacgcccgacgccatcagcgtttcaggagttaaggtggggaaatcaagtagcaacccgccgttgatgatcaagagacttggactgggggaggcgcaggctaccaagccagtcacttacccctacgacaacaccgagggtcgtgacgacggcaagggagggaaggtccgtgacgtaaccccgctgttcgtgaagttcgcggtggtggagacaggcacgttgtccggcaaagatgcgaaggcgaaggcagaaataaaagtcgtcaccgacgcgctaggccctgttgcgaaggacctcctcaagaagcggcttgagaaagacagctccaactag

SEQ ID NO: 357885 - DNA, 306 bp, Pseudomonas aeruginosa
atgcatttcaaggaaacgccgatggcccgcaccttcccaatcgaaacagaaacgctgcataccgccactgtccgtgtgcgcatcatccccagagaaccgctagcattcctcgccgccaagcgggcgctctcgggtgcggttgcgagcgccgccttggaccatgatgtggcggaagattgggacagcagtggtgatcaggtgtatgtggttgagttcagcagcgatatcgatcgtgacggcgtgttcgaagccgctcaggacctttctaacgccctgtcagggatggacatctttgtggcgccatag

SEQ ID NO: 357886 - DNA, 798 bp, Pseudomonas aeruginosa
atggatctgagcgcctgcggatatgtctcccacgcccaacccaaacttgccctacgcctggactgggggagcattgtcccctcggaggtcctcggccgtggccggtcttgctgggaacatggcgggcagaagtactgcgagagcaatgacccgaccttccgcgcgatgcaaggggacctgcacaacctggcgccggtggtcggcgaagtcgaggcggatcgcaatggcgccgaagtcgctgaactcgcctcggttccccttcagtacggaatctgcagtaccaagatcgatcgcagtgagcaacggatcgagccccgagatgaggtgaagggttacgtggcccgggcctctttctacatgtacgaccgctacggccttcagatgtccgaggagcagcaacagttgctgatggactggaatgctcgcttcccggtcaccaagtgggagtggcagcgagagcaacgcgccgccgcggtgatgggcaatcacaatccattcgtcacgggggccaggtcatggtcgcttgactacaagcctaccgccgaggggctcagcgccggcgagcgcgaagagctactcgtccacggcgcctcttccgccgcaaaggcgaccacagctccttctgcagggggagcgctggatgacggtcccgccctgggcgatagccgcacgatggtttatcgcttgcctcacgggtgccctggctatggccgggtaaacaagcggaaccgcgttttcttcgacaccgtccgagaggcacaggacgcaggctacgtgatcgcctccgattgccaatga

SEQ ID NO: 357887 - DNA, 540 bp, Pseudomonas aeruginosa
atgcgaattattcctccggctctccttgcttccagcctgcttgttgttggcgttgtggcccatgcctcgacgccgatccccgatgccagcttcgacgtcggcttttcaccgcgcgctggcgcgcaggatgtcgtcctatctgcgatcaactcagcccagcgagagattcttgtcgcggcctacacctttaccagcaagccggtagcgctggcgctgcttgctgcagcacgccgcggtgtaaaggtcgctgtggtggccgacgctaaagccaactccggtcgctactcagccgcgcagtttctggcgaataaggacctgccggttcgcttgaacgaccacttcgccatccttcacgacaagttcctggtgatcgatcggaagtcggtcgagttgggcagcttcaactactcggccgccgccaatgcgaagaacgccgagaacgcgttgttgctgcacaacgtcgagccgctggcccaggtttacgtcacggagtggcgaagcctctgggagggcggtgaggatcttccggccaagtactga

SEQ ID NO: 357888 - DNA, 306 bp, Pseudomonas aeruginosa
atgatgtccaactcgccccaaccccttttcgatacaggctcgctgtttttctcagggggcgttcgcgatatcttcggcggcatccagtcagcccatgcctacctgtatccgcttttgctccgccatgaacgtggcgacttcggacaggtttccgcctgtgtcttggagcagaaccttgcgtcgatcagagaaatgggggcggtctattcttgcttcagcgttgagatcgatggtggtgagatccaggtcagtatcaccaccgaagcacgtcacgaggccactcggttccatctccctggggagtaa

SEQ ID NO: 357889 - DNA, 237 bp, Pseudomonas aeruginosa
atgagcagtaaacagatcaccgtcccatcggaatacgcaggctcgctgctggatctgatcgagcagcggatccacgagattgggaagagctaccaggccaacggcagaaatatccacgatgatatggagatcacagcgttccgtagcatggcgcaggagctcggatacgatttccaagtcctttccgacacccaaggcttttcggtaacccggcacgcttacacgccgcccgtgtga

SEQ ID NO: 357890 - DNA, 288 bp, Pseudomonas aeruginosa
atgaagtacagcatcgactaccagcagctgcacaaaggtctgccacgcccttcggatgacgggaatatcgtcggggtcgaattcgatagcgagtccggctttgcgctcgtcccgaatgtcggcgacttcgtcaacattcctgaaatgaaaggccatgccggtgtctccggcgtggtgaaaactcggctgttccgctatctgcgcactgacgacgagatctactgcagcatcaacatcgttgttgaggagcgcgatgacatcccctgggacgctctgatcaaggagtga

SEQ ID NO: 357891 - DNA, 1422 bp, Pseudomonas aeruginosa
atgggctatatccgcggtgaagggcgtgatcagggcagcttgtttccagtgtcgctggatgagttggttcccgaagaacatctggtccgcgtgatcgaggcctacgtggcgcggttggatttgcagcggctgggcttcagcaaggcgcaggcgagccggacggggcgcccggcctatgatccggccgacttgctcaagctgtacctgtatggctacttccagcgagtgcgctcctcgcgccgactggaagccgaatgtcagcgcaatgtcgaagtgatgtggctgctgggccgcctggcgccggacttcaagaccattgccgacttccgcaaagacaatggttcggcgtttcaggcgacctgtcgtgctttcgtgcagttctgccgccaggtcgggttgctcggtggtcagttggtggccatcgatggcagcaaattccaggcagtggcttcacggcgcaagcacctgagcctggcgcggctcaagcgtcagcaagccaagctggaggccgagatagcccgctatctgagcgacctggatgaagccgaccgcgccgaagcgggcgatggggtcgaccagtgtgccgtgaagactgcgctggagcagttgcaggctcaacacgcggacaacctgacctgccaggtactgatgcaggcccaagggcttgaacaactcgtgatcggcgagcccgatgcccagttgatgcgtacccaccagggcgcacgggtggcctacaacgtgcagagcgcggtcgatgacaagcattgcctggtgctgcaccacgaggtgacccaggacggcaatgacacgcgccaactgcagccgatggccgaagccgcccaagcggttctggagcaggcgcaactgacggtcacggcggacgccggttactccaatggcgagcaattccaggcgtgcgaggatgcgggcatcacggcgtatgtaccgccgaaccgtggcgttaacaatcacggcaatggcacgacactgttcgatcgcagcgcctttacctacgacgcggagcacgaccgctatcagtgcccggcaggccagtggctcccgctcaagcaggtacgaggcacagagaggatttatgcgatcgccggcgactgccgcgcttgccctttgaaggcgcgttgcacgaatagccagcgtcgtcatctcagccgtcatgcccatgagtcagcgttcgatcgcatgcagcaacgcctcaaggcccggccggagatgatggccaagcgccgggcgatcgtcgagcaccctttcggcaacttgaaacagtggatattcggcaacggccgcttcctgctgcggcagttagcgggcgccagaacggaaatggccctggcagtacaggcctacaacctcaaacgcgcgattcaggtgctcggcgcgcgtcgcctgatcgagttgatgggataa

SEQ ID NO: 357892 - DNA, 561 bp, Pseudomonas aeruginosa
atgcaagaagcaccaggcaagacccgaagcctgctatctgtatacgaggagcttgccgcatacagcacagctgcccggcagggggctgaatcgggtgacactgactccatgaagctcattggctacctggaagggatgatggacgtcgccttctacccagtcgaggcaactgtttacagcacggctgaagaacaggacgtggacgatacgggggatctccgaatcactcccgcgggctatgcctggcaggtcgtcgcagtagagggcgtgcatcgccacctcaaatgctgggccaccggagcacaggtctcgaagtcgatcgaggagctgaccactctgtttgccttggtgccggcgtccctaccggacatctaccgcgccgacgtgcgcctgtctcccgcccagctggacgataaatacggtgaaggtcccaacctggcccatccgttcttcacctgccgccaatggcgccagcacgttgtccaaaaccgcactatttccgggtactgggtctggttaagccagcagttgcacggaatcgtgtcggtagaagccgcatga

SEQ ID NO: 357893 - DNA, 264 bp, Pseudomonas aeruginosa
atgcacaccccaacgttactcactgtcaccaccgccggcaccaggcttcgtctgacgccggcgccagctcatcaccccgcactccagctgaaatgctcgaccagtgcggagcgcgggcccctccccctgagtgcgtcgaccctggccagggtcgaggatttcatgctcaagcaccaggccaaacacctgttcgacggcacgagactgctgtcacttgtggacggccaattggttccctgcggcgcgatgtcgcaaaaaagttga

SEQ ID NO: 357894 - DNA, 1500 bp, Pseudomonas aeruginosa
atgaactacacccacgaacagctgccggcaatcaactccatctctcgcctcctcaagttgattgcattcgcgggaaccggcaaaacgacaaccctgatcggctacgcgctagcgcggccgcagtgccggatcctctacctctgctacaacaaaagcgtcgagcaggctgcgaaacaaaaattccccgtgaatgtggtctgcaagactgcccatggcctcgcgtacggcacgtttggctcccgatatcggcacaagctgacgcagaacctgcgactgaccgatatttcgaaggcaatcaacagccagaattgggagctagtgcggggcgtccttgagacgctgaacaacttcctggccagcaacgacgacgcgattaccctctcccactgccctgccgagaaactcaagaatgagcggatgcgccgcgctgtccaggggatggtcgatggtgctagccggctctgggtgaagatgtgcgatgtggacaacaccgcagtacagatgacccacgacggttacttgaagctatgggcactttccaagccaagtctccgagggcgcttcgacatcgtgctgggtgacgagggccaagacatcaacccggtcatcgccggcgtgctggagcttcaagcgggctttgggctgggtgttgtcgtttgtggcgatggccaccagatgctctataggttccgcggcgccgtagacgcgcttaatgccccatggctagcccgggcagaggtgcactatctgactcagtccttccgctttgggcccgcgattgcccacgtcgccaacatggtcttgcacttcaaaggagaaagacgccccctagctggcctgggcgccacgagtcgggtgtgcaaggcgctacctgatgggcttgagcaccgagcaatcctttgtcgcaccgtggttggcgtcattgagaaagcgttgagcctggtcgacgcaggagcaaagattttctgggtcggcgggatcgaaggttacaacctccaggcactggaggaccttcacgcgctttcgaaaggtcatcgcgaccaagtcaaggggaaaaaactcctccaggaataccctgagtacaccttctacaaggaggtggccaacgagagccaggatccagaaatgctgcgctctgtccgcatcgtcgagcagtacagcaggaacctaccggagttgttcgcgagcctgcgccgtaacgccgttaccgacgaactggaagcgtcggtgacactttcgaccgcacaccgggctaagggcctggagtgggatgctgtgcagattgccgaggacttcactttctcgcccttcgatccagataacgactacgagtcctggattgatgagatgaacctgctctatgtcgcatgcacccgggccatgcagctgctcgcaatcaatggccccgtgctggcgatcatggaggagttcgttggccgaagggatggcaagcggcccgccactccgctgcggttccggcggtcggagcttgcagcatga

SEQ ID NO: 357895 - DNA, 270 bp, Pseudomonas aeruginosa
atggatttgaagcaagctttcggacaagcggtacgccaaatcaggaaagagaaaggcgtgcagcaggaggcggtcggtccgagccagtcctatatcagcgacgtggaacgagggttgaagagcccttcactggtcaaggctgatgagatcgccgcggcactcggcgtcgacctggtggtgttggttgcgcgggccgtgctcctgcagcaacccgacttatcttctgcggacctgatcaatcagctccagcgcgatctccagggagaataa

SEQ ID NO: 357896 - DNA, 453 bp, Pseudomonas aeruginosa
atgagcagtgaaaaacttccggaccgcatcaaggccacgctcactatcgagttggatttcgcaaaggaagatcaacccctgatagctgaggtcctgcagggaatcatcgacaacctcggattctccagctcgggcaacgggtaccgtactgcacagagccactacagctacaagttggaatccaatctccccaaagagccgatgacgatggagcgcctgttcgacttgatggatgaggcgagtgagccaggcgagccaactgcggctgaacgtttcgcggaatcgatgcacccggacttcgaaaaggcggaagcctggtgggaaagtctgagcgaagctcagagaaaatggttcttggagaagttcccagaggtgaagctggttaccaaagcttgggaggttcaccaacagatggccttcgccgatcggatgttcttccaaacactgaagtag

SEQ ID NO: 357897 - DNA, 192 bp, Pseudomonas aeruginosa
atgagtaagggatcaaggccgtttcacgagcaggttgacgggcaggatgttcaaggatgggtggcggaagaaggtcgctcctatcgtgcctggggggtgtttcggggcgaagagatcgttgctcgaggacgttccgagtctcacgcgatcgatctgtggcgcgaaaaagccaactacaaagccaacgagtag

SEQ ID NO: 357898 - DNA, 771 bp, Pseudomonas aeruginosa
atggttagcaacaaccgcaacgatctgacacaggcatcagggatcacggccgatctggtgttggagctgggttcgttttacagcgcccaggacatgcgaaaggttcagaccggcctaaccaccgccgcgcgcgaaattcgggccctgacggaacacgtcgcgcttcttggccgcttgggcgagaagctatctcccgaacagcgtgagctgctgaccaacgcagcagcgctgctggactccgtgaaatacaacgtcgagcacgcgaaggagcgaaaggcccgggatgagaaggctctggcaaaaaagcgatcccagtgggagcgcgaagccgagcacttagtcagaacgcatttttccctaccagtggagaccgtagccgagcagctgcaggtcctggaattgtacctggttgctcgggaggttttggggcaaacaatctacctgaagggctacaaggatctacgcaggctgatgcaggaggatccgccaagctggccacaacatacggtagcccaatggcgccgaggcgaggtgtcgagcctattggtagatttaaggacagccttccgcgagtatctgagttgggacttgaaagtcacacctgcccagcgcctggaagaggcacggtgcaaccttgaagcgcgtcgcgccgagatccttgcccagcctcaagccattgaagtcctccgcatctggaccgaggcattgaagggggcggccttcattgcgagcatgctgcccacggatatacccccgaaaaagacgtcgtga

SEQ ID NO: 357899 - DNA, 309 bp, Pseudomonas aeruginosa
atgacctcccaagcacgtgtacacctgaaatatcatgaagtcatcgaacactatcgccgcttgctgcagacccacccaggcaaggcattgctgatctgcgaaggcgggaacgtagcaattcttgaagatgacggcgtattcggtgctgctctctgcgccgatggcacaatcgagatcgacaacctgtacgacttcgacatcagcgccttcgacactgaccaggggtgctgggatggagagactccagagttggcctgggaacgcatccagaacccaacattcattgaaatctcccgctatgcgggatag

SEQ ID NO: 357900 - DNA, 1293 bp, Pseudomonas aeruginosa
atgccgaaattcccacagccgttgtttgaaagcttcgatcgtttccacgaactcaacttccttcaactgagtgcagagcttcccgctgttcgggagtatctggcgagcttcgatgctgagctgcggccagccgagagctacatggctgtgcgcggattcctcaagtcttacgctggtaacgatgcgaccttcaattcgtaccgtacccacgtagagcgactgttgctttggtcgctattgcaggctggcaagccgttgctggagctgcgccgcaaggatgccgaggcgttcatggaattctgtctcgatcccccagcagactggatcggcccggtgaccaagtctcgcttcgtccggctcggcggccgaaagaagctggattcagacagctatattgtgaaccccgactggcgccccttcagtagcactgtggcgaagcgcgaacgcaagcttgccgccgagaccttgagcgaaccgcccgagcgaacctatcgcatgtcccaaggttcggtagcacaggtctttgccgtttgcggcagcttcttccagcacgccatggacgagggcctgaccgaggtgaacccgttccgcgcggtgaagcagaagtccatctacaaacagcgcaacaccctggacgtcgcctcgcgctcgctcagccaattgcaatggagctacgtcattgagaccgctgagatcatggctagcgaagtttcgttgcatgagcgcacactgttcatcgtggccactctgttctcaatgtacctgcgcatttccgatttggtcggccgggacaactggaaaccgtgcatgggcgacttccgtcgcgatagcaccggcaactggtggttccacgtgatcggcaaaggcaataaggccgccaagatcagtgtgcgtgacgactacgtgcagcattacctggtgcgctatcgccgtcaccttcagttgcctcccctgccctcacctgccgaaaaaaccccgctgatcaccaccttgaagggccgcgctggcctgtctgaccggcatgtccgcttgttgctgcaggaagtcttcgatcgttctctccaacgcatggccagcgaaggctggagcgacgaccaagtcgaccagctgcgctcggcttccctacattggctgcgccataccgcggcaaccttcgatgcgcctcaccgcgacatgaaggacctgcaggccgaccttcgccacaacagcctcagcaccacccagaacacctactacaactcgctggacgagcaacgcgcgcactcggtcaaggcgctgaagatcaagcgctaa

SEQ ID NO: 357901 - DNA, 840 bp, Pseudomonas aeruginosa
atgagaaaacacagtgagtgggccaagctcccccttcggtggatccactcaaacggactgacccgcttttctgatcgcatgatcaagagcgttcccgctcatcctcaatttccatttctgacggtggaaagaccggtcgacgttgaggcaatgcgtaacgaatgcatcgcggcgctcaggctctatctcgttctgtgctgccaggccaccttcaatgacggggtggtcggaaccacctaccccaagctgatgcagctcgcgaaaatgtcacgcccagtagttgccaaggggctggccagactggagaaggaaaggttgatcagccgcaagaagcaaccacggaaaatgggctctgcactgaccatcgaggggtggcacgacgagtacggctggggaaaaattcctaagctcaagctctatgattggaacactgagcacatgctgctgttgtccagtttcaactacagcaaagccagctttaacgccctgaagatctacattgcgctactcgcgtatcgtgggaggagcgctctcggcattgcgattctgagttacgacaaactgtctacggtcaccggtgtccctcggtatcaggttgctgacgctgtgacaaaactctacgacatggacctgatttctttcaggcccggcgacttcgatgacgagaaagcgggagaccgcacaaatcgctacctggtgaaggggctcggcgggcgctggccgtccacttcgccaggtgcctcgaccgctgacaaagccgatatggacggatcgccttccaggccctcaaaagcagagttaaaggctgctgaggacttctttggcgatacaccattttga

SEQ ID NO: 357902 - DNA, 123 bp, Pseudomonas aeruginosa
atgagcgagctgcttatctttctggggaaggccttggataccgaccctcttactctgtccctgtgctgcatcttcgtcctcagcattggcctggctgctgtcgcctggagaaattccaaatga

SEQ ID NO: 357903 - DNA, 1272 bp, Pseudomonas aeruginosa
atgcgcggcacttcgatcttcacaaatagcccagggcaggaccaggttctcaggccataccttcagctaatgcgttctgcggacaatatctgcctggctgcgccctacttcagtcgatgggaagagattgtcgaggcagcgggccgaggcgcttcgatcagcctcttggttgggttgaatgcagccaccaacccgggggcactggccaaggttagagagctgcccaattgctctgtccggtatttcaccgataactttcacgcaaaaatattcctgttcgacggtgtggccatgcttggttctgccaatctcacaaacggtggcatgtctctcaaccgagaggcagttatcctcctcgatcagccaggtgacgcagaccgcgtgcagaacatcgagcaattctttgcggaggtgtggggtagtgctgcggccttgaccgacgatgtgttcagaaaattcagaggcgcctgggagaagtcttgtgaacttggcaatccagatgcgccgttccagacagcgcttactgctgtagaacctccaacacgtctcgcaggcagtggccacaagagcgctcagcagctttacctcggggcgctgcagaagatgatctacgaggagtatcggccagcgtatgaagaagtcaccgctgtgctcgctgagtcaggccttctccgccctgagtttgcagatcttgatcctggcacggaaaccaacaggttcctgaactgggttcggctcgagcacgccggcggggacgcctcttggcaagatgcccccctgcgcagccccaatgaccggcgcattctgattcaagaattcggccgagagtgggtggccaccacgaaaactgatatcccaggcaattacttcgagctgctccaggggcttcacagtaccctaggtacacctgagagcattcttgctagcagccgcgatcagattgcagaagcgctgctctgcgtgcatgcgtttcacaatcagcttcggttcactcgtggcggagcagatcggttaccggcaaaattctgggaaggcaaccaagacgacctcgagcgtgtgcagaaaacccttgtctacttggtccacggcaacgaagactttgccgtgcggatctgcaacgtcctctacagcgaccgctacaagctgttctcgcttggcatgttcagcgctctggagctggttggtaccttgaaaccgaatcaatgcccagcgatcaatggtcgaatggcgaaggcacttcgcttcctgggtttcaaggtgaagccacagtaa

SEQ ID NO: 357904 - DNA, 972 bp, Pseudomonas aeruginosa
atgtacgaacacatccaaactgcataccgagagttgcaggctgcggccgacgcattcaattccacgtggccatcgctagtcgtcgacgggaccgtctggcagctcccgcttttggctgaacaaagaacgccggatgtaatccgagcagaagttctccatggcccgccggcgatcaaggtggcgcagctggcgattactgagttccagagagacctagggcaagcgccaggtacggtaatgcgcctacctggagtcttcattcttagcgacagcgttttgcaagaggcgagagcagtcaacgccgcgaaggcagggttgcaggtcgctatcgaagcgctccgcaaagagttgaatatgcagcctaagatgcggccggtgctgatgcgtcgagccttaggccccaacttcatcctcaatcagctgaaacgatcgatccaggtatttgatgctgcccctcggcagatctcgttcacctgggcaggtcatacctcagggaaagagcgggtgagggtaggggggctacgcgagcggctactgcttgaagcagaacaacgtgctctgaataactcggtgtcgattgaggacacgcctgaatggttggattggaaggcgctggcgaacctggatgacgaccaggttctcgactttccgaagccgattgctcctcatccacgatgcatgctgtggtttaccgccagtagccgatacgacgcgatggtccacgcaaaccttcccatctttgtcctggaaggtagctcccggccggcagtggtcggcttgaaggatttcgatcgccactcacgaacggcccggcgccccgaccagaagagcaggcaaatcgctctgcctggtggcaggtttttcctgccaacagaatctccgccggcgtcgacgtcaggggaaagcgtcccggatatcgactcgacctaccgcgagaatatgcatgcaacggtcaatgaccgctctacctga

SEQ ID NO: 357905 - DNA, 444 bp, Pseudomonas aeruginosa
atggaaaccagacaacttcatctgctgctcaagcatgactcccacggatcgcccgtaatggagtcactcacctcccctacgtccgaggccaagatattcatccaggggaacaaggctttagtggttctgatcgacttcaaccgtggggtgagcgttaccaacggcgcatgcgcgctggcgcgctatatcgaaaagacccttagtcaacgtcgagtcaggatcgaatcaatcgggtgggtattccgtgacacggatcttcagtgggaccgcttcgagcgcctaggccaggccgttcagtttttcccccttggaagacgacagctcatggacgttcttgattacgcccggaaattcctggcattcggtcagagtttgcaaactgaattgctcgatttcgttggagcctcgaccgcacttgggcccagcggggtcactttgcactag

SEQ ID NO: 357906 - DNA, 189 bp, Pseudomonas aeruginosa
atgaccggcacgcttcaaagcatcgaaggccatcaccgagaactgcatcgcgagatcatcactgtcgtgatgatcgatcatcacgatggggtagaccccgccctggtcaagactaagagccacaatcgccactgtttgggtgtggacctctccgtttatctcgacatcttctacaacgaacttcgatag

SEQ ID NO: 357907 - DNA, 801 bp, Pseudomonas aeruginosa
atgaaggacaaagagcagcagctacgggtatcgaaatccaacgacctgattcaagcgtcttaccgcctgaacctccaggagcagcgtttggttttggccgctatctgcaagcaggatccgcggaaaccgatgcagaaagtgatcagtgtttacgcctcggatttctcgcagatctatggcatcccccttcggcactgctacgagtacatgaaggaagcggccgacgccctctacgaccgagatatcaagacgtttgataacaaaggcgtcgatcgaaagcgctgggtagatcgtgctacctacgtcacaggggaggggcgggttgatttgtatttcaccacgcacgtcatgccctacctttcgcgactaaacaagcgtgtgaccacgtatgacctgcgccgcgtagctcagctcgaatccaccaatagctatcggctgtttgaaatgctgatgcagttccgatcaactgggtgggcccatatcgaggtcgacaagcttcgtgaggcgctagggttggatggctcatacgagcgattcaacaacctgcgccaacgcgtgatcgatccagccgtcaaggagctgctgcagaagagctctcttgtggtgacgtacgagttgatcaaagcaggtcggaaggtcaaagctatccgcttcgaattcaaggatacgattcagattcctctgacgctggtcgatcccccagagttcatccctggtgaatgggatagcgactatccgttgtccgatcttatggctgatggattggacgaagcgttcgaagacggcgtgatcgagtcctga

SEQ ID NO: 357908 - DNA, 126 bp, Pseudomonas aeruginosa
atgcaggtcgggtacgaccccgcggtagtcgagcggcgtatcgatcgagcgctggtatcgctccaggtatttattcatgtcgcgggacgcttccgggccgcgctcacgttgcggctgtgcaagtga

SEQ ID NO: 357909 - DNA, 321 bp, Pseudomonas aeruginosa
atgttcccaaatctgttcaagcggcccgcgccgcagaagcaaccgttgttcgcaccgggctcgctgaagttgagcgagaaggtgcattggttggcccgcaaaggcctgatcgaccccttgacctatgtccagcgccatgtgcgcggtgactggggcgagatcgacaaggccacccgcaaggccaacgacgtcgcactccaacaggacaacctgatgatctcctactaccggatcacgccggagctggttctgatcgtcaagaccagcgaagaccaccagaccacggttgtccagcttcccgaagagcgcgacatgatctga

SEQ ID NO: 357910 - DNA, 528 bp, Pseudomonas aeruginosa; identical to SEQ ID NO: 332900

SEQ ID NO: 357911 - DNA, 2022 bp, Pseudomonas aeruginosa; identical to SEQ ID NO: 332902

SEQ ID NO: 357912 - DNA, 480 bp, Pseudomonas aeruginosa; identical to SEQ ID NO: 346016

SEQ ID NO: 357913 - DNA, 159 bp, Pseudomonas aeruginosa; identical to SEQ ID NO: 329011

SEQ ID NO: 357914 - DNA, 1002 bp, Pseudomonas aeruginosa
atgcccattcgtcatgcgatcgtccacctgatcgacaagaaacccgacggcaaccctgccaccctgcatgcgcgcaataacgagttgaatgactctcaggccatggaaaatctgatggccgacctcaacgaaagctacaacgccaagccgaacaaggcctggggcctgttccaggaaacgtctggagcctatccgttcagtggctggctgaccgagtatctggatggcggcaaggacttcgtcgccttcagccgccaggcggtcgagcacctgcaaagtctgatggaggagtccaacctctccaccggtggccacgtgctgttctgccactaccagcagggcatgaccgactacctgagcatcgccctcctgcatcacagcgaaggcgtggcggtgacctcggacctggaagtggcgccctctcgtcacctggacctcggccagctgcacatggcagcacggattaactgctcggaatggcgcaacaacaagacctccaagcagtacatctcgttcatcaagggcaagagcggcagaaaggtctcggactacttccgcgacttcatcggctgccaggaaggcgtcgacgcccccagtgagacgcgcactctcatcaaggccttcagcgactacgtggaaagcgaggatctgccggaggagctggcgcgcgagaagaccgacactctgctcgactatgcgaccagccaggccaagatcggcgaaccgatggccctggacgcgctctccgagctgatggacgaccaggccccgcgcgccttctacgactacatccgcaacaaagactacggtctggccccggaaatcccggcggacaaacgcaccctcacccagttccgccgcttcaccggccgcgccgaggggctgtcgatcagcttcgaggcgcacctgctgggcagcaaggtggagtacgacgaggagcgtgacacgttgcttatccggggcctgccgacgcaactccagaaccaactcaagaagaaatga

SEQ ID NO: 357915 - DNA, 765 bp, Pseudomonas aeruginosa
atggaatcgaaacatgccgtgctctggggggcagtccttgttcccctgatgattgccggttgcggtccttccaggtccgaagttgtggccccgaagatcgataaagcggtcaccgacgcgtatgtcaccggaaaggaagacccgctgggggcccgcgttcaactcaatctcgacgtcgcaaaggccctgaccggctactgcaaccccgagacgtgcagcggatacccgggcgaggccaatgtcaccaccgccagacggacgctgctggaaactgtattgcagcgaggaaaggaggcagcagccgcacctgcagaagaggcggagtaccggcaggcactcataaccctcttcaccgacccggctgcagcgcagtacaccgatcttctatcgacatacgcccccgaactggtcttgaaggcagatgcagctgccggcacgtccaaggatgcagacgtgatgacccttgccggtgtggagctggccacgggtgcacatgtcgagcgcgacgcccttcacgccactgggctctttgcccgggcgtggtctgctgggaacaccggcgccgctcgtttggcggaggaggagttcgagctgcaaggcgaccttcggagcgcctacctttggtctctgcgaaggaccaacgacgcgaaggctgtcctagcccgccagcatttacagaagtccgtgccccagggggacgctgggaaaatcgaactggcctctaaggacaggtcactcatcacctaccgaccagaaggagcctga

SEQ ID NO: 357916 - DNA, 801 bp, Pseudomonas aeruginosa
atgcgcaattacctgataggtctggcactggccacgactgtgatgctgccttactgcgccgaagcaggttacagcggggccagagcgagtgtttcgcgtatttccagcttcagtgcgcgaccatcgatcaggtccgcggccagcaaggtgacatcgaattcgagccgcatctcctcgagcacggcgtcggtaggtaccactggatcctcgcgccctgccgcagcgccatcgagcagctacacccgcccaccacccaaagcttccgctccccgcccaaactcaccacagccatccccacagctggcgcaagtgatccatcaacacaatgggggctcgaactggatggggacggcgctggtcatgagtatgttgcacagcaacaacctgtctgcgagcgatcggagctggcttgaggagcgacttgcagaggagcgcgcgcacgaggcggcctggcctacagcgcaggtcggcgcaacgcaagccgcgcccgcgcccaaggaccttggtcaagccatgatggatggcttcgctgaaggctcccttccgaaacggatgcagtttcagttcgacctccccttgcgggttgtcgccggcgagacctacgacctcaaggtgaacgctcaagatggccgcgggaagccgaaagacctacgctgcactctgcccggggcaaccatcacatccgacggcctaacccagcagctgaggtggacacccgtgcagccaggttcgcaggtgatcacctgcaagagcctagacgacgcagaccaaaggctgctggagatacagagcgccagctga

SEQ ID NO: 357917 - DNA, 939 bp, Pseudomonas aeruginosa
gtggaaaagagttgggagattctggagcgtgtgttgcaggccagcattcgggagcagcgcatcgctcgccgttggaagaatttcttccaactgagcacgctcggcctggtggtggcggcctatgttgccggtgggccttccctcagtgagatgtggggcgacaaaagcaaagggatcacggccaaagtgagcattagcggcacaatcgctgagggtgagcgcgcaggtgcctcggtaatcagccggggccttgaggcggccttcaaggacccccgcacgaaggcggtgatcctcgatatcaacagccctggcggaagccctgttcaagctggacgggtctacgacgaaatcaagcgtgagcgcagtctgcacccgaacatcaaggtttacgctgtgatcggcgatctgggggcttccggtgcgtactacatcgccagcgctgcagacgaaatctacgcagataaagccagcctggttgggtcaatcggggttaccgccgcgagcttcggctacgtcgatttgatgaagaagctgggcgtcgagcgccgtgcgtatacctcgggcgagcacaaggcatttctggatcagttccagccggaaaatcccgctgaaactgcgttctggcagggcgtcctgcagcagacccataagcagtttattgccgctgtagaagccggccggggtcaccggctgaaggtgaaggaaaaccctgagctgttctctggcttggtgtggaccgggcagcaggctgtcacgctgggtctggtagacaaactcggtgacgccaattacgtcgcacgtgatgtcgtaggcgccgagaaaattgtggacttcacccccaggggaagtgccctagaccggtttgcaaatcgtgtcggcgccagcatggctggcgaagtcgcgacgacgttggggctgcaaggcttcgaactccgttaa

SEQ ID NO: 357918 - DNA, 228 bp, Pseudomonas aeruginosa
atgttcaagaccatcaccgcagcagttctgatctccttcgctttcgctgcaaccgcgaacgccggcggcaatggcagcggcaacccgcgtaatgcgtgggacaaacaaccggtcggccagccgcactacgtctggaaagacgggaaactcgtgtccgccaacgagaagtcgagcgagaaaaaggtagccgagaacaacgagaaaaaggacaacgtggcctcgaagtaa

SEQ ID NO: 357919 - DNA, 264 bp, Pseudomonas aeruginosa
atgcaaaccaaggccagtcaccgaaaagccctcacccccggtgacgttgttgcaattttgtttttcatccttggctgtacacatatcaccttgatctacgtgagtggattcaacttctggcctcaagcacctctcgttgttctcgggggattgttcggattaacgggcatgttcatctacttcatggccctgctagttatctggatggcagccggcctagttattggtgccgcagtaaacacttttaagcaccagacaatttga

SEQ ID NO: 357920 - DNA, 1806 bp, Pseudomonas aeruginosa
atgactgactccatcactctcgttcttcctgtaagtcgaatccgccgcaatcccaagatcgatccgcgcaaagggcggaagaaagcggactacttgcagttcgtcgaaagcgtccggacacagggcgtactgcaagccatcctcgttcgaccgatccagggcgatccggatttcgactacgaggtggtgttcggcaatacccgctactgcgcatcaatcgacgccggcatgccgaccatccgcgccgaagtccgtgaaatgggtgacgaggaagcccgcctgctggcagccatcgaaaacttgcggcggtccgacctgacccccatcgaagaagcgcagatggcggtgatgctgctggcagaccatgccaacgaccatgccgcagtaatgaaggccctgggctggtcacgcaccttgctcgacagccgcattctgctctcccgcgcctgcgatgctgtcgcggatgccctgctggaagaccaaatcaaaatcggtcatgccgagctgctctgccgccttcccgatatcgaccagccggcaatcctctcccggatcatcgagaagggctactcggtgacggaaacccgcgaccgcctgctggctctcacccgcgacctcaaaaccgcacgcttcgacaccgaagaatgccgaagctgcatccacaactccggggcgaacgcagacctgttcgaagtcagcctcggcgagtcgcgctgccagaattcgccctgctggaaccgaaagaccgctgcccttattgaggtcaaactcgttgaggcgcagcaggagttcggcgtggcgcacactgacctcaccctcccccaagacgggttcgtgcgtctggaaagcaagggcgccaccggcataggcgaagcgcagatgactgcctgcgtaacctgctccaactatggcgccgtggtcagcacggctgccgggcgcgaaggggacgtaaccgggggttactgcttcaaccgcaagtgcaataccggcatgcaagagcaatacaaagtcctgctggcggaagcatcaggccaactccaatcatctgcatccgatacgccagctcagatcgacggcgaccaagccatcaaaggtggggctgggaacgctgaccaacagaagaaatccaccagtgccacggccaagccagcgcaacctgcccaatttaaaaagtccatccgccgagaggcattcaccctctacagccgcgtagccaccaaggtcgttctggaggatcgccggctcacactggcggtggcaatcaccagcatgtacttcgacacccgtagcgatattccagcgaccctgcgtaagcgcatggaggacggtctgggcatcacgtccagccttcaacaacgtgagcgggcgaaggttgaggtaaagctcgctcagcgtaccgaggaagacctgttcaagctgctgagcagcatggccgcgagcacggtgttccgcgccgacccagccgaccaattcgacatgtccgtctctggcagccagtcgctggccttcatcgcgcatggcggcgccaagccagtcgatttattcgtgatgaacgaggcgtacctcaaggctcaggtgaaggctggaatcatcgaggactgcaagcgttccggcttcgcggccaagtacaacgaggtccacggcgacaaggctttcgacaagctggctaccggaaaatcggacgatttgatcaaggccattctctccttcaccgacttctcctggttgggttatttgccggccgcgttagaactgtctgcacaaggtgggaaagcaactcccgcccctcaacccaccgccgcctga

SEQ ID NO: 357921 - DNA, 471 bp, Pseudomonas aeruginosa
atgagccacaccttcttcaccgcagtaagccaagccgttgccatgagcaagcaacgcatcaacgtcgacatcgagggcctgggcgatggccgaatcaaggtacttctgagcgcgaacctcggtcccaccccggagaacgcaagtgccagcgaggttcaactgcgcgcagcgctcgccaaaccgttgctggtatcgggcaccccggaggaggttgaagaggccctgcatgagcgcgtaaaggcccatgccgccgtgatcaacgaaggggcgtccctactggagcaaatccgaagcctcggcgccaaggccatggccgagcgcaaaggcggcgcgccagcgaccgccgcgcagcccgaagaagaagacgatgacgtggaggaagaacgaggcgacagcaagcctgtggcccaacagaccacgccggcaccggcagcaccggccgccttcgacagcctcgccgaacttttctaa

SEQ ID NO: 357922 - DNA, 213 bp, Pseudomonas aeruginosa
atggccgcagccgtaatcacccttgaacgcatcttccgccacgctggacgtgacctgccagaccccgacccgagcatggagccggaagacgtgctcaagcactacgcccgccagtacccgcgcctgaccggcgccaagatcgtgcccccgactcaagagagcgacacctatgtctacgagttcagagaagccggattcggcgccaaaggttga

SEQ ID NO: 357923 - DNA, 1380 bp, Pseudomonas aeruginosa
atgggcgctgctgcaatctccctcgacacccggcgttatcagcttcccactcccgcgctgagccccttcgctctgccaagcgttgcccaggcgatgcgggaagcacgcagcgaccaatttgtgaggacgagtagctccgtcgtagacctcaaaggacacagcgctttctgcatggaagcgctgtcggggggaatgatttcccctgccgccttggaatggctggagctatatccgaacgcctatggcctgcaccgcctcactggcgaggtaatcaacaacatcgagcaggcgctgacagtccgaaccaaggggctgttcatcgatgttgactcgctacgcaagaacctagagacgccttacgctgatccttgcgtagccgccagcgccactctgcattgcgtcaatgatggccttatcgaaatcgagtctgtggcagggctgatcgagcaggggcctgactgcgcaggcgcgcttttggagaaggttgatgctgcatttgatcgcttgctctccctgccagaagaggcggaaaacagcattgcgcggggtattcagggggatcactacatcttggagggtagttgtttcacggatttcgaacttgaacttccggacgctgaggatttccacgaagtccgcgtccttctcttcaaaacccttgatgcaatgtcgcactacctcgtccccttcaacaccccagccacgttcattggggagggcagctactacaaccacgaagtagccggggcctactcatcgttgaagaagctggtgagcacctctacggctgagcagctcaaggaatatctcctgaccaccccatacgaaaagctggaattcgacacatggagtttcacctgtgaaggtgatttcgacgacgaatcagcagaacgctttgcgctgatgctggttgaaatgcaccaggtgacggagttggccggcttttacctgggggccaataaacctgcggagcttcgcacccttcgaatccaagcggagcaagcgataagggctggcagtccttactcagtgactcttgaagcactgctggaagccctagacgtgtgccagtccaaagcggacgcaaactactgcttcgaccacgacctacacagcatggtcggctccgcaagcgacggcatgacgttcttcgagagcattgtggtgcatgttcctggggattttccaaacctgctgcagagtacctacgaagggtacgacgggcaggtaggcggatgcggctacccagccatcggcctgccgctgaaaggaccggcaatggtaagccaaacactgccgatccttcgtgacaccgccacctgcgtacagctactggccagaatctgtgagtccttagggggagccgatgatcagcaataa

SEQ ID NO: 357924 - DNA, 702 bp, Pseudomonas aeruginosa
atgatcagcaataacatcagcagtaaagccatgctcattcaccatcaccagcagaccgggcaggtgaacgtcaccagtcatgatgtccttgcagtgcaaggcgggaaagggttcacccttggcgctggccgcgccttcagtgatcacgacaaacgcgcgctggtggagcttctcctgaatgagcattcgcagatcgaatatgtgcccaacaacctggtggtgcgcggtcgaggttgcttagtctggtacgtggctccccagttaatcgacatccctttccccgataagaccatcaaggcgccgttgcccggcctcatcttctgcgcattcgaagggatgccgcttcgctgctacgccttcaagggcaacaatcgcccggaggcaagcacgccactcttttacgcgccgctggggaatgtctatgaagacggcgatttctgtaccgggaacgtcaagctgccggaggaagtgctggttcagaacatcccgacttgggagcggttcgtacttgagagcaccaatacccatatcggcaccgtcaacccgatcaagggttgcgagaacttccaagggatgatcgcgttctaccaacagctggcagaatccaaggcgagaagatttcctgcgaaatcgctcgtcccattccggcatagaggcgcccacctcaccctggatacggtagtgcaggaatcgcagcaatga

SEQ ID NO: 357925 - DNA, 756 bp, Pseudomonas aeruginosa
atgagcgccgtagcggcaatgaaggtaacgccaacgcctttcaaagctcccagcagctggctgtcctctccgatcaaggttgtggtgatcggcgcagggggcaacggtagcgaagttgcagactgtctcgcccagttccatcacgcaattcggtcactcggtcatccccacgggctgaaagtgacaatcatcgacgacagcatcgttcgggagtcgaatcccgtccgccaacgcttctggccctgcgacctgggccagtacaaggcagtgagccttgccaaccgctacaacctcatgctcggcgtgcagtgggaaggtctgccctaccgcttcccttgcgcagaaacggagaaggccatcgaaaaggctgatctcatcatcagcgcggtggacctcccctcggcaagggtcgctatcggcaagctaaaagtgaaggcgatgtggttagacctcggcaacgacgcccggcacggccagatcgtcttcggtgccattgatgcgaagctgcgtcaggtttaccccaacgtgctcgatgcataccctgaaatcccgacacttgcggatgacaccagcaagtcttgctctgtggctgaatcaatccgcagccaagactgcctcatcaaccgttccgtcagcactgccggcatggcgatcctgtgggagctgttacgttacggagagacgcataaacactggttgatggttaacctcgaaaccggcgagcagagtgccttcccgttccccgtcactggatga

SEQ ID NO: 357926 - DNA, 240 bp, Pseudomonas aeruginosa
atgctaattcgtgtgattggttcggcccatttcctcccagaaatggacctggatatgccccaggatgtggttcatgaggaggtctacttcgacatttaccaggctggttctcgggtgccaacacgccggctgatctatcgcctggttgggtttcatcctgccgatcgcgggcaaccctgctatgagttcgctcgcattgggaatctgtttcccggggagggtggaggcagctccgagtag

SEQ ID NO: 357927 - DNA, 972 bp, Pseudomonas aeruginosa
atgaaatggaccgcgctgagtgccagcctggtgcttgtcctgtgtggttgtggcgcaccggacgtgactggcacctacgttggaagggatgaccaatccctcgacgttctccaactcacccaagggagtggcggcagcgttctgggctcgatcacccaccgcgtgctagccgagagcggggtaaccaagtctgaggtctcgaccatccatggcatggcggacggctcgaatatctcgctggaggtcgccaacctgggaaatctggcgagcactccgctccagggaacaatcacagccgatgggatcaccataattcggcctggatcggcggagtcgcaggtacagcaactgcagcgcgtagacgcctctggacttgcccaggcagaaaagcagttccaaacgtccgcgctgatgcagcatgaagctcgacggagaatcgccacggtagctgagttgaacgaacgaattgaggcattgaaccgtgagctcgacgactacagcgcgcgcacgaagcgtcagatcgccggcgtgcctgaggtcctggagcactttcgtgcagttggccgacgggccgacacgatgctcaaaacggccaatcgccttgccgccggcaccgaccaggagcgctatcaagccaaggctgtagcttggcaagtgctaaatgggcagaacgacgtgaaggctctgaccgaccaggtgaaccagacggtggcaacgatgacagggaaggctcagcagcttgccgatgaagcccagcgtgaacagaagctctgtggcgctggtcaggagactcccagtggcgtggctaggccagatatgggaccgtgccgttcgcttgaaatccgagccaatcaattccgtgcagatcgggacggggcagagcgcgtctatcggagtctgacctccgatatcgaggcagcaaatcgatcccttgcgcctctttgggcatcagcgaacaagctctcgcagtga

SEQ ID NO: 357928 - DNA, 1101 bp, Pseudomonas aeruginosa
atgctgtcccgaaacgccgcagtagcgtttggtgtaagcggtgggaaggacggtaaggcctgcgcactggcgaccatagagcacctggataggatcggccataccgggcccaggctactcatccatgccaacctcggctcagtggagtgggagggcaccacagaaaagtgccaggagctcgccgatttactggggctggagttggtcgttgtgaaacgtaaggccggtggcctgatggaacgctggcagcgccgatgggaaaacaacgtgcagcgatacgtggatctggagtgtgtgaagctgatcctcccctggagcacaccaaaaatgcgtttctgcacgtccgagctcaagagcgccgtcattgcctcttacctgaagaagcgcttcaaaggccaggaaatcatcaatgtcaccggcattcgccgggaggaaagcgcctcccgccggcgatccactgtcagtgaagtttccactcggctctcccagaggaaaatcctcggcatggattggcgcccggccctggacttcaccaaggacgaagtactccagctggccgcggcttacgggatcgagcagcacatcgcatacacccagtacaacatgtcgcgtctgtcctgcatctactgcgtcatgtcctcggaagcggaccttcaagcagctgcgagctgcccggcgaatcaaccgatttaccgaaccatggtcggtcttgaagcggcttccagcttcgcgtttcaaggcaatcgctggttgggtgacgttgcgccccaccttctcgacgaaaccctcaccacagcgttggctaaggccaaagaagccgcccagcgacgccagatcgcggaggccagaattccgaagtcgctgcagttcgatggcaaagggtggccatcgcgagttcctacggtcggagaggcagagatgctggcggaagtacgcttggacgtcggcaacgcaatcggcttaccggtgaggttcacaactgcggccgcggtgatcgagcgctatgaacaactctttgatgagcgcatggctgccacgccggctgaacgcatccagctgcttatctcggccgccggcgatcagttgtgcatgggattttga

SEQ ID NO: 357929 - DNA, 813 bp, Pseudomonas aeruginosa
atgaacgccccggccaagaacccgccccttacccctgaactccaccggaagaacctcgtaaagctgctgcaggcggcgagccggaggcaccacctatgggaggtgtttggcgatttcgtagaaatggcagcgatcgccatggccaatagcgtcgacctgctgcaacgaacccggcgcgaggaacggtacctggcgctcatccgcaggtacgaaccgaccgaacagaagctattcccgcagatgcttgcggagctgactctggcattggagttcggtccagacgacgtgttgggcaaggttttcggcgaattggaactgggtaatgcggcgcgcggccagttctttaccccctactgcgtctgtaccttgatggcacggcagcaggtaggcaacggtgacgatctccggcgcctggttgctgagaaaggctttgtcactgtttgcgaaccggcagccggggccggagcgatggtgatcgcgatcgccgaggcaatgcaaagccagggggtgaactaccaggtggagctgcacgttacggcccaggacatcgacgcccgggcggtgcacatgagctacctgcaactcagcctgctgcatatccccgcaatggttgtgttgggaaacaccctgctggccgaggaacgagagcactggtacaccccggcgcacattcttggcctctggtcagcgaaactgaaacgaggctactcggtgggcagcgcttccgaccatcagggagactccctggctgcagacagtattgctacccctcctctgccccctgcccccttagatcaaatgctgctgttctag

SEQ ID NO: 357930 - DNA, 444 bp, Pseudomonas aeruginosa
atgaatgccctgaaattcaaaagctacaaccagcaggtattctccactcgcctcagtgagaccctggccacacaaggccgaacactggagcagctgagcgaggaaatatcaattagccaatccgctcttcaatccatacttgatggacgaaccgacataaccttaccaatgctggctgagctcgcagatgcacttgaagtatcaccggcttggctcgcattcggtactggagagcaaactcttccaacagcggagatcgcgctaaaactgtacgcggatgactcgaacatcactgttgtggaactgcaggccaaatacagcgccagtcgcccgtcggagcacccgctctttaaccaggctacgtggatcagcgaggtcgacggaggcaggagcctggcagggtactggacctgggtccacgaaaagctgaacaccatcaagtaa

SEQ ID NO: 357931 - DNA, 1200 bp, Pseudomonas aeruginosa
atgtccaaactgacgcccaagttcgtgaaagacaccatcgctcctggttcataccaggatggccgtggcctcatttatcgggtaagccaaaccgggcggaggtactgggtttaccggtttatgttcgcgacacaacgtcacgacctggagctcggcacatacccatcaaccagccttcgcgatgcaaggcttcaggccgacaagcaccggctcgacatttcccgggggatcaacccgatcctcgccaggttggagaaaaagcagcgccaggtagctgagcaacgcgcggtcaatgacttcgagactgaagccaagcgttacatcaagacacatgcggtcagctggagtgagaaacaccggcagcagtgggagaactctttagcggcttacgtctacccgatcattggtgaacaccgcctggccgacgtcgacactgacgatgtgcttgaggtactcgagccaatctggacaaaagtcccggtgacagccaacagagtgcgtaaccggattgagctggtgcttgacgcggcaaaagctcgtaagttgcgcagcggggaaaatcctgcccgctggcgaggccacctagacaagcttcttccgaaacagtcccaatcggtccgccctttttccgcttgtacctcagaggaagccaagtcaatcctctatcgcctggatagtctggacagcacagcaggccgggccgcggagatgatggttctgtcagcgcttcgtaacagtgagatctgcggagcccgatgggacgagttggacgtgagttccaggatatggacaatcccaccggagcgcatgaagaacagccggcagcatcgagttccactgacaccacagatgctggaagtgatcgaacagcaacggggaaggcacctcatctgggtattccccaacgctacgaacaagggcccccttcccgggaacgccattgggcgtgcgctcaatgagttgaaagtaccaacgggggtgccacacggtttccggtcgacgttccggacttggtgtgcagaagaaacaagtttccccagagaggtttgtgagttggcgctggcgcaccggctcgccggcaaggtggaagcggcatataaccgcagtgaccttcttgaaaagcggcgattgctcatggatgcctggaacaactacctgagaccggatggcctcgaggccgatcaggcgtctgcagcttga

SEQ ID NO: 357932 - DNA, 357 bp, Pseudomonas aeruginosa
atgtccattctcagagagtaccgtgacaccgagctggcaatcaaagagctgcaggaacgactgcataagctcgaatctgacgacaagctgaaggttgaactcgacttcgaaggcaagcttcgtgacttgatgtcaaagtatggaaagagcctgcgtgacgtggtggctatcctcgatccggatagcaacaacaaggtacaacctggcgttggtaaacctcgccgtgaacgtcaaatcaagcgctacaagaacccgcatactggcgaggttattgagaccaaaggtggtaaccataaggtgctcaaagcctggaaggaagagcacggcgcggtggtcgtggagagctggctggaataa

SEQ ID NO: 357933 - DNA, 897 bp, Pseudomonas aeruginosa
atgcagacccccaggttggaataccacgcttacgcaaatctattcccgctacttcagggcaatgagtacgaggcattaaaacgcgatatcggtcggaatggtcagcaggaggatatcgttctgctcgacggactgatactggacggcagaaaccggtacagagcgtgcctcgagctcgaaattgatccctcgacgcgcccgtttgctgatggagatgctctggcctatgtgttgtccgtcaacctggttaggcgacatctgaccactgcacagcgggcaatgatcgctgtcgagctatccctgatggggaaagacttgggtgacgacgcggtcgatcccacacctaccaaacttctactggaggatgctgcagaggtcatgggcgtgagcccgcgttctgtgtcatccgcaagacgtgttgttcgtgaaggcgcacctgagttggttgctgcgctgaaaagcggccaaatcagcgttcacgtagccgagcaggtatccaagctgccgccgggtgaccaacaagagctttgcagtaagggcagcgtcgcacttcgtaatgctgcgaagaaaattgctaccccgtcaccacctacaggtaaatcagcaagcctccttcctaacgctcaggcgacgacagagtcgtcgagcagcgatagcaccgacgatgcccacacagatccagggcagccgacctcgcagcctgatagaaaacctgcagcgcttcttctttttgagctggccgatgctgggatgcaagagggaagggaggcggagagtattgccgcggagatcctggatgctgttgatgatggattagacctgctgctcctagagttcacgactgaggttgcgctgaagctcaaagacagaatcagtgctcgaaagcacctgcgataa

SEQ ID NO: 357934 - DNA, 987 bp, Pseudomonas aeruginosa
atgaaatccaacgactatccgggtaagccaaccccaagacctgcagggatggtcggcattcgtcgacctgctcgggttgcagaaccgatggtagggtcccctccgccggccattgacgcgaccctggaaagcaacctccctcagaccactccagagcctcttcaagcattagcaggggaggtgatactcagaaatgagacagagcttcgagatatcgaggtggcgagcaccaagcggtcaccgtaccagccacgcttaatttttgatgagcaagcattagaagagcttgcgaattcgatccaaacgataggcctggccaagccaattctggtcagaccgcttgccgacggcacctatgagttggtaggcggcgaaagacgttggcgtgccgtacaaattcttggatggcaaacagtcccggctatcgtcaagccgatgtccgacgcagtcgcgatgatcattgccctgacagacaacgagcaggaagatctcactgactacgaaagagctaaggcatatcacaacgtgatcgaggcaggagaaatctcaagccaacgtgcacttgcacgtaaccttggggtgaatgtctcgatagtgagccgctgcctggcgctcatgagcctcccagaggaggcaagggaagtactcgacaaaaagccagggctcatcactcttaactacgcagctcagtttgttgagcacagccaaaagaaccctgagatggtcaatgcgatggtaaagcgcatggcagaggagggtattcagcaagtccaagcacttcgattgatcgccgccgaactgtcgggcccacctaagaactccaaaccgccgcagcaccggacctacaaagggttgggtacggtaaagatcagtggcagaaagctgcaggtcgaatgcgacaagaccatcgatgtagagctgtttgaacagaaactcaacgagtttatgaaatcactgaaccacaaggccttagccatcaaagagtag

SEQ ID NO: 357935 - DNA, 1143 bp, Pseudomonas aeruginosa
atgaatactcaagtcgaacccgaagttgacgagcagacgttcgtcgattgggacaccattttttacacgcctcagttcgcagccgactgcttcaacctgacaactcgcaggctcaaagacatcgaggaagacaatcagctggcaatacccagggtcccaaggggtactgtctccgcaagagcctatcgtccgtctgatctctttctgatctccgctatccgccggcagcttggccatgtaaagcctctgggtaagcagatagtcatttctaacttcatccacaaaggcgggacagcaaaatcgacgaccacagtgaacctggcgatcagcctgcagcttgctggccgccgagtcctggttgtcgataacgacccccaaggcgatacctcttgcatgttcggatatgactccgacctcagctatgaggatctggaagccatgggtatcccacgtgacaggatcgtcgatggccacctggggaacttgatcgctcccctcctccgtatgaaaccgttcgagacaaagtccctcgcagacgtagttaaaaagccttttggcgagaatggcccacatctgattccggctgataattcgcttgaggatctcggtgtggttctcgatgctgccaacaacccggacttttggtactccgaatggatcaaggcaggtaactcgggccgccttcccaactgcgacctctctgcctacgacgtaatcatctttgataacgcccctgctgcgtcgcgccttacgaagaactcggttgctgcctgtgatttgcagttgtgtcctatccggatggacaaactgtcgttccgagcactgaatcgcctgaacgactggcttctgcgcttcgctgaagactacaaacgcagtcctgccctttgcgtcgtgccgacaatgttcattcgcgggagaagccggatgcttcagcatctggcaatgctgaacgacttcttccctggtcgcgtcaccgaggaaaacctctactggtcagaggattattccaagtccatggatcaaggtattccccttcttctttggaagggtactacccaggggacgttgaatgcatcgcgagctgtgtatggtcaaatcaaccagaccattcagaacctagcgcagatggcagttaaaaattga

SEQ ID NO: 357936 - DNA, 492 bp, Pseudomonas aeruginosa
atgacctcccctgcccttgactcttttattctgggcttcgcagcaatcgtcactgaagaaccgccctaccccgacaccttcaggatctccattggtgtcactaccctccaagacgtagagcatgagctcaagatcatcgatcaactgggcgtctcatataccggaggtcctgtactagctctgtgcgattgggaactcaaggtccaaggcttgagagacctacagctcacgttcaattcccaaggaactgtcgacgtggtgttggccaagatcgagcgtgcctactaccccgctatcaaggacgcattcaatcgctatctcccactggagtgcgagatcgaaaacgatcacggtttttgctccacccggtttgcccatgaggagatggatgttgctctggaggtggacagcatgagcgacttggtatcagtcacatgtaccagtgcctctttccgacaagcgatttccgatgctcagcagcgttatgcctga

SEQ ID NO: 357937 - DNA, 369 bp, Pseudomonas aeruginosa; identical to SEQ ID NO: 328134

SEQ ID NO: 357938 - DNA, 549 bp, Pseudomonas aeruginosa
atgcaattgcagtgcccctgctgcggtgagcagtttccggtagaggccgggttcgcagataccgacggcaagaggctggcggcgctgtttgccggcctcgatccgaaactgggccgcgcaatactcaattacctacgcctgttcagtccagccaaacgaggcctgcgcatgacgcgcgccataaagcttgtggaggaactgctcaacctggtcaatacaggcacagtgcaaaaggatgcccgctccaacgacaccaagccggcttcgccgcgtctatggaccaccggtatcgaacagatgatcaccggccgcgagcgcctgcaactgccgcttgagaaccacaactacctgcgcgcggtggtgtggggcctggccagtgatccagcgcaggctctggccgcttcctcaaagcggccgcaggccggtggacccagcacccagcaattgctccaagaccaagtcggtcgaattcagtccgatatcgtgttggggctgattactaaagaggatggagagcgccagatcgcggcgctgaaggggggagcatga

SEQ ID NO: 357939 - DNA, 300 bp, Pseudomonas aeruginosa
atggggctgccttggagctacgccgatgcgatcgccaaacgccagtttggcgtagccaaagtggcctggctgaagaagcctgaacagctcaaagcggtgttggctgccctgcatgttgagcaggagaagcgcgggcttttgggtaacgtggaggaactgctcaagctgctcggcgagcatgatccaaactggagggtggatctggaacacctgcccaaaggctgggagcggcgacgtccaattctcaagagcctggtcgaaacactgcgtgcagcagcgtctgctcgggggctcttgtaa

SEQ ID NO: 357940 - DNA, 435 bp, Pseudomonas aeruginosa
atgacctccattaatccgcaagacattttcaccattgctcaagctactgggcgttctccgcttgatgtactcaatcaagcacagtctgaaggatggaccatccaagaagcagcccaacccaccactaaacctaagagtgtgatgcatgatcctgaaggcgctgtagctctcatgcgtcaactgaagactgagacagtacgggagatgtatcggaatgatcctctcgtcagagaaagccttgatgtacagatagcacttgagagcactcagcctaagcaagacaagccatctaacttcctctatgacgagaagggcaacctttctggcatcaagtcttctgttgtgagcggaacccaagccactgccaagaatcagactgagcttatgaaagaaatcaaagccaacatttacaagcaatacggtgtacagcagtga

SEQ ID NO: 357941 - DNA, 258 bp, Pseudomonas aeruginosa
atgattgaagaaatcatcaagcttcaacacaaagcaatcaacactataaccgacaaggtaatctttcttattatccgcaacggatcgaaagacaaggaattctatccaatctcaaggagtcaactagcaagaatgaccggtctatcgattagcactgtagctacaaccttgaagaagtttaaggaagcaggactaatcgaagtagcccccaagcaagaccctcgggaaacctcccgttaccgtaccgtacctttctaa

SEQ ID NO: 357942 - DNA, 240 bp, Pseudomonas aeruginosa; identical to SEQ ID NO: 333079

SEQ ID NO: 357943 - DNA, 912 bp, Pseudomonas aeruginosa
gtgatcaaagggctgacgccggagtatgggtggtatgttgtatgtaatgataggataatactggtcgccgataaaaccaaaaccactggctggaccactacagcttggcacaatgagtaccacgggtttctcgggtgggcttattatgttagtgaggatccatctttattgccgtgggatacgaagaagactggaataaatacaaataatcaaacgcatattgaggttctaagctcgcttaaggagcttgcggatgattatcgaagcagaaatagaagcttaagacagtcgaaacctgaggggctggcgtctgaaccagctaagcctcgaggtaggggcactggcactggcactggcgtccgcggtgggaaccctcttggtggtgttggtaattctggaggcaggagtgcttcgggatcggcaattcatactaaagaaatggatatgttaatctacaatatatccacagttactggctctccacgaattgcgtcgttccttcaagaggctaaagagatatcaatcaaagagcacccgtatactgctatgatattgttgcgcgttctgttcgaagcagctcttcgcgattatttgttaagacataagcattaccagaaagtaaaggattctgttttcgaggaacaggctgttcaagggcggccttttaatcaaaagcaaaagagggactttacacctgctctgtcaaatatgctgagctgggttgtgaagaatacggaaatatttagttctgatctgaggagagggacgaagacctcaatagataattttattaaggatctttcgcgcttgaatggcatagtgcacgaagatggggtgcttacggatttttctgaggctaagcagataagaaacaatgctctgaaggcgttggaaacatttttagagagctga

SEQ ID NO: 357944 - DNA, 348 bp, Pseudomonas aeruginosa
gtgtggctgttcgaccggcgctgcgtcaagcccgacaaggccaacgccagcgcgctggcattgctgccacgcgacagcgcccaccggctcgaccgcctgtggacgctggtgcgggacacctgcccgttgccgctgctcgaccactggcgcgagaccgtgctggaactgctgcaaagccgcgagatgctgggccgccttccgttcgccctcgggccgctggaaggccatcggctcgccatcgacgtgccgacgctgaccctggcgctgggctccctgatccgcagtgacgtgctcaccgcctatccatacccggccaagatctggacgccggaagtggtagcggcctga

SEQ ID NO: 357945 - DNA, 189 bp, Pseudomonas aeruginosa
atgggcgccgctcagatacaggaaccgtccaagaacttcagcgcatcagtctccaacgcggtccacctccatgctgttcaagaccccgaccagatggcggccgacatgtgggccggcaagggcggcgaccattacatcgtctggctgaacaagaaccgccaggccgtcaagcaaatactcggaaactag

SEQ ID NO: 357946 - DNA, 486 bp, Pseudomonas aeruginosa
atgctcgccggcatgttccggttcgtctgccacaacggcctggtttgcggtgacaccaccgccgacatccgcgttccccacaagggcgacgtggtcagccaggtgatcgaaggtgcctacggagtcctcgacggcttcgagcgcgtgcagaacgcgcgcgatgcgatgcgcaccatcaccctcgatgagggcgaagcggaaatctttgcgaattccgcgctcgcactcaagtacgacgacccggccaagtccacccctgtcacggagagccaacttctggcgcccaggcgctgggacgaccgcaagaacgacctgtgggccgtcttcaaccgcgtccaggagaacctcgtcaaagggggactgaatggacgctcggccaatggccgcaatcaacgcacccgtccggtgcaaggaatcgaccagaacctgcgcctgaaccgggcgttgtggctgctggccgaaggcatgcgccagctcaaggcgtga

SEQ ID NO: 357947 - DNA, 510 bp, Pseudomonas aeruginosa; identical to SEQ ID NO: 324335

SEQ ID NO: 357948 - DNA, 621 bp, Pseudomonas aeruginosa
atggagtggagcatggatgacgcgtttctgaaaggcatagcacccgcatttattacgctgactggtactattgtcttcggtttagtgggaggctggtttaaacgtcatctagagcgcaggagtgtaagatacgcactagttgcggagattcaagcacttgctttaatcgttcgtgagcggcgctatctgcccagtctcctagaggcagcggatgaaattgataatgggctgcttaagggagatgaaattgtttggtttcgagtggcggtagactcgacttattgtcgagtatatgcagcttacacatcttccctcggaagcttgccagcccatatcgcccagcttgtcgtcactttctatcaatttatagatagcgtagtgcgggatgttagcccgggtggggcggtttatgaaggcacaaataaatcttctggcttccgagatgcaggcgatctcttagctaaagctctgaaagttgcagacgaattgcagagatttgaagatggtggtatctggttgcgtatcaagcagatattgagagtagaggcatcggataagctgattcgggagttgcggggatttcatgctaagtcaggaagtgatatattcgctgctaggtaa

SEQ ID NO: 357949 - DNA, 660 bp, Pseudomonas aeruginosa
atgggaatcggtcgcctggtaggtgaccttcgccgtgccgttccagttagccgtaggcgtgaaggacagcttgttaccgctgatcgaggctgcaccctgcgctgcggccgggccgctgatgatcgcgaaggtgtgcgagtccccttcgaacgagaggtccacgtcatgcaccggaagcgtaatgctcgccggcgtgtcttccggcgtgctcagtgtcaaatcatccaccgacggaacgtcattgaccgggtttaccttgatgctgactgttgccggtgccgaccatgcgccagcactgtcctgagctctgtaggtcaggctggtcgttccgttccagttaggattaggagtgaaggtcaacgtcgaaccgctgatgttggctgtgccatttgctggcgctgccactacctggaagacggtgggcgttggcgaatcaatgtcagtagcactcagggtgacggaaccgctggtgtcttcgttgatcgtcaaagacttggcctgggctacaggggcatcgttgaccggaatcactgtgatagtgattgtggcaacacccgaccaggcaccggcaccgtcctggacgcgataggtcagactggtagtgccattccagtctgggttcggagtaaatgtgagcgtgttgccacttatcgaagctga

SEQ ID NO: 357950 - DNA, 816 bp, Pseudomonas aeruginosa
atgcgaaacgccatctcacatccatcgtgctgccgtccgaagactaagcacatttcaccagcaggccgccagcgcctgcgttttccatccaccgtcggccgtgtgccgattgatcttcccaccctggggcaggccattgcccctttgggggtggtgcatgccccattttctttggagcatcaccatgtccctcgatctcgaaaacactaccgccgaagccacgcccgtacagggcgaactgctcgacgcggaatccaaccctctgaccctgagccttcaggattttgtcggcgagttcggcgacgaactgctcgacgccctcaacagcgccaatccgccggtctataccggccagccgcaggcgcatcgtcaactcgtcgtcgccagcctcaaacgcaagctattccaagcccaagccgaagtcgtccatgccgccgccgagctgctgatcgaccgtggcgaacacgccgcgatcgtcaacggcgagatgggttgcggcaaaacgaccgttggtatcgccacagccgccgtgctcaacgccgaaggctatcgccgtaccctggttctttctccaccgcacctggtctacaagtggcggcgcgagatccaggagacggtggcaggcgccaaggtctgggtgctcaacggcccggacacgctggtcaagctcatcaagctgcgcgagcagttgggtgtgcagcccacgggccaggagttctttgtcctggggcgcgtcaggatgcggatgggattccactggaagcctgtcttcaccacgcggcgcacccgccatggcgacgtggcagcgtgccctga

SEQ ID NO: 357951 - DNA, 756 bp, Pseudomonas aeruginosa; identical to SEQ ID NO: 350771

SEQ ID NO: 357952 - DNA, 213 bp, Pseudomonas aeruginosa; identical to SEQ ID NO: 332903

SEQ ID NO: 357953 - DNA, 195 bp, Pseudomonas aeruginosa
atgcttggccggtacggtatcggcgcagccgcgcgcgagggtgaccgtgccgctggcgtagttgaccgcatcgacccggactatctcgtcgtccacgactgcggcctggccgacagtgacgtcctccagccggctggcgttcgtcagcgtgacgacgttcggaccggccgccagcggcagctcggcggcgagtag

SEQ ID NO: 357954 - DNA, 396 bp, Pseudomonas aeruginosa
atgggtcatataacgccaaaggatgagaaacgcatcattaaactgattgaggaatggtcggagccgaagctgacctggcctttgctcgttgaagcctgcaaagaaaaactgggtatcagtcgtgttcgtcagtccctgatgaatctacctgccgttaatttagcaatgaagaattacaaggcggcattgaaggcgcagaagctgaagccgggctggattagcgatattcaggcagccaacgagcacattgaaaaactgacagcggacaatcagaagctgttagctgctgttcgagacatgcatagccggtttttgatctggcaagccaatgcggatatgcacggactaacgcaatcgatgttggagcagccggtcttacagctgcgaaagaagtga

SEQ ID NO: 357955 - DNA, 1908 bp, Pseudomonas aeruginosa
atgggttctctgagggggctggaagcagccctactcgaactgaccggcacacgggatgtgacgcgggtgtccgccgctgtttgcaataaagcgtgcgagtacatggaccgttactggaccaaaggtaacaacgcatacacgcacagtaagacacttgagaccatcatcaacctgatgcgggccaaaaatctgctcaatttggatttccggtggacctctccgctgacaatgaagcctaatggcacgctcaagcaacaaagagcagatcgggaacagaagcttcccagccctgacgcgatcagagccctcggggaagtgttctcaaacgagctgaccctccccctcgatatcgttgtgacctccgcctgtgcgctgttgctgagtgcccccagtcgcgtgggtgaattggcggatgttgaattggattgcgtggtatttaaagaggataatcagggtaatcggcgcatgttcctgcgctggctctcggaaaagataaaccaggtgacgctgaagcctgtcgttaagcctgagatggagccggtcgtcgaacgggttattacgttactgaaaccgatcaccgatgagccgcgggcttacgccgcctggctagaagacaatcccgatgatttccccccccacgaaggagtgccatctaagggacctgatgaaccgctcacgtacgccgaatgctgtgccgcactgaaactcaccgttcatgaaacatcctacccgcgaagcgtattcaaaagtaagttcctgaaatccgtagagaagcaaaaggcgctcagccccgccgcacgagccctcttggccgatatccgtgacgggtgggacttcagtgcagggaagcgcacttatgttaaaggcaagcaaggtttccagagtattgagtttgacgaccgatgcatgatcacgttgcgcaagctcaatgtgctgttgcgggaaaagtatcttccaaaggattttccatacaccacgccatacacggagggcaaagctcgggtgaaataccgtgatgcgctgtttaccgtgcgcacgggagcaatggcaaaaaactcaggtaacgagaaacacgattttggcgtggagatcgcggcgtgctctaaccgattgacagcgcaattaggcggtgcgaacgacccgcgtattaaaagtatatttgagcgccatggctaccccggcataaaggtcaacacgcatgcgtttcggcatgaattgaacacgcggatgcaccaggccggtctgtcgcaaatactgattgacgccttttccgggcgtacgtcgaggggatcggtctacaaccatgaaaccatcgaggaccgcacccagagggttgcggctttccaccccaaaacgaagcagagcaacgctgctcagtgtctagacaaggtcaaaaccaatcagcctctaaatcttgctgatgtgagggaactgcgcgagggcgagcagaaccacattatccatcaaacccatctcggcatttgtgttcacaactttgcctcagagccctgcccgaaaatgggcgcctgcttagactgcgggcggctcggttgtatcaagggggatgatgtaaagctgggcaacctcagggaagaatacgacgaccttaagcgccgcctcgataatgccctagatgcgcagtctcggttttttttgggggcatcggagtcggccaaaaaactaggtgagaagctctataagtgcgaggcgctcatccaaacgcttgaaaaccccgaactagaaaatggcgccattgtatggaacgccgataacggttggacgctgaccaaaaacgccgcggcaatgtcgggcctgatcgatgtcaaagtcattgaaaagaatccggcacaagaagcattgccaccgctggatgacgtcttggatttgctgaatgagatcgaaggttaa

SEQ ID NO: 357956 - DNA, 1587 bp, Pseudomonas aeruginosa
gtgagcatcgccgtcgaagcacttcaggcacccacgaaggacagcctcgatgcatggctgaacacgcctcgcctggcgaaatgtggggaggtgttcacaccggccgaaccgatgtggaaaccggacagatcggcgaatcattcagtcaactggaaagccgctgttgcctgcgtctcgccggattggaagccctggttgcacgcagccctggcgtaccgaatggccgatctggcagcgagcacggttgctaacgtcgccagcgttttgtcgcgggctgctcaggccgggcttgacccgctcaacgagggtcaactcatcgctctgcgggagcgctttaacaatagagagtttagtgtcattaccgcttttatggcgttttggcacgactgcgaatccctcgaacagcgcccgccgcaacccctgatcgacgcctaccaggcaatgcccaagaaaaagaattcctgcaacgatgtgatcctcagcctggaccccgaacaaggcccgttcacgcaggcggagcaagacgcgctgcaccaatggatacatgagcagttttgtcacgggcacttagatttcgagcggtacctttacctgcgcatgctgatgatttacgggcagcgtggcgcgcaagtgcgaatgatggtttttggtgatttcaccaagagcgatcagggctgcaaggtcagatttcactgggcaaagcaaaaagacgacgaggcgggttggcgagtaaagttcgaaatatttagtttggatgaggacctctacaacaccgtgcaggcctacaaggcaatggttctggggcaactctggcaaacgtatccagacggtgccgactggaatgcagccattgaaaatgtgcccctctttcgtcggaagctgcatgatgaagctgaatgtcgtgagcggatgactccccctgttttgctcgatagcccccttcaaaaagacctcgaatacgcgccgcagccaatctttcatgccggaaaaagcacaattcatgcttggcttgcccgcatcgagcggatggagtcctttccgatttcgcctcggacccataagccgctgaaagtgacgcgggggcaccggttcagacacaccctcggcacggacctttccaatgcggggcaggatgagtggacaatggcccgtgcattgatgcacaaaaacactcacacagtgcgaaagtaccgcgccgtatcagcggagttgatgcggttgatcgacgcgaagatgagcgaccagctagccttggttgtgaatgcgttcaccggaagcattgtcacggatcgtacctcagctgaaaacggggaccgagcggatcgacaaatcgaggatgtggcagtatgcggtgccactgccacctgccatcttgatgcgccgtacacctgttacgcatgcggaaaattccaaccccttctgaacggcaatcaccatgcggtccttgagcgattggaacgtcgtcgagctcaaaccattgccacggataaaattaccggcgtgctctgggatcgggccattctggcttgccgtaaggtgattctggattgtgaggccatcctccgatcagggagggaaggcgaatga

SEQ ID NO: 357957 - DNA, 312 bp, Pseudomonas aeruginosa
atggaactgaaaaaggctttcggattggcgctacggcaattccgaaactcgaagggtctgacccaggaggatttttcacgtctcagcagtcggacttatatgagcacgcttgagagaggccagaagatgcccaagctcgataaggtcgacgatctctcccggatgatcggcattcaccccgtgacacttcttgcggggtgttacctcaaccttgaaaacgagctaaccatggatgagctgcttgatagagtccgtgatgagctgcaacaaaccctgttggtggctccagccggggcgccacctaatgcgtga

SEQ ID NO: 357958 - DNA, 786 bp, Pseudomonas aeruginosa
ttgaaatacttatcccaggtaatcaaatctgtgcgcgcttcagggcggatcctggcggctgagtgggaacggccagatggcccccgaggctctggcgataaagcagatgtcgacatcgagatagaacgagctgtccgaaaggacctccttgaactgatcagctgcgacttctggggggaagagacgggcagccggctcactggtgccgagttttgctgggtagtcgatccaaatgacggaaccgccgacttcctgaagggtaaacgtgggtcggctatttccgtgggcctgctacgcaactcgcaaccagttctcggggtagtctatgcccctgtgactgatcgaggccctgactgcattgcctgggaagctggactgaccggcctaataaggaatggtcaacctattcagccctgcctccgcgaccaagctctaactgctggatctgaagtactagttagcaccgcggccaaaacaagaccagagctcaacacagaactgtgtgccccagctggatttgtccccatgccgagcattgcctacaggctcgcgcttactgctgccggggaagctattgcgggtatgtcgttggttcctgttggagcgcacgacgtagtagcggggcatgcgctgctgattggggctcaaggtgttttgctgaatcaggacggctacccgataacctatcaatcgaacctatcgcaagtctccacacgctgttttggcggcgctcctgatccatgcaggcagctcgtgcagcgaagctgggaacggctcttcacctga

SEQ ID NO: 357959 - DNA, 909 bp, Pseudomonas aeruginosa
atgcctgttcgtcagacatatctatgcctgttaatcctcggaaccgcgttctgggggatttcgtttgccttcaccaaagtgggtgttgcggacggggcacccttcgtattcctggggtacaagttcgcactcgctacgctagtgctttgcgtgatctttttcagacggctgaaactgatcaacaaagaaacgctcctggccggcgtggccataggtctacccttgtgtttgggtaacattttccagactgtcgggcttcagcacaccagcatcaccaacaccgccttcatcactggcctggatgtattgctcatcccggtcttcaagtgggctctctttcggaagcgcgtcgagcctcgaatctggctctgctgcgccgtcgcgctgacagggctctatctgatcgttacgagggccgggcttactctgaatccaggtgacatctggatcatgtgctgtgcagtcttttttgccgcatatgtgctcacggttggcttcttctcgcataagtacgactcgatgcttacggtcatcactgcgctggctacctgcgctactggatgcctttttgctgcacttttcgacgctagggccgaatgggccccaatggattcctccttctgggaaggagttctgttctgcgcgttgctcgccacagccttcatgtacgcggttcagagtgctgcgcagaagtatctcgaagaagaaaaagtagccctgacctacctgttcgagcccatcttcgcagcattcgcgggagcgatgctccttggcgaaaccttggatggaagaaccctggccggtgcagctctcatcttttcagctctgctgatcgccgagattgatgtacccaagttcttatcccgcctgctgcgcgccctgtttgccccgtgggctaggcgccaatga

SEQ ID NO: 357960 - DNA, 960 bp, Pseudomonas aeruginosa
atgtccaaagataattcgattttccccatcagccctgtaaaagtagctcccgcccacgttgacgctctgaccatcaactggcacgtgacggaggcctgcaattaccgctgccaatactgctatgcgaaatggacggatcacccctgtccccgcgagctatttcacgatcgcgaccgcagccagcacttgctggcggagttgttccggtattttcagccgacaaacaccagtaatcctctgcgtgatgccctctcatggcgcactctgcgcctgaacctggctggcggagagccatcgatactcggagagcgcctgctagacatcacccgcgcggccaaacaagtagggtttgaggtttcacttatcagcaatgcttcaaggttgacatctgacgttttaaagcagcttgcaccgcaactgacctacctaggtgtcagcctagactccacgcactctgggaccaaccttgcaataggacgggtagaaagaagcgggcaacggctaagtctaaatgagctgaccgcgaacctagactttgctcgtgaagttaaccccgcactcaagatcaagattaataccgtcgtcaacgccttaaatgccgatgaagacttgagcggactaatcacacgagttcgcccagagcgctggaaggtgctgcggatgctaccaatagttgatgccacccttgccgttagcgacgtggcctttgcagcctttgtggaaagacatagcgctttccgatcaatccagtgcgtcgaggacaacagcgacatgtgtgagtcgtaccttatggtcgacccatatggccgtttcttccaaaatcaagcagctgggaaaggagactacctctacagccgaccgattttaccttccggtgccgccgcagccttttccgaaatgcgcttcaacccggccggctttcgctcccgttacacaacagcacagggggaggcatcatga

SEQ ID NO: 357961 - DNA, 2172 bp, Pseudomonas aeruginosa
atgtgcagaattgatgccgaattcggcaatctccagcttgatgaaaaatcagacccaaccgagcgttttatccaagcactcgatgagcatgaaatcagagagcccacacgagcactgctgacgaaacacttcgctgccaattggcgttacatattcagctctgccgaccaactggaagaagcattggctcgtgcacgggggcaagcttcgtcagaggaccaagctgcagcgttactctcttctcgttcactggcagaccgattaagttggtcgcttttttccgctgccaaccaagtgggtagccgcgaaccaaactccgaagtgctcacgtttgccaaagagttagctcaaaccctgttccaagaatctccttacacgctgtttaaatcgctcaaagctgcaaattcgatctaccccgtgcgctacgagtggtttatgcaagcactgtacggtaatgactactgcttccagcgtgcagtatttgatgatccacagcttattgcagaaggagaacaggaaagggagcgggtgctgtggtcgtgcttccccgcgctgccgcagaatgggcgggaaggccagaccgagttagcctcgatattcagtcccgaggccacaactctgatttcagttgcttcactgcagcaaccgcctacacctgcagcacaccaatggcttcaaaggctccggtttctggaggtttgggtcgagtccgatgctgctgccggcaggttgcgcagcccatacgaaggcgtttttaaaaagctatataccgagtggggggcactacggtctgagctagaggcgccacgctcaggcgacagcgatgtaaaggctctgtgcgattctgccatatattggctcaacgacttggaactgcagctaaaggaaaccctagcggtccacatggatctctccaatgctgatgaaagccaagttactgactgggcttcacagcttgataaatgcgtccaggtgcgcacctatcaaaatccagatccgcagacgtgggatgccgccgaggaaaaagcttttagcagcatactctcgcgacttactcccgagaaaaccgaggcatggattcaggactcagtccacagcgatgtaacagcaacactacaacgcagacgggactcgttctcaacactatctgatcagagcagcagaaagtggtgggcatcggactattcggccatatggaaagccaagttaggagccgagatccaagccttgggtgttagagatgcattggccgttctatcctgcagctttttccggctgcccagtgaagcagtatctcgagaacttcacccttggtggaatagcctgctcgaaaagttgattcacgatcccgaatttccactggctctgaccccgcgatggactgttgctgctattggcaggctgagtgacgaagtcgtgatgccttacatcgacaagagcctcggactgctgcgcagccgactgtctaatgcggcagaacctgacctgaacaaccaactcaatgcactgttgagcgggctatcgcacctagacccgcggaaagcacttcgacatcgcctgatgctcatgcgctcgtcttacttgcccttcgccgacgagtcactatcacgcttcagctcgcttcacagcgacaaggctgtcagttggtacagcccactgagtgagctagctaggagctttcacgcaaataaactcaaccgaacgccttatgttgatcgccaggaatgtgaagcagctgagctggagatctaccagtcattcgcccttgatcttatcgatttttgccttagccgcctgcgcctgcgcaaaggcgaaaagaaacccgaagatgaacggtacgcggatagccaggtgaccgagcaatcggctatctggcgtcaaggatatttgaaggcgctgctggaagtcggccttgaccctaacggtaaggcgcataaaaccctcttttttacccggcagttcgaccctgatgagagcgtccgcgatgtcgcgaaagaggcttatcgcgccgtgcgccgggaaaccaacagtagaaaaaacgttcaggacttcaagcgtgggctgatcgccgctgaatggtggctactaatgagtcagcggcgcgcactcgatcttcccatagacccagagggagccctcaagacacggcgcaatatgatgcgtaatccgtaa

SEQ ID NO: 357962 - DNA, 231 bp, Pseudomonas aeruginosa
atgaaaaacctgaaaaaactgttcgttcgtggtggttccgccgttgcagtaggcgctgccctggtcgtctcgcaatccgcctcggccgctggctgggactacagctcgctgacctctgatgtcgatttctcgaccatcgcgaccagcgtcctggccgtcgctgcgctgctggccactgtgtatgccggcatcaagggcgctcgcatggtcctgggcttcctgcggagctga

SEQ ID NO: 357963 - DNA, 237 bp, Pseudomonas aeruginosa; identical to SEQ ID NO: 332089

SEQ ID NO: 357964 - DNA, 1020 bp, Pseudomonas aeruginosa; identical to SEQ ID NO: 332088

SEQ ID NO: 357965 - DNA, 372 bp, Pseudomonas aeruginosa; identical to SEQ ID NO: 324747

SEQ ID NO: 357966 - DNA, 339 bp, Pseudomonas aeruginosa; identical to SEQ ID NO: 332086

SEQ ID NO: 357967 - DNA, 1770 bp, Pseudomonas aeruginosa; identical to SEQ ID NO: 338114

SEQ ID NO: 357968 - DNA, 162 bp, Pseudomonas aeruginosa
atggtgcgggcgagaaagcctgcggtgccgcaggacgggtcgcagatgacctcggtgggctgtggggcgatcagctcgatcatcgcgtcgatgatatggcgcggcgtgcggaactggccgttgataccggcggtggtgagcttgctcagcaggtattcgtag

SEQ ID NO: 357969 - DNA, 387 bp, Pseudomonas aeruginosa
  misc_feature (350)..(359): n is a, c, g, or t
ttgttggagctgggggccggtttcaacatggagtacaccggcagggaaaacataatcttcaatgccatgcttcttggattgggcgagcaggagatttctgaacgcctcgacgagataatccagtttgccgatatcggtgagttcatcgatcgtccggttagaacatattcgagcggtatgttcgtgcgtttggctttctccattgcggcatatgtcgatgccgatgtgctgatcgtggacgaggccctggcggtaggtgacgccgcgtttcagttcaaatgcctgaaccggcttgaagaactgctgctgaaaggcatcaccatcctgctggtctcccacgatatacagtnnnnnnnnnnatatacagttgatcaagagttattgtag

SEQ ID NO: 357970 - DNA, 888 bp, Pseudomonas aeruginosa
atgatcgcggcctaccaggcgcgctgccaggcgcgcgtcgatgccgccctggacgccctgttcgtcgctccccgcgaagaactgcaacgcctctacgaggccatgcgctacagcgtgatgaacggtggcaagcgggttcgcccgctgctcgcctacgccgcctgcgaggccctcggcggagcgccgcagcgcgccgacgccgcggcctgcgcggtggagctgatccatgcctactcgctggtccacgacgacctgccggcgatggacgacgacgacctgcgccgtggccagccgaccacccaccgggccttcgacgaagccaccgcgatcctcgccgccgacggcttgcaggcgctggccttcgaagtgctcgccgacacccggcgcaatccgcaggaacatgccgtctgtctggaaatgctcacccgcctggcgcgcgccgcaggctccgccggcatggtcggcggccaggcgatcgacctcggctcggtcggcgtggccctcgaccaggcggccctggaagtcatgcaccggcacaagaccggcgcgctgatcgaagccagcgtgcgcctcggcgccctcgccagcggtcgcgccgagcccgcctcgctggccgccctggagcgctacgccgaagcgatcggcctggccttccaggtgcaggacgacatcctcgacgtggaaagcgacaccgccacccttggcaagacccagggcaaggaccaggcgcacaacaagccgacctatcccgccctgctcggcctggaggccgccaaaggctatgccctggagctgcgcgacctggccctggccgccctcgacggttttccgccgagcgccgacccgctgcgccaactggcccgctacatcgtcgagcgacgcaactga

SEQ ID NO: 357971 - DNA, 216 bp, Pseudomonas aeruginosa
atgagaaaagaactcatcaagatcagcgaattccaacgccggcgctggggtgacaatgggaccccgatgtgtagccaggcgattcgcaacaagatccggaacggagacattccaggtgagcagattgggaagctctggtatgtcgactggacagcattcaccagcccggcccacggtaacgatctggtggccatggtcctaagaggagccacgtaa

SEQ ID NO: 357972 - DNA, 705 bp, Pseudomonas aeruginosa
gtgcgcaagctgttcgctgccacgcccgaagcgcgacgccgccgctacgatgccggacggttctcgttcaacgtggctaaggggcgctgcgagacctgcgagggcgagggcttcgtcagtgtggagctgctgttcatgcccagcgtgtacgcgccgtgcccgacctgccatggcgcacgctacaacgaggccacgctgaaggtgcaatggaacgggcgcaacatcgccgaggtgttgcagatgaccgtggacgaagccagcgaattctttgcgggtgaagacgccgtggcccggcccctgcaattgctgcgcgatatcggattgggctatctgcgcctggggcaaccggccacagagctttccggtggcgaggcgcagcgcatcaagctggcgaccgagcttcagcgcagccagcgcggccgaagcctgtacgtgctcgacgagccgactaccgggctgcatgcgtcggacgccgaccggctgctggtacagttgcagcgcctggtcgatgccggcaataccgtagtgatgatcgaacacgatatgcgcgcggtggcccaggccgattgggtgatcgacgtggggcctggtgcaggcgctgccggcggcagcatcgtggtggcgggctcccctcagcaggtggcccgaacgtctggcagcagaaccgctccgttccttgcacaggagttggcgcgggccgagtag

SEQ ID NO: 357973 - DNA, 204 bp, Pseudomonas aeruginosa
atgcaaagggagttcgatcttagaatcatatgctgggataacgcgactcaaactttaaataataggaaagccgacgacatttttgttatagccaactcgactcccaaagaactggacacaagagacgttaatgtcgaggttctttccacccgatccttacaagaaatcaagtacatgatggggataagccatgtctttgaataa

SEQ ID NO: 357974 - DNA, 213 bp, Pseudomonas aeruginosa
atgaaaccggcaaccctcaataacggaatcgaagtagcccacctcgacatttacccaagccgccagggcgctacaggcgtttgccggaccgttcggcactggtgcttctgcgtgatcctgaagaacggcaagcgccatgttgatggcggccattcgagcaagaaagcagcccgcgcctacattgagcgcttttcaccagactggaacgcctaa

SEQ ID NO: 357975 - DNA, 291 bp, Pseudomonas aeruginosa
atgaccgaacagatgacgctcgacgggcagccggtagtgaagatccttgatctgcgctgctacctgatcggcgaccacgactactacgccgcagaaagcgcggagcaggcgatcgagcttcaccgcgacatgcttgcgctggacgacgacgaggacatcggcgagtgcgtcgaggtggtcgggaagctgctggacgtgctgtgggatgacgaagaaggcaatcctgcagggacgcttcgccagtggcttgccgaggcgactgagcctgaatggatcgctggaactgaatga

SEQ ID NO: 357976 - DNA, 222 bp, Pseudomonas aeruginosa
atgctgacgtatcaggaacaaaccgaagttctcaccggcctggcgttcgttcagcggctcatggctcctgcgacagcggaaccctaccaggtcgtgcctcagggtcgcggattcttccacatcgtcgagaccgctactggcgcggtgcgcggattccgccggaatcacaacgatgcatgcgcctacgcagagcacttgaagcgccagcaggccgccaagtga

SEQ ID NO: 357977 - DNA, 1377 bp, Pseudomonas aeruginosa
atgaaccatcaccaggaactcgacttctgcaccatgtgcagcggcatcgaggcgcccagcgttgcactggagtcaatcgggttccaagcacgctggttcgccgagatcgaaccattcccctctgccgtgctggctcaccactaccccagcgttccaaaccatggggacatgacaaagctcatccgacgcatcctcacaggggcgatcgaggctcccccattggctatcgccgggactccatgccaagccttcagcgtcgcaggttggcgcgaaggcctgaccgacccgcgcggcgccctgaccatcaagttcgtggagaccatcgatgcaattgaccttgttagaacccgccgtcgtgagcccgagtgcatcgcatggtgggagaacgttccaggcgtcctctcggacaaagaaaacgccttcggctgcttcctcgcagccctggtgggcgaatccgaagaactccagccgccagggggtaaatggaaggacgctggttgtgtgtatggacccaagcgaacagccgcgtggagggttctggatgcccaatatttcggcctggcccaacgacgccgccgtgtgttcgttatcgcaagtgctcgagcagggttcgatcccctcgaagtactttttgagcgcgaaggcatgcgcagggatcatccgccgcgccgaggcgaggggcaagaccttgccggacacgctcctttcggccctgcgctccagtgcggctgcggatacctcttcgacctgagccttggtcagtggggctgcccgaactgcgagggagacgaggggccggccgtggaagttctggccggcgtccctgccttcggcggcgagaaccagagccggtctctattccaggccggcgcgctgacagcgcatggcgttcggaacgacttcgcatccgagacgttctgcgtggcgccgaccttggccggaggcgggcggaaatctggcggctacagcctggacgatatcccgaccgtcgccggcacgctccaatcgaacggaaaggcagccggcagcgcgacacaacaggacgccgagtccggcctgctggtggtacacggaacgcaagatcctgacgtcgttcaagattgcgcccacacgctgggcaggaaccatggccaggaaaatgccgtattcgacccgaaccagatcaccagcgcggaaaaccgtagccaaccaactcccgggctgtgccacaccctgccggcatcgagtcagccgcccatcgccttcagttgcaaagactacggtgccgatgccggcgacgtttcgccaacgctacgcgccatgggcacggtgagagccacgccaatgccggcggccaggtggcggtctgcatcaccggcgacatcacccacaccctga

SEQ ID NO: 357978 - DNA, 246 bp, Pseudomonas aeruginosa
atggccgccagtccctactacctacgccaaacccacgccccggactgcgcctgctctgtgtgctggtccgcaaggcagaccatcccattgcacagcccgtcgccgtgtccggactgccggccccgttccttctgcgcgaaacacgatccgtcccggcgtccgccgaagtactggcacgttgtgtacgacagcgggaaacccacgccctttgtgcccgtgcgcgaagcattccaactggagggctga

SEQ ID NO: 357979 - DNA, 663 bp, Pseudomonas aeruginosa; identical to SEQ ID NO: 318788

SEQ ID NO: 357980 - DNA, 1002 bp, Pseudomonas aeruginosa
atgcaaatcaatccatcagtaacgaaccctgacattgtatcaatatacaatgacatacaatcaaaaaaattagttctggctcctgttttccaaagaaaattcgtttggacatctacacatcaagaggagtttatagataccatcctccagggatacccgttcccagaaatatatataagccaaggcgacgtggataccagcacattatcctctcagtactttgtaattgatggacaacaacgtctaacaacaataaaaaattatatagaaggaaatgtaaaccttcgaaaaataccaccttacaaagacctaacagaacaacagcaaaaaaacttcctttcttacaaggtagttgtccgaaatctaggagccattgaagaaaccataatcagagagatattcaggagaataaatctaacgaagttcaaacttgacgaagttgaaattcacaacgctgtctacgatggggaattcataaccaccgcgaagaaggtactcgacaatgtagatctgagaaaatatgaagtcttccatgagtccgaattcactagaatggcagacttacactttatcctgctcgtgatggccaccatcgaaaacaatggctatttcccaggagacaatgaagtagaaggacaaatatccagatttaacgaagaatacccccgcaaagatgaaattatagaagcattagtaagcacgtttggattcatagactccttggacctgcctccagactccatatggtttagaaaatcaaattttttcacaatgaccatagaaatactaaaaaacttccccaggctatctaaagaaattaaagatcgaatgctcagcttagaggaagatattcttagaaacaaaaacaacagagacaacatatacggaatgtattacagctacatgtacgcagggaccacagggagaaaagccagggtcgtcagagcagctttattcaaccatcgcatctttgatgaaaagatcccgcccgaggtaaaataa

SEQ ID NO: 357981 - DNA, 294 bp, Pseudomonas aeruginosa
gtggcgttgaccacggtgccgttggccagcggcgtgcccggtgtgaagctccagttgccgctgccgtcggcggtgacctggccaatcgggttgccgttgccgtcggtcagggtcacggtagcgcccggctcggcggtgccgctgagcgtagtgccgttgctcgggttgaccaccggagccgccggggcctgcgagtccacggtgacgctggcgcccgggctgctattgccggcggcgtcctgggccaccacgttgaccacggtgccgttggcgatcggcgtggacggggtgtag

SEQ ID NO: 357982 - DNA, 540 bp, Pseudomonas aeruginosa
  misc_feature (429)..(429): n is a, c, g, or t
atgcaacaggtcatcgcggtgagcctctgcgccacccacgcgttcagcaagcaggtgcgtcccgccatccgcctcctgaaaggcctcggcgtcgagggcgacgcccaccacggcgtcaccgtgaagcaccgctcgcgggtgcggcaggacccgacccagccgaacctgcgccaggtccacctgatccacgaggaactgcacgacgagctacgcgccagcggcttcgccatcggcccggggaccatgggcgagaacatcaccacccgtggcgtcgacctgctcggcctgcccaccggcacccgcctgcgcctgggggaaagcgccctggtcgagctgaccggcctgcgcaatccctgctcgcagctggacaactaccagcccggactgaccgccgccgtgctcggccgcgacgaacagggcaacctgatncgcaaggccggggtgatggcgatcgtcctggaagacggcgaggttcgccccggcgacgccatcgatatccagctgccccccttgccgcaccgggccctggagaaggtctga

SEQ ID NO: 357983 - DNA, 201 bp, Pseudomonas aeruginosa
atgagctgggcgcaacggctcaagcgggtcttttccatcgacgtcaccacctgcgcccactgcggcggcgcggtgcggatcgtcgccagcatcgaggaacccaccgccatccgcgccatccgcgcccacttcgagaagcacggcgcgctggagcaagcgcactaccggcccgcagcgcgcgcgccgccgccggccgcgtga

SEQ ID NO: 357984 - DNA, 201 bp, Pseudomonas aeruginosa
atgagctgggcgcaacggctcaagcgggtcttttccatcgacgtcaccacctgcgcccactgcggcggcgcggtacggatcgtcgccagcatcgaggaacccaccgccattcgcgccatcctcgcccacttcgagaagcacggcgcgctggagcaagcgcactaccggcccgcagcgcgcgcgccgccgccggccgcgtga

SEQ ID NO: 357985 - DNA, 744 bp, Pseudomonas aeruginosa
atgcatctactgtaccttgacgaatcgggaagcgttgccgatccacagcaacgttatttcgtgctcggcggggtcagtgtctttgagcggcaatctcactggatagagactgagctcaataagattgcagaacgcttcaagcctgctgcgccttacgacatcgaactccatggctctcccatgcggtcaggcagggatggctggaagcaattcccgcttgcggacagggttcaggcaatcaaggactcgctcgctgtcagcctgaccagcaagcatgtgcgtctcttcgcggcagtgatcgataagcaaggatttgccggggcagatcccgtagaacatgcgtttgagaagctttcaatgcggttcgatcttttccttcgcaggctctatgccaagcatggcgacccacaacgcggaattatgcttttcgataagagcagcactgagcgcagaatccagacgctcgcgcgcgaattcaagcataccgggcatagccaaggccaaactaagaattatgctgaagtccccgtatttctggattctaaagcctctcgcctgatccaactcgcagacctggttgcattcgcgatctttaggaaattcgagcatggagatgggcagttctttgaggtgatcaaagacaacttcgatatcgatagcggaatccagcacggcctctataccaagactcaagcgaatccagcaccacagccggtaatccaggcgcgacctgctaaaaattag

SEQ ID NO: 357986 - DNA, 414 bp, Pseudomonas aeruginosa
atgggctgctgcatagtgctcggcagcctgctgtcgtccctgctccagcgcctgggctgcctctctggcgcgctgctcaccagcctgacgcagcgcggcaatctgcctgccctgcgccaccactgcggactccaactctcctcgggcggcatggcaggcaaccagatcagaccgcgcggcatcgagctgcggccggtaatgctgcgcgccgagctggacaccgccagcggcaccgaggccaaccagcagcaggcaggccagcatgatcgagacaatgcgggccgagatcacgacagcaccctcttcgcccgctcccacagcgccatgcgctccgcctggccgataagcccaccgttgatccgacgggtgatggcagcgaactcgccccggtcagccagttcgttcaggccgtga

SEQ ID NO: 357987 - DNA, 318 bp, Pseudomonas aeruginosa
atgctcagcgagctggccgaactgatcgtcgaagcgttcgtgcgcaacgggattcctcgggagaaggcggtgcccgagtcggaggaggtggcgttccagctgcatcggcgctgggccggtttgacatttgttttcccggtcaaggatgacctggctcgcaagcgtctggagttgcacatcctgcagcgctacgatggatcgaacgccgacaagctggtccaggagttcggaatttcagaagggctgatctacgaaatcgtcaggaagcaccgcaggcagcgaaaggatcagatgacgctttttgacccggccgaatga

SEQ ID NO: 357988 - DNA, 378 bp, Pseudomonas aeruginosa; identical to SEQ ID NO: 323046

SEQ ID NO: 357989 - DNA, 300 bp, Pseudomonas aeruginosa
atggggctggccttgcgccttgggctgattgtcctgggtaacgtcgagcgcgccgaactgctgctggcgcacgtcgatgcgtccgccccaagcgttcagagtgccatccaaggtgatctgtccgggaccgcgcaggacgatggcgcgccccggatcgacctcgaccagcgaaccgcgccccagctccagcgtctggctggcgggatcgagctgcccgaggatattgccgtcgccgcctgcctgcaggtacaggtccgccccttcgcgttggaccaagcgtccggccaaggcatcctctag

SEQ ID NO: 357990 - DNA, 318 bp, Pseudomonas aeruginosa
atgctcagcgagctggccgaactgatcgtcgaagcgttcgtgcgcaacgggattcctcgggagaaggcggtgcccgagtcggaagaggtggcgttccagctgcatcggcgctgggccggtttgacatttgttttcccggtcaaggatgacctggctcgcaagcgtctggagttgcacatcctgcagcgctacgatggatcgaacgccgacaagctggtccaggagttcggaatttcagaagggctgatctacgaaatcgtcagaaagcaccgcaggcagcgaaaggatcagatgacgctttttgacccggccgaatga

SEQ ID NO: 357991 - DNA, 438 bp, Pseudomonas aeruginosa
  misc_feature (291)..(291): n is a, c, g, or t
atgccgctgctctggattgccctattgctcgccctgctcaccggaacctggctgagtgtacaaagcgaccacgcgacctcgagcgccgaactggccgaggtcgacaccctggccaggagcttgctgctctaccgctccagcctggcggagtacgcacacgccaaccccggtttcagcggctcgccggcggactccgctcttggtttaccggcctggttccgcaagccagcgcggcttcagggctacatcgccgccggcaccagctacgctttcatcgcctcgccgccggcngggctggcggcggccgtggatgctggtacggaatccgacctggttggcgtcaggcgcaacggccagttagtcacgcgccgcctcggagccactgccattgcgctccctgcgcccatccccgagggcgcggtggtcgcggtcaaataa

SEQ ID NO: 357992 - DNA, 138 bp, Pseudomonas aeruginosa
gtggggaacccactcgccgggcacctcgactcggcgcgcgccgacgccggccaggcccttcacgtcggcgaagccttcaccgaggtaaaggtcgacgaactgagcctgaatgatcgggttcacactcacgaactgtag

SEQ ID NO: 357993 - DNA, 444 bp, Pseudomonas aeruginosa
gtggattcgccgagcgagacgcgcaccctgctgaaagccttcagcgatttcgtggaaagcgaggacatggccgaggaacaggcccgcgagaagaccgagacgctggtcgactacgccacctcgcaggcgcgcatcggcgagccgatgaccctcgacgcgctctcggaactgatggacgaccagcagccgcgggcgttctacgactacatccgtaacaaggactacggcctgtcgccggaaatcccggcggacaagcgcaccctcaaccagttccgccgcttcaccggccgcgccgagggcctgtcgatcagcttcgaggcgcacctgctgggctccaggatcgagtacgacgaggagcgcgacacgctgcggatcagcagtctccccactcagcttcgcgaccagctcaagcgccgcaaggcggagcaggagagcacgtcatga

SEQ ID NO: 357994 - DNA, 891 bp, Pseudomonas aeruginosa
atgaaaggggttcgtcgcccaatcctgcgctaccacggaggcaagtggaaacttgctccctggatcatccagcacctggcgccacatcacacttacgtcgagcccttcggcggcgcagcctccgtcctgctccggaaagcccgcagctacgccgagatctataacgacctcgacggggacgtggtgaacctgttccgcgtcgcgcgggatcacggtgaggaactgcgccaggccctggcgcttaccccgtttgcccgggaagagttcgaagccagctacgtcgaaacaaccgatccgctcgagcgcgcgcggcggatggttatccgaagcttgcaaggtttcggtaccgcagctgcgtccggcgaacgtacagggttccgctcaacctcgaccagatccggtaccggacctgcactggactggcgcaactaccccgacacgctgaccgcgataacagaacgcctgcagggcgtggtgatcgagaaccgcgacgccctcgcgctgatggagtatcacgaccggccgaatacgctgcactacgtggacccgccctatgtccactcgacccgcagcacgaaggtgcgccacaacgccaccggcaagtcgtaccggtacgaaatggacgacaaccagcacaaggagctggcggcactcctcaaacggctgcgcggcatggtggtgctctccggatatccctgccccctctacgacgagctctacatcacctggcacagagtcgaccgccacgcctatgcagacggctccagagagcgaatcgaatgcctctggctcaacagcgcagcgcttgaggggttggcacaactggacttcttccaggccagtaatgcgtctccatcgccctcattccagaccacggccgctcattactga

SEQ ID NO: 357995 - DNA, 186 bp, Pseudomonas aeruginosa; identical to SEQ ID NO: 357063

SEQ ID NO: 357996 - DNA, 1326 bp, Pseudomonas aeruginosa
atgaggctgtcgcgctttcccatttcgaccttgctggactcggcctcgggacatctcgaggaccacttgtttaagaagcggctcgctgccgaaagcggcgaaccgctggctcaacaatattccggtatcattttcagcggcaacccgcatgaaaccgttcctcggcgcctgctgctggataaacgcctcaccccgctggagcggaactgctggcaagtgttccgcttgctcatcaacgacgacgggctgaccgcgttcccgacatacgagcaactacgcccctacctcggtatgcagccgggcaagatcgcctcgcgcgaaaccatcgccaaggcactcaaggtccttcggctgacacgctggctcagtctcggccgccgcctgcgcaacgacctcaacgggcaagtacaaggcaacgtctacatcctccacgacgaaccggtatccccggcagaagccctggagctggaccccgactacatgcagttgctgagccagtccaccggcgacagcaaccgagccatacgcgaaatcggccagatcacatggcgggagttcagggatgacccggacgttggtcgccggctcccaacccatctggagaagctcgagggacgcttgaaccaccagcaatgggctattgatagtcagctcgaagcggatccagcggcagagttcggcatccgaactctgcccgatctacctcattcaaccccgagttcggatgccgaactcagtgaaatcagcggcaagcaatgcgctttaccgctgagttcggatgccgaacccagacagaatccgccgagtacgcccttggttcggatgccgaactcatatagtacgtatacatacaaacaagattctgtatgtaaaaagccagtacaaccgcaaacacgcgaggaagcacatccgaactggcagggcctcttgcacacactggaggccgagcaacggatccaagccgtaagcgcgctccgacgggtgtccgaggatcttcggctacccatcatcgagcaatggcagcaccgatgtgccggcggaaccgtcggtaatccgttcggctacctcatgacgctcatccagcgtgcagtccagggaaagttcaacgcttcttgggctccggaagaaccggctgaacgaaccatcccagcagcggaacgccccagtcgtgctccggcaccatcaagccccatagcgcctacacagcctcaggtccagcccaggggggatacccggacagggagcgaggtcctcagccggctcaaggacctcattcggcccaggcacggatcgagcgtgccatccgagcggggtgatgagccatga

SEQ ID NO: 357997 - DNA, 465 bp, Pseudomonas aeruginosa; identical to SEQ ID NO: 326745

SEQ ID NO: 357998 - DNA, 153 bp, Pseudomonas aeruginosa
atgagcctgaaggcggagctgccgatccagtacgtccgccgcgaggactatatccgcggccagagtgtgatcgaggcgaagctcgacggtttggccgtgaagctggaaaacgcgcagctgcgcagtctgatgggagcaaaaaatgcaaattga

SEQ ID NO: 357999 - DNA, 222 bp, Pseudomonas aeruginosa; identical to SEQ ID NO: 346438

SEQ ID NO: 358000 - DNA, 222 bp, Pseudomonas aeruginosa; identical to SEQ ID NO: 346439

SEQ ID NO: 358001 - DNA, 540 bp, Pseudomonas aeruginosa
atgcaacaggtcatcgcggtgagcctctgcgccacccacgcgttcagcaagcaggtgcgtcccgccatccgcctcctgaaaggcctcggcgtcgagggcgacgcccaccacggcgtcaccgtgaagcaccgctcgcgggtgcggcaggacccgacccagccgaacctgcgccaggtccacctgatccacgaggaattgcacgacgagctacgcgccagcggcttcgccatcggcccggggaccatgggcgagaacatcaccacccgtggcgtcgacctgctcggcctgcccaccggcacccgcctgcgcctgggggaaagcgccctggtcgagctgaccggcctgcgcaatccctgctcgcagctggacaactaccagcccggactgaccgccgccgtgctcggccgcgacgaacagggcaacctgattcgcaaggccggggtgatggcgatcgtcctggaagacggcgaggttcgccccggcgacgccatcgatatccagctgccccccttgccgcaccgggccctggagaaggtctga

SEQ ID NO: 358002 - DNA, 1401 bp, Pseudomonas aeruginosa
gtggctctgcgggtcgtcgctgaggaccacacccgggttgaggatgccgcgcgggtcgagcaggcgcttgagctgccacatcaagcgataggcgtcctcgccccactccagctcgacgaacggcgccatgttgcgcccggtgccatgctcggccttcagcgagccgccgtactccaccgccaccaggtgcgccacgtcgtccatgaacgccgagtagcgggcgatctgctcgggcgagtcgaagccctgggtgaagacgaagtgcaggttgccctccagcgcgtggccgaagaggatcgcctcatcgtagcggtgcttgtcgaacagctcgatcaggcggttgactccctcggccagtcgttcgacggggaaggtgacgtcctcgataatcaccgtggtgccggtctcgcgcaccgcgccgacagccgggaaggtgtccttgcggatgcgccagagctggttgtagaccgccgggtcttcgctgaagtcgacctgcttctccagcggatattcggcgatggaggccatgatccgcccgagctgttcgtgcagcagcgtgcggctcgccgcgcgggactcgatgagcagggcgcaggcaccggcggaaagactcttcacccattccggcatgccctgcatgttctcaaccgagcgcaggctgcgccgatcgagcagttccaccgccgagaccggctggcgcttgagcaccgcgaccgccgtgcagcaggtttccaccgtggggaaaaccagcagcgccgaggccttgtgcgggtgttccgggacggtgtcgtaggtcaccgcgctgatgaagccgagggtgccctcggagccgaccatcaggtgggtgaggatgtccagcggctcgtcgtagtcgaccagcgcgttcagcgacaggccggtggtgttcttcagccggtacttgtggcggatcttcgcggccagttcggcgttggcgcgggtctcgcggccgagttcggcgagccgttccagcagctcgccgtggctggcgcggaaggccgcgacgctggccgggtcctcgctgtccagacgggtgccgtcggccagcagcaggcgcaggccggcgagggtgtggtagctgttctgcgcggtgccgcagcacatgccgctggcgttgttggcgacgatgccgccgatcttgcaggcgttgatcgaggccgggtcgggaccgatcttgcggccgaacggcgccagccaggcgttcgcctgggcgccgatgacacccggctgcaggcggatctgcgcgccgtcggcgcggatttcccggccgttccagttgtcgccgaggacgagcagcaccgagtcgctgatggcctggccggagaggctggtgccggcggcgcggaaggtcaccgggacctgctcgcggtaggcggcggatag

SEQ ID NO: 358003 - DNA, 702 bp, Pseudomonas aeruginosa
atggggggattcatgcagtatagccagcgcctcggggaggccggacgcaatgacagacgcagcatgcgtggcgcgttccgccccggcctgcccagctacgaggcccggcgcggcgccgagccggtgtcgcccgggcagctagaggggctgcgcgacccggcgtacgtccgcgtgcgcctgcacggccgcttcgacgagcggcatacgctgctgctggataaccggctgcgcaacgggcaggccggggtcgaggtgctgcaacccttctacgaccaggccagcggcctctggctgctggtcaaccgcggctgggtcgcatggactgaccgacgctcgccgccggcgctggaaacccccgaccgcgtcctcctgctcgatgccttgacctacctgccgccacccggcggcctgcacctggccgacgcgccggccggcggctggccgcgcctggtgacccagctcgacatcccggcgctgtggcaggccttcggtcgcgccgggctgccctgggaaatccgcctggaaccgggcgacgccagcttcgacaccgactggcccctggtctcgatgccgccggagcggcacaccggctacgccgtgcagtggttcgccctggcgacggccctgctcgccctctacctctacctcggtgtgcgccgcgcacgggagaaaaaccatgagtctcgcgattccgatgcctga

SEQ ID NO: 358004 - DNA, 1236 bp, Pseudomonas aeruginosa
atgccgcttgccagtcatctgcgttgcgtggcgctggcgctggggatctccaccgcgctgggctgcgcgaaccgcaaccaacccgcgccacgcgcggaaagcctcgaccctggcctgtcgagggtggcgggaacccgcggcgacgcgctgcccgcccagtggtggacgctctaccaggaccctgggctgaaccacctggtggccgccgcgctgcgccacaaccgcgacctggccgcagccgatgcccatgcccgcgcgctcctcggccatctgcgcggcgcacagggcgaacgctggccacggaccgaggtcggctatggctaccagtatgggcgcgacggcgacgaccagaccctcgccgaagccaccgacgaggacctgcacagccagtggaaacacaccgcccgcctcgacctgtcctaccagttggacctgtggggcgaagtccgcgcccgcatcgccgcggcgaaggcggatgccgaagcggcgcaagcggcgcgcgacctgctcagggtcagcgtggccagccagaccaccctcgcctacgtccgcgcctgcgccctggcgcgacgggcagaggtacaacgccgatcggtcggcctgctcgacgcgagcctggcgctgagcgaacgccagctcgccgccggcctttccagcgagctgcagcgacgccggctgctggccttgcgcgagcggacccgcgccgcgctgccgatgctcgaggcgcggcggcgcgcggcactctacgaactggcgctgctcagcgggcgctcgccgcgccagttggacgctcctgccgcgacctgcgccggcataccgcaactgcgccgtgccctgcccaccgttcccggttggggaagcgcgcgaggccgcctggacagcgcagcggcagagcgcgacgccgccctggcgcgcttcgacggagcggtgctcggcgccctgcgcgaggtcgagcgtgccctggcgctgtatgccggcgagcgccagcggcgtgccgacctccagcgtgccctcgacgagcagcgccacgcctaccggttggcgcgcagcaactatcgcgccggcgccctcgatgccctcgagctgctcgacagccaacgcagcctggtcgccgaccgggcgcgcctggtcgacgccgagatgcgcgtcgccgagcgccaggtcgaactgttccgggctctcggcggcggctggcaagccgctcccagcccctcccatcaggaaaacggacaatga

SEQ ID NO: 358005 - DNA, 300 bp, Pseudomonas aeruginosa; identical to SEQ ID NO: 357989

SEQ ID NO: 358006 - DNA, 621 bp, Pseudomonas aeruginosa
atggctttgccagatcgccgccaggaacaccgccaaggctgcgccgagcacccactgcgccttgcgtggctcggcgagccgggccaggccccgcagccaacggctacgacgctgccgggaaacctcctgggcggctgcgtacttgtcgtcgacgcgcagcaacgacgccatcaacggcagcatcaccaggttggtgacgatcttgtaggccacgccaagcgaagccgtgatcgccagttcccgcaccatcgggatcgggatcaacagcagcgtcacgaaggaaaccagcgcggtcaccagcgccagcgtcccgggaaccagcaacccggtgaagctcgagcgtgccgcctcttcggcgctcttgccgatggcgatctcgcgcacgatgaagttgatttgctgcacgccatgggaaaccccgatggcgaacaccaggaagggcaccagcactgccagcggatcgagcccgtagcccaacaggcgcaggctgccgaactgccagaccagcgaggccagcgaacagaccaacgccagcaaggtgaaacgcagcgagtggcaataccagtacaccgcccccgccgtcagcagcaacgccagcaaacagaactccagcacggctga

SEQ ID NO: 358007 - DNA, 1152 bp, Pseudomonas aeruginosa
atgaccgcctcttcgccgagtctctcgccgaccctcgaactcgcctgcgagttgatccgccgcccctccgtcacgcccctcgacgccgactgccaggccctgatgatgcgccgcctggaagccgccggcttcgccctggagccgatgcgcatcgaggaggtggacaacttctgggcacggcgcggcggcgacggcccggtgctgtgcttcgccgggcacaccgacgtggtccccaccggcccgctgcaggcctggcagcaccaacccttcgacgccctgatcgacgaccagggcatgctctgcgggcgcggcgcggcggacatgaaaggtagcctggcgtcgatgatcgtcgccgtcgagcgcttcgtcgccgaccacccggagcacaagggtgccatcgccttcctcatcaccagcgacgaggaaggcccggcccaccacggcaccaaggcggtggtcgaacgcctcgccgcacgcggcgagcgcctggactggtgcatcgtcggcgaaccgtcgagcaccagcctggtcggcgacgtggtgaagaacggccgccgcggctccctcggcgccaagctgaccatccgcggcgtacagggccatgtggcctacccgcacctggcgaagaacccgatccacctggccgccccggcgctggccgaactggcggcggaacactgggacgacggcaatgccttcttcccgccgaccagcttccaggtttccaacctgaactccggcaccggcgccaccaacgtcatccccggtgaactgaccgcgctgttcaacttccgcttctccactgaatccaccgtcgaaggcctgcagaaacgcgtcgaggcgatcctcgacaagcacggcctggactggcacgtcgaatgggcgctgtccggcctgccgttcctcaccgagccgggcgaactgctcgatgcggtggccgccagcatcagggcggtcaccggccgcgagacccagccctcgaccagcggcggcacctccgacggacgcttcatcgccaccatgggcacccaggtggtcgaactcggcccggtcaacgccaccatccaccaggtcaacgagcgggtcctggccagcgacctggagctgctcaccgaaatctactaccagaccctggtgaggctgctcgcctga

SEQ ID NO: 358008 - DNA, 648 bp, Pseudomonas aeruginosa
atgctcgacctcctgaatggtgcgcttgagcttgctgatgacgcggattgcgctcttcagctcaggtggatagcgatggatggagttgcggcgcatgcgttcggcccgggtgatgagctccaggttgtcgatgacgacgttctgcttgttgttgtccttgaagcagacgcaatggccggttgggatggggccgaagtgttcttcccagagcaggatgtggatgcccttccagtcccgggggggatagccggtatccgagatctttcgttgcaggtagccatcagcgctgacccgtgtactgccgactgggagccatgtgtggggcttttgccccttcttgaaccgagttgcgctgccccagtcctgccggatcttcttggagaactcggggctttttttcagcccgagccgatacgctttggagcagatctgctggagcgttttgttcaacctggctgccaggacctcgttcggcatatccggatacaggcgcagcagcaccagttcctgttcggcggtccaggtttcgcggatgcagcgctcctctcggttgctgaatttgcggcgggcgcgcaccagggcctcgtaggcgagggtcgagagagcagagcgagtcatcgggaacctccctgctcgagcgcgccctga

SEQ ID NO: 358009 - DNA, 435 bp, Pseudomonas aeruginosa
atgaagggccgaagcctgatccccggcgagctgggcgaggccaccatcgcgctcctggagcacaacttcagcttcctcagcctcgactttacccgcaacctggaggtcgccctggaccggatcgctaacagcgaggacacctacatgaacgtggtccagcagttctaccagctcctgcagtcggagctgcagacgctgcgcgcgcaccccagcgcacagggcgacccgcgagcaagctctaccgccagcgctcccacggcgccggccagtgacttcctctgcggcaagtgcggtctgcccctggtccaccgcaagaaagctggcaagggcggcttcgacttctggggctgcagcggctatcgcaccaccggctgcaaagtcggctatcccaccaggaacggccaacctgacttcgacaacccgcgcgggctatag

SEQ ID NO: 358010 - DNA, 405 bp, Pseudomonas aeruginosa
gtgttcgatgacgttgacgcagcgcccggcggagcgccgttgcaaggtatgcaggcgggcgccgagttcgcgcaggtcgaagggcttgagcaggtagtcgtcggcgccggcctgcaacccggcgacccggtcggtcaccgcgtcgcgcgcggtcagcaccagcaccggcaggtcgacgccctgctggcgcaggcgttgcagcaggcgcaggccgtcctcgtcgggcaggccgagatcgaggaccagcacgtcgaagcgcgccacctggagcagcgcctgggtatcggcggcgctggccacccggtccacggtcaggccctgggcgttgaggccggcgacgatgccgctggcgatcaggtcgtcgtcttcggtgagcagtacatgcatggcggtatcgctggttaa

SEQ ID NO: 358011 - DNA, 885 bp, Pseudomonas aeruginosa
gtggggcaggtgagagctgacgctagcgaggtaaagagtggattgggacttttgcaggcccgcctggctctggctcgatttgccagacggatagagcccgtctttcaaccagctctggatgagagaccaaacaatggcgaggctgatgaactctggactgtcttgttcgattccggcgttgatttcctcggtgaggatcatcgcgatatccagcaactccatgctgtcctcaaggcggacctggttttcctgcatcaggtgctcccagcggaaccatatctggcgctcgatctgttcatcgagctgccgccagcggccccgtcgggggtgtatctccatgatcagccgcttgatcgcagtgtcttccggcgacagaccgaagaagctctgaatcatcgtggtggtagctccgagtttgagagcacgctcaatttgcagctcctcttgctgagagcgctcggctgtggccaggattttctccatgacgtcgatgttcactctgacgtctacccaggaaaccggggtattggtcaggatgctcatgacagcaggctgttggagctgagccagaatctccggccgcagccccatctcggcacaacgcctgagctggccgttgcgcaggtggttgagcacctgcgtcaggaccgcttcattgatcaacgacttcgacatgtcgatccctccccaaatcgtgcgaaatcactggtcggtagctgcttgctcggaggtggccggcggcagctcaaggtcaaccaggcgccgggcaagacgaatgatccggaacagtttcaccagggcttcgtcattaagacggcctgcctggctggatggctgatcgcctgtggtgggttggcccagcagcaactgagcgaggccagctga

SEQ ID NO: 358012 - DNA, 792 bp, Pseudomonas aeruginosa
gtgccgcaatggacgccggcgctgccgcagccggtacgcctggcgccgccgaccgccccgctcgacgacgagcggccgagggtggtctatctcgccgcctgcgtctcgcgtgccatgggcccggccttcggcgacgaagagcgcgagccgctgctggacaagacccgccgtctactggaaaaggccggctaccaggtggtgttcccggataacctggacaacctctgctgcggccagccgttcgcgtccaaggggtatgcgaagcaggccgacgacaagcgcgacgagctgctcgccgccctgctccaggccagccgcggcggcctcgacccgatctactgcgacaccagtccctgcaccctgcgcctggtccagggtctggacgatccgcggctgcagatccacgacccggtgaaattcatccgcagtcacctgctcgatcgcctggagttcatcccgcaggacaaaccggtagcggtgcacgtcacctgcagcacccagcacctcggcgagagccaggcgctgatcgacctggtcggccgctgcacccgcaaggtggtgatcccggaaggcatccactgctgcggcttcgccggcgacaagggcttcaccacgccggaactgaacgctcactccctgcgcagcctgaaggatgccgtgcagttctgcgaggaaggcgtatccaccagccgtacctgcgagatcggcctcagcgagcacggcgggatcgactaccgcggggtggtctacctggtggaccgggtgacgcaggcgaagggcgcgcctcggtag

SEQ ID NO: 358013 - DNA, 186 bp, Pseudomonas aeruginosa; identical to SEQ ID NO: 357063

SEQ ID NO: 358014 - DNA, 291 bp, Pseudomonas aeruginosa; identical to SEQ ID NO: 328687

SEQ ID NO: 358015 - DNA, 351 bp, Pseudomonas aeruginosa; identical to SEQ ID NO: 345800

SEQ ID NO: 358016 - DNA, 153 bp, Pseudomonas aeruginosa; identical to SEQ ID NO: 357998

SEQ ID NO: 358017 - DNA, 153 bp, Pseudomonas aeruginosa; identical to SEQ ID NO: 341000

SEQ ID NO: 358018 - DNA, 195 bp, Pseudomonas aeruginosa; identical to SEQ ID NO: 344396

SEQ ID NO: 358019 - DNA, 213 bp, Pseudomonas aeruginosa; identical to SEQ ID NO: 348415

SEQ ID NO: 358020 - DNA, 222 bp, Pseudomonas aeruginosa; identical to SEQ ID NO: 346439

SEQ ID NO: 358021 - DNA, 1290 bp, Pseudomonas aeruginosa
atgaacgtactcatcatcggcagcggcggtcgcgaacatgccctggcctggaaggtcgcccaggacccgcgcgtggccaaggtcttcgtcgccccgggcaacgccggcaccgccaccgagaccaagtgcgagaacgtcgccatcgacgtgctggccctggagcaactggccgacttcgccgcgaagaacgtccagctgaccatcgtcggtcccgaggcgccgctggtggcgggcgtggtcgacctgttccgcgagcgcggcctggatatcttcggcccgaccgctggcgccgcccagctggaaggttccaaggccttcaccaaggacttcctcgcccgccaccggatccccaccgccgcctatcgcaacttcaccgaggtcgagccggccttggcctacctgcgcgagcagggcgcgcccatcgtcatcaaggccgatggtctggccgcgggcaagggcgtgatcgtcgccatgagcctggacgaagccgaagccgccgtgcgcgacatgctcgccggcaatgccttcggcgacgccggttcgcgcgtggtgatcgaagagttcctcgacggcgaggaagccagcttcatcgtcatggtcgacggcaagaacgtgctgccgatggccaccagccaggaccacaagcgtgtcggcgacggcgacagcgggccgaacaccggcggcatgggcgcctactcgccggcaccggtggtcaccgccgaggtccaccagcgggtgctggacgaagtgatctatccgaccgtgcgcggcatggccgaggaaggcaacgtctataccggcttcctctatgccggcctgatgatcgacaggaacggcgcgcccaaggtcatcgaattcaactgccgcttcggcgatccggaaacccagccgatcatggtccgcctggagtcctccctggtgctgctggtcgaggccgccctggccaaggcgctggacaaggtcgaggcgacctgggacccgcgtcctaccgtaggcgtggtactggccgccggcggctatccgggcgactacgccaagggcgaggtcatcgaaggcctggccgaggccgccgcgctggacggcaaggtgttccacgccggcaccgcgctgaaggatggccaggtggtcacctccggcggccgcgtgctctgtgccaccgccatcggcgagagcgtgtccgccgcccagcagcaggcctatcgcctggccgggaagatccgctggaacggctgcttctaccgcaaggacatcggctaccgtgccatcgcccgcgagcgcggcgagtcctga

SEQ ID NO: 358022 - DNA, 1947 bp, Pseudomonas aeruginosa
gtgaatttcccgcatctgttcagtcccctggaaatccggggcaaacgcctgaagaaccgcatcatgtcgagcggccacgacacctcgatgcccaccgacaaccgggtcaacgaccaattggtcgcctaccaccaggcccgcgcccgcggcggcgccgggctgatcgtgatgcaggtggcgggcgtgcacgacagcgcgcgctacacctcgcacgtactgatggccaccgacgacgcctgcattcccggctaccggcgggtcgccgaggcctgccacgccgaaggctgcctggtgctgtcgcaggtcttccatcccgggcgcgagatcatggagtccgccgacggcctgctggcggtggcctattccgcctcggcctcgcccaacgaacgcttccgggtgatgccccgcgaactcgaccagccgctgatcgacgagatcgtcgccggctacgccgccgccgcgcgccgcctgcaccaggcgggactggacggggtggaggtggttgccagccatggctatctgccggcgcaattcctcaacccgcgggtgaaccgccgcacggacggctacaacggcgacctcgacgctcgcctgcgtttcctccgcgaggtgctggcggcggtacgcgcggccaccgccgaggacttcatcgtcggcctgcgcctgtccgccgacgagcgcgaccccgagggtctcagcgaaagcgagtcgctgcaggcggccgaggcggtccagggcgagctggactacctgcacatcgtcgccggtacctcggcatccctcggcggcgccatccacatcgtgccgccgatggccatcgagccggcctacctggcccgcgaagccggtaccttcaaggcgcgcctgacgatcccgctgttcgtcaccgggcgcatcaaccagccgcaggaggccgaggtgatcctcgcccggggccaggccgacgtctgcggcatgacccgcgcgctgatctgcgacccgcagatgccgaacaaggccggggccgggcgcagcgacgacgtgcgcgcctgcatcgcctgcaaccaggcctgcatcggacatttccaccgtggctatccgatctcctgcatccagcacccggaaaccggccgcgagctgacctacgcaacgcccaatccggccgcgcggcgcaagcgcgtgctggtcgccggcggcggtccggccgggatgaaggcggcggcggtggcggcacagcgcggccatgaggtagtgctctgcgaggccggtgctcaactcggcggccaggtcaacctcgcgcaactgctgccgcgtcgtgccgaattcggcggagcctccaccaacctgcagcgggagatgcaactggccggcgtagaggtgcgccgcaacaccccggtcgaccgcgcgctggtggaacgcgagcggccggacctggtgatcgtcgccaccggcgccgaaccctattggccgcctttcgagcgtggcggcgagctgcaggtggtagatgcctggcaggtcctgcgcggcgaggtacgggccggtcgctcggtgctggtcaccgactggcggggcgactggatcggtcccggtatcgcggaaaagctggtacgcgagggccaccaggtgcgcctggcggtgaatggcacccattgcggcgagagcctgccgctgtacgtgcgcgaccagttggccggcgagctgcaccgcctgggcatcccggtgacgccctatgcccgcctgtacggctgcgacgacgccacggtgtacatgcagcacagcgccagtggcgcggcgatactgttcgaggaggtcgataccctggtgctgtgccacggccaccagccggtggatcgcctggccgatagcctggcaggcctggcggaggtggtgcgaatcggcgattgcctggcgccacgcaccgccgaggaagcgatctacgaagggctcagggccgcctggagcatctga

SEQ ID NO: 358023 - DNA, 537 bp, Pseudomonas aeruginosa
atgccctccagggcttacaatgactggccagtagccgcttcccggagcacccacgtgctgacccatctcgattcccagggccgtgccaacatggtcgacgtcacggaaaaggccgtgacctcccgtgaggccacggccgaggccgtggtgcgcatgcgcccggaaaccctgcaactgatccaggacggcggccatcccaagggcgacgtcttcgccgtggcgcggatcgccggcatccaggcggccaagcgcacccacgaactgatcccgctgtgccatccgctgctgctcaccagcgtcaaggtcgagttgcaggccgaggcgcccgacgcggtgcgcatccgcgcgcgctgccggctggccgggcagaccggggtggagatggaggcgctgaccgccgccagcgtcgccgccctgaccatctacgacatgtgcaaggcggtggatcgcggcatgctcatcgagcaggtccagctgctggagaagctcggcggcaagagcggccactaccgcaaagaggaggaagggcaggcatga

SEQ ID NO: 358024 - DNA, 1233 bp, Pseudomonas aeruginosa
atgggcaagctcaatcctcgccaggtcgagaacctggcgacccccggcacttacgaagacggcgagggcctgcgcctcgtcgtgaagccgaacgcgaagaaatattgggtgctgcgcttccagctggacggcaagcgccgggagatgggcttaggcagcttcccggacgtgggcttgaaggaagtccgcctggaggctagcgcgaagcggcgaatgctcatggacggcatagacccgctggccgcccgtgatgctgaacgtgaggcgctgcgcgccacccagcaagccgaaactgccaaggccgtgaccttcaagaccgttgccgccgactacatcgccgcccaccgcgccggctggaagaacgccaagcatgcccagcagtgggagaacaccctgaagacctacgtctatcccgtcgtgcgggatctgccagccgaggcactgacaaccgagcatgtgctgaatgtgctgtcaccgatctggaagaccaagccggagacggctgccagggtgcgaaaccgcattgagctggtgctggacgccgccaaggccagggggctgcgccagggggaaaatccggctcgctggcgtggccacctcgataagctgctgccaccccgcgccaaagttaaggcggtggagcatcaccctgccctgccctgggctgaattgccggcgttcatggccgagatcgctccgcatgacgatttcacctacaaggccatgcggatgaccatcctgaccgcctgccgcaccagcgaagtgcttggcgccagctgggacgagttcgacctgaaggccgccgtctggacgattcccgctgcgcggatgaaagccgcccgcgagcatcgcgtgccgctcagtgaagccgtactggcgattctggaaacgctgccgcgtgtcgttggcagcccctatcttttccctagcgtgcgcaaaggcaaacacctgtccaatatggcgatgctcatggccctgcgccggatggagcgagcggatatcaccgttcacggcttccgttcgactttccgcgattgggccgccgaagcgacccactaccctcgtgaagtctgtgagcaggcccttgcccatgtgcgccaagataagaccgaggccgcctatttccgtggcgacttgttcgaaaagcgccgcgccctgatggccgattgggcgacctattgcaccagcacgccggcgagtaacaacgtagtgccaatgcggagggcgaagtga

SEQ ID NO: 358025 - DNA, 876 bp, Pseudomonas aeruginosa
atggattatatttttaagacagtagagacagacaaaatagtttacgcacaagatagatatatgacttttgcaaagtcaattcttcatctcccaatatttcaatccgtgaagaatggagagcgtagaagaataagcttgcagattgatagcctctacggcttcaaaaacgttgagatgcgtttctatcctttatcagtagatttcgatttcgacgtgttctattacattctacaaaagaaaataaagtccgataagttaacgtttacgattaacctcaatcactttatgaagtttcacaaagttcacgcaagtaacaagaaggtatatatcgagaagcttaaagcctcacttgataatatgcttgatttctatttaaggttttcatatggtcctaaaacatacaaatgccatttactcactcatgttgaagagaatgaagaaaacagagaagaaattaaaattacttttagtaaattctttgagaatttctatagacacgacccagatttgatattcaacttcaaattcaatgacttcaaagaaatcaaaggggattatgcaaaagccctttatatgttctacctaaccaataaatacagtggtacggtagaattcaaggtgtctgacataataaagcgtttaaatgctgagaaatacaatagagcaaaagttatcgagagaataaagaaggctcacgatgaactaattggtatggaatttttgaagagtgttgatggtgttaaagatggcagggaattgacttgctataaagtaacattcaagaagccaagagaaggttttttaccaacggttgcagaaaaatctaaaagcaatactgatgaatcatctatctgtgatgaagcattgccattctaa

SEQ ID NO: 358026 - DNA, 1662 bp, Pseudomonas aeruginosa
atgataagagaaaaattaagcacgcagaaagataaaggagaaacacaaaacacccttggatatgctttgaagaagtcagcacttatagatagcaacagacttcaaacaggaacaacgcaagagtttatagagtttctagccaaaaaattcgataaggcttgcaaaggcaagcagcacaataccagttttcacgaaatggtatcttttgacccttccgacaaaatcaccccagaacaagccctttccatagccaaggaattgtatgaacacactcacggattaaaccgtgagcacgcttttgctgttcatacagataaaaagcacattcatgttcattttgtctgggcacccagagacttcaacaacaagatatataatcaagttgatgatttccgtatcatagagcaaaaactaacagatttagagcagaagcacggactaacacaggtaacaaatagaaagtctttaaagccagaccttgaaacacaaccaccacagaataagaaagaacaggcacttgaaaagcgtgggttaacatcaaagaaaaagcagtttaaagacgaacttaaagagttaatcaatgacagtataaacacaactgccttcttcaatattatgagcttgtccggctattcatttatacagaatgggaaaactggttattcagtagagaaagaaggtgaaacattcaaagcatcagatttgggcattcattacacagcacttaaaaagaatcttgaagaaatacaccaatttgatgagttgcttgaatattacagcaagaagccaaaagaaaaccatattgctctaattcaaacgaatgaagaaactgaatttatgaaaggtaagtataaaacaacccttcataaagattttacccagcaaagcagctccaaatcggttgaatattactataagaactcgaataacaaaaaggcttttgaatatcacaaagacccttctaaggttcagtttaatgacctttccagcaaatcaataaaagccggtttacagcgtcttactgctgacatgaagaaaccggggccgttgacttgcagcgggccagactgggcgaaaaagaaaatgtggatggagtttcacatgatgaatctggaagccaaaggattcaccttgtcaggctataaaccaaccccggcagataccaaggagcttgaaattagaaaagctgagtatgctgagaagctcaaagagtggaagaagaacgaccaacagaacccaccaaaacaagccatagaagcacctgaatctaatcagccgctacctatgcaccagggcgaacctaacctgcttaaaaacgatatagagcagcctatggcatcaggttctgacgaacctgaaaagaaggttggacaggaaagggttgatgacttcaagattttcgtaaatgaattacttgaagaatatagccactatgatgaaaaagaattacttgaaaatattcgtgatattttagaaggcaaagcaatttatgatgatgaaattttcgacaaggcaatggaaaagatagaaggtttagatgatgaaactaaaaatgcctttttagagcatatcaataagttgattgatgatggcgattcaggttcaccaattgatggagagctgaaggccgaaagcaagaaaaggaataaatataagttttaa

SEQ ID NO: 358027 - DNA, 384 bp, Pseudomonas aeruginosa
atggcaagagaaagaaaaggtgaacagttcaatataagaatatcaaaagaagcaaaagagcatataaaaaacaatgctcaactattaggtatcagccaagcaaagtatatcgaaaaactggctattgaaggttgcacaatcattgaggtaagaaacgatagatatatcgactggattgaaaacaagatgcaaccaacgataaataaactcggcagcaaccttaatcaaattgccgcagcagtaaatagcggaaactacaaaaaattagaccagaacatcgggacaataaatgatgctcgcaaaatgtttgattatctctacaagaaattttccgaatatgaagaaagggtggtgattaagaacaacaacaatggggatatatga

SEQ ID NO: 358028 - DNA, 1656 bp, Pseudomonas aeruginosa
atgcctaccgcatacgcctatatacgctactcatcaaaagcccagggcgaagccggtagggactcggtagaccgtcaaatggcttcaattcaggccatcacaaagcagcaaggtatcgagctaaggactgaaaatattttcagtgataccggcatatctggctttgatggctcaaacaaaaacaaaggaaaactcaaagaccttattgacttaatcattagtcaaaaaattcaagaaggtgattttgtctttgttgaatcaatagaccgattatctcggcaaaaaatgaggctatcaaaagaccttgtttatacgattttagaccgtggcgtgactcttgtaaccacgattgatggtcagatgtatagccgtgccaaagatggtatggagcaagatattatgctttccgtgattgctcagcgagcacacgaagaaagcaaaactaaatctattcgtcgtaaatctgcttggaatagagccaagaaattagcagatgaagaaaaggaaatttttaacggccacaatccgccttatggaatttcatttaataaagaagaaaaccgctttgaaatagtagaagaagaagcccaagaaattagagacatatttgaaagccttaaatatgttggcgtttcattgaccattaaaaagataaatgaatattcaaagcggaaatggacaaatcgcaacattaaacatcttttagacaccaaatatgttctcggctcatatatggctcaaagaagagacgaaaacaaaaagaaggtatttgaaagatatattgaaaattattaccctcaaatcgtttcatttgagttattcaatgaagcagttgcttcaatgaaaaatcgagcacatagaaagcattatggaaatcaaaccgtaggcagtttgaacattttcaggcattcaattaaatgcagtaattgcaatgcttcaatgttgtttgaaaaacaaaccaaccccaagggtgtggtatatccatacttccaatgttttacccgtaaagaattaaagaacggatgcgaccaaccacgctttcgttttgacttagcttttggtgtttttttagaattagttaaattcgcaaccacaagcagcgaaacaatcaacccaaacaattgggataatgaagccacatcagttggctcatttcataaaaccttattcaaacttttaacaagcacagaaaaagataaaaaacttgaacaaaaaatttcacatgtaaaaaatttactgcttgaacaaaagaactatcaagacaacatcaataaatcttttgaagcattcacagatggaattattccagccgctttcataaagaaagccagtgaaacagaaattaagattgaagcattagaaagagagcttgcggagcttaatattgaaagctcaacaaggaatgtttctttgatggttcattcctataacgacataattgatttatacaaaacagaagctggaagacaaaaaatcaatagtttctttacgagcaatgacattgctttcagtttttcatttagtcaaaaaaccagaatgttaagatgcaagatttactataaaggcattcatgtagatgtcatcaataaaaaatttccactccacaatcctttgaaagaattcggtattgataacctaaatcaatatttcaattaa

SEQ ID NO: 358029 - DNA, 9459 bp, Pseudomonas aeruginosa
atgccgctgagtccgaacggcaagctggagcgcaaggcgttgccggcgcctgaagcaagcgtggcgcaggcaggctacagcgcaccgcgcaacgcagtggagcgaaccctggcggaaatctggcaggacctgctgggcgtcgagcgggtcggcctggacgacaacttcttcagcctcggcggcgactcgatcgtctcgatccaggtggtcagccgtgcgcgccaggccggattgcaactgagcccgcgcgacctgttccagcaccagaacatccgcagcctggccctggcggccaaggcgggtgcggcgacggcggaacaggggccggcaagcggtgaggtggcgctggcgccggtacagcgctggttcttcgagcaggcgattcccaatcgccagcactggaaccagtctctcttgttgcaggcgcgccagccgctcgacggcgaccggctggggcgtgccctggaacgcctgcaggcgcagcacgatgccctgcgcctgcgtttccgcgaagagcgcggcgcctggcaccaggcctacgccgagcaggccggcgagccgctgtggcgccggcaggcggggtccgaggaggcgttgctggcgctttgcgaagaagcccagcgcagcctcgacctcgaacaggggccgctgctgcgtgcgctgctggtggacatggccgacggcagccagcgcctgctgctggtcatccaccacctggcggtggacggggtgtcctggcgcatcctgctggaagacctgcagcgtctctatgccgacctcgacgccgatctcgggccgcgtagcagttcctaccaggcctggagccggcacctgcacgaacaggccggcgcgcgcctggacgaactcgactactggcaggcgcaactgcacgacgctccgcatgcgctgccatgcgaaaacccgcacggcgccctggaaaaccgccatgagcgcaagctcgtcctgaccctggacgccgagcgtacccgccagttgctgcaggaggccccggcggcctaccggacccaggtcaacgacctgctgctgaccgccctggcccgcgcgacctgccgctggagcggcgacgccagcgtgctggtgcagctcgaagggcacggccgcgaggacctaggcgagactatcgacctgagccgcacggtgggctggttcaccagcctgttcccgctgcgcctgactccggccgcggacctcggcgagtcgctgaaggcgatcaaggagcaactgcgcggcgtgccggacaagggcgtcggctacggcctgctgcgctacctggctggagaggaggctgcggcccgcctggccgcgctgccgcagccgcggatcaccttcaactacctgggccggttcgaccgccagttcgacgaagcggcgctgctgctaccggccgcggaaagcgccggcgccgcccaggatccgtgcgccccgctggccaactggttgagcatcgaaggccaggtctacggcggcgagctgagcctgcactggagcttcagccgggaaatgttcgccgaggcgaccgtccagcgcctggtcgatgactacgcgcgggagctgcgggcgctgatcgagcattgctgccaggacggcaaccttggcgccacgccctcggacttccccctcgcggcgctgcgccaggagcaactggatcgcctgccgctggcgcagatcgaggatatctacccgctgtcgccgatgcagcacggcatgctgttccactcgctctacgagcaggccagcggcgactacctgaaccagctccgggtcgacgtctgcggactcgatcccgcgcgtttccgtgcggcctggcaggcggccgtcgaccgccacgatatcctgcgcgccggcttcctctggcagggcgacctggagcagccgctccaggtgatccacaagcgcctcgaactgcccttcgccgagcacgactggcgcggccgcgaggggctcgccgaggccctcgacgaactggccgcgagcgaacgccagcgtggcttcgacctggagcgggcgcccttgctgcgactggtgctggtacgcagcgacgaagacagctaccacctgatctacacccaccaccacatcctgctggacggctggagcagcgcgcagttgctcggcgaggtactcgctcgctacgccggcgagcccgggcaggagatgggcgggcgctaccgcgactacatcgcttggctacaggcgcaggacaagggcgccagcgaggcgttctggaaagagcaactggcggaactgctggagccgacccgcctggcccaggcggtcgccgccgagcgcgagcaggtcggcggcggccagttccagcgcagcctgacgccggcacgcaccgcgcgcctgaaggcattcgcccagcggcacgcagtgaccctcaataccctggtgcaggcagcctggtcgctgctgctgcagcgctacaccggccaggacaccgtggtcttcggcgccaccgtcgccgggcggcccgccgagctggccgggatcgagcggcagatcggcctgtttatcaacaccctgccggtggtcgccacgccgcagccgggcatgcgcctggccgactggctgcaggaggtgcaggcgcgcagcctggcgctgcgcgagcaggagcacacgccgctgttcgagatccagcgttgggccgggctcggcgaggcgctgttcgacagcctgctggtattcgagaactacccggtggccgaagccctggaaaagggctcgccaggcggcgtgcgtttcggcccggtgagcaaccatgaacagaccaactacccgctgactgtcgccctgggcgtcggcgaccgtctgtcgctgcaatacagctatgaccgccaggcgttttccgatgccgcggtcgagcagctggaccggcacctgctgaacctgctcgaaggcttcgtcgacaacgccgaacggacgctggtcgagctgagcctgctggatgccgaggaacgcgtgctgatcgattcgctgtggaaccgcagcgagtcgggcttccccgcttcgccgctgatccaccagcgggtggcggagcgcgcgcgcctggcgccggacgcgccggcggtgctgttcgacgaccaggtgctgagcttcgccgagctggacagccgggccaaccgcctggcacacgcgctgatcgcccgcggcgtcgggcccgaggtgcgggtggcgatcgccatgcagcgcagcgcggagatcatgattgccttcctcgccgtgctgaagtccggcggcgcctacgtgcccctggacatcgagtacccgcgcgaacgcctgctgtacatgatgcaggacagccgcgcgcacctgctgctgacccagagccacttgctcgagcggttgccgatccccaccggcctggcctgcctatccctggaccgcgaggaggagtgggccggcttccccgcccatgatccagaggtggcgctgcacggcgacaacctggcctacgtgatctacacctccggctccaccggcatgcccaagggcgtggcggtgtcccacggcccgctggccgcgcacatcgtggccaccggcgagcgctacgagatgaccccggcggactgcgagctgcacttcatgtcgttcgccttcgacggctcccatgaaggctggatgcacccgctgatcaacggcgcgcgggtgctgatccgcgacgatagcctgtggctgccggagcagacctacgcgcagatgcatcgccacggcgtcaccgtcgcggtgttcccgccggtctacctgcagcaactggccgaacatgccgaacgcgacggcaaccctccggcggcccgggtctactgcttcggcggcgacgcggtggcgcaggccagctacgacctggcctggcgcgcgctacgcccgcaatacctgttcaacggctacggaccgaccgaaacggtggtcaccccactgctctggaaagcccgcccggacgacgcctgcggcgccgcctacatgccgatcggcacgttgctgggcaatcgcagcggctacatcctcgatgcccagctgaacctgctgccggtcggcgtggccggcgagctgtacctgggcggggaaggcgtggcgcgcggttacctggagcgtccggcgctgaccgccgagcgtttcgtgccggatcccttcggcgcgcccggcagccgcctgtaccgcagcggcgacctgacccgcggccgcgccgatggcgtggtggactacctgggccgggtcgaccaccaggtgaagattcgcggcttccggatcgaactgggcgagatcgaggcgcgcctgcgcgagcagacggcggtgcgcgaggcggtggtggtcgcccaggccggcgccagcggccagcaactggtcggctacgtggtcccgcaggatccggcgctggtcgaggatgtcggtgcccaggcggcctgccgcgacgccttgcgcaaggcgctgaaggaacgcttgcccgagtacatgctgccggcgcacctgctgttcctgccgcgcatgccgctgacccccaacggcaagctggatcgcaagggcctgcccaagcccagcgccgaccagcagcaacgcgactaccaggccccgcgcagcgaagtggaaaggcaactggcgacgatctgggcggatgtgctgaagctggagcaggtcggcctggccgacaacttcctcgagatcggcggcgattccatcatttccctgcaggtggtcagccgtgcgcgccagctcggcatccatttcactccgaagatgctcttcgaggcgcagaccatcggtgccctggccccgctggccgagagcggtacgcaggtgctggctatcgaccagggaccggtgaccggcgtcacgccgttgctgccgatccagcagggtttcttcgccgaagaggtcgccgagcgccactggtggaaccagtcggtactcctggaagcccgcgagccgctcgatgcccggcaccttgagcaggccctgcggggtgtgctggcgcaccacgatgcgctgcgcctgtccttcacccgcgaggcggccggctggacggcgcgccaccggggtgtggaagagggcgctgcggcgctgctccgcgttgctcgggtcgctgacctggcggcgctgcgggcgctggccgacgaagtccagcgcagtctcgacctggccgatgggccgttgttgcgcgccctgctggcgactttcgacgatggcagccagcgcctgctgctggttatccaccatctggtggtggatggtgtgtcctggcggattctcttcgaagacctgcagactgcctaccggcagttgctggcgggtcaggccgtcgagctaccggccaagaccagcgccttcagggattgggccgagcgcctgcgggcgttcgccggtgacggcggcctggatggtgaactggcgtactggcaagggcaattgcaaggcgcctccagcgacctgccgtgcctcgacccgcagggcgaacagagcaaccgccatgcccgttcggtcgtttgtgcactggacgccgaggcgacccggcaattgctgcaggaggcaccggccgcctaccgcacccaggtcaacgacctgctgttgaccgcgctggcgcgggtggtctgccgctggaccgggcaggccgatgcgctgatccagctggaggggcatggccgcgaggagctgttcgccgagatcgacctgacgcgcacggtgggctggttcaccagcctgttcccgctgcgcctgaccccggccgagggcatcgccgcgtcgatcaagggcatcaaggagcaactgcgcgcggtgccgaacaagggcatcggcttcggcgccctgcgctacctgggcagcgcggcgagccaggcggccctggccgggttgccggtgccgcgcatcaccttcaactacctcggccagttcgacggcagcttcgccatggaggagggcgcgctgttcgttccggccggcgagcgcgccggcgacgaccagagcccggacgcgccgctggccaactggctggcgctgaacggacgcatctatggcggcgagctgcgcatcgactggagcttcagcggcgagcgcttcgaaaccgccagcatccagcgcctggccgacgcctatcgcgacgaactgctggcgctgatcgcccactgccgcgtggccgagggccagggcctgacgccctcggacttcccgctggcgcgccttgaccaggcgcgtctcgatcagttgccgctggcgccctgcgaagtcgaggacctctacccgctatcgccgatgcagcagggcatgctgttccacagcctgtaccagcaggaggccggcgattacatcaaccaattgcgggtggacgtcgacggtctgcatccggagagtttccgcgcggcctggcaggcggcgctggacgagcacgatgtgttgcgcagcgggttcctctggcagggcgccttcgagacgccgctgcaagtggtgcgcaagcgtgtcgaagtgccgttcagcgtactcgactggcgcggtcgcgaggacctggcggcggctctcgacgaactggccgccggcgaaggccggctgggcttcgacctgagcgaggcgccgctgctgcgcctggtgctggtgcggatcgacgagcggcgccatcacctgatctacaccaaccaccacatcctgatggacggctggagcaactcgcagctgctcggcgaggtactgcagcgctaccgtggcgaaacgccgccgcgctccggcggccgctaccgcgactacatcgcctggctgcaacgccaggacgccgcgctcgccgaggccttctggctgccgcgcctgcgtcggctggacgagccgacccgcctggggcagtcgatcgcccaggccaagcgacgcggcaagggctacgcggaactgtcgcgcgaactcgatggcgagcagacccggcgcctggccgaactggcccgcgagcagaaggtcacgctcaataccctggtccaggccgcctggctgatgttgctgcaacgctataccggacaggacagcgtggcctttggcgccactgtcgccggccgcccggcggaactgaacgggatcgaggagcagatcggcctgttcatcaacaccctgccggtcatcgctaccccgcttccgcagcagagcctggcgtcctggctgcaggcggtacagggcgagaacctggccctgcgcgaattcgaacacacgccgctgtacgacatccagcgctgggccgggcagggcggcgaggcgctgttcgacaatatcctggtgttcgagaactaccccgtttcgcagatgctccagcagcaggcctcgcaaggtctggccttcggcaccgtgggcaaccacgagcagaccaactatccgctgaccctcagtgtgagcctgggacagtgtctggaattgcagttcgcctacgaccgcgagcatttcgacgatgccggcgtggagcgcctggatcgccacctgacacacttgctggcgcagatggtcgagcgtccggccagcacctgcctggccgagttccagctgctggaagcggcggagcagcgccaggcgatcttcgactgggggcgcaacccgggacgctatccggacgagcgcagcgtcgagcagttgttcgccagccgcgcggcgatggagcccgagcgggtggcattgctcttcgaggagcgccagctgagctacggcgagctcaacgcccaggccaaccgcctggcccaccgcctgatcgaactgggcgtgggaccggacgtgctggtggggatcgccgtcgagcgcgggctggaaatgatcgtcagcctgctggcggtgctcaaggccggcggcgcctacgtgccgctggacccggaatatccgcaggagcgcctcggctacatgatcgaggacagcggcatcgccctgttgctcagccagagccacctgctgcaacgcctgccagcggccgccgggatcgcctgcctggcgctcgaccgggcacgggactggcaggaccgtccggcgcgcgacccgcagtcgcgggcgcatccgcagaacctcgcctacgtgatgttcacctccggctccaccggccggcccaagggcgtcggcatcagccgagagagcctgtcgcggcatacccacgtgtcgctggagttcttcggcatcgggccggacgaccgggtgctgcaattctccaccttcaatttcgacggcttcgtcgagcagctctacccaccgctcgcctgcggcgcctcggtggtgctgcgcggcaccgagatctgggacagcgagacgctgtaccgggagatcgtcgagcgacgcatcaccacggtggacctgaccaccgcctactggaacatgctggccaaggacttcgccaaccagggcgtgcgcgactacggcgcgctccgtcaggtccacgccgggggcgaggcgatgccaccggaaagcctgttggcatggaaggccgccgggctggagcatgtgcgcctgctcaacacctacggtcccaccgaggcgaccgtcaccgtcaccaccctggattgcgcgccctacgtcgatggcagcatggcgatcccggcgaccatgccgatcggcaaggtgctgccgggccgcgccatctacctgctggacgatgccggacaaccgacgccggtcggtgcggtcggcgagctggtgatcggcgccgagctgctggcgcgcggctatttcaagcgtcccgacctgacggccgcacgcttcattcccgatccgttcgacgagcagggcggcggccgcctgtaccgcaccggcgacctggcacgctacggcgccgacggggtgatcgaatacgtcggtcgggtcgaccatcaagtcaaggtccgtggcttccgcatcgaactgggcgagatcgaggcctgcctcggcgagcacccggcgctgcgcgaggccctggtcatcgccgtcgagggcgctgccggggcgcaactggtggcgtatctggtgccgcaagcggaagcgctggctagcgccacgctggaggtacaggccgcgctgcgcaacgagctgaaggcgctgctgcgcgacagccttcccgagtacatggtgccggcgcacctgctgttcctcgaacgcctgccgctgagccccaacggcaaggtcgaccgcaaggcgctgccggcgcccgacgccagtctcctccaggaagcctacgtggcgccgcgcagcgagctggaatgccaggtcgcggcgatctggcaggaggtgctgaagctccagcgggttggcctcgacgaccatttcttcgaactcggcgggcactcgctgctggccatcaacgtgatttcgcgcattcaactggagctgggcatgaagctcaccccccaactgttgttccaattcccgaccctggggcttttcgtcagcaatctggaaaaggccggtgggcaggtcgacacatcgaaactgaacaagctggaagccctgcttgatgaaatggaggaagtctga

SEQ ID NO: 358030 - DNA, 306 bp, Pseudomonas aeruginosa
atgcaaaaggtagcggagacgctcacgtttcgctatgtggctcaacgctatttcatcgacgtcgtgccaacgaaaagccctacaacacagaaggacaacgcccgcgagctcaagcaactgctggcgttcttcgatgacccacctgcagccatcggggatatcgagccgaagcacatcaagcagtacctgatcttccggcggtcggcgccggttcgcgcaaaccgggaaatctcgcttttctcggccatctggaactacgcgcgcgagatgggctacaccaaactggccacccgtgctcagacgtga

SEQ ID NO: 358031 - DNA, 318 bp, Pseudomonas aeruginosa; identical to SEQ ID NO: 346379

SEQ ID NO: 358032 - DNA, 867 bp, Pseudomonas aeruginosa; identical to SEQ ID NO: 323751

SEQ ID NO: 358033 - DNA, 738 bp, Pseudomonas aeruginosa; identical to SEQ ID NO: 323750

SEQ ID NO: 358034 - DNA, 285 bp, Pseudomonas aeruginosa
atgatcggccggtccgggtcgccctcgaggaaactgacgatcacctcctggccgatccgcgggatctggatcgagccccagttcttcccggcccaggcctgggatacgcgcatccagcaggagctgttctcgttcgactggtcgtggcggtcccagtggaagtgcaccttgacccggccgtactggtcggtccagatctcctcgcccttgggcccgaccaccaccgcggtctgcggaccgcgcaccaccggcaccggcgtcagcggcaacggccggaacggctga

SEQ ID NO: 358035 - DNA, 996 bp, Pseudomonas aeruginosa
atggcttgcaagaagctcaaatttccgggccgcgacgtcgtgctcgagtattacatcgggtgcggcgatgcgctgccggcggagaatgactggcgccgtttcgggtcgctccgcacgaaggaatacaccgtcgagtgggacaccatcgacgcgactgattccgactcggttggcgcactgcgggagaacctggccagtttccagacgctgaccatttccggtgacggtaccgtgaaggcctccggtgccggcgcgcagaacctgatcgacctgacgaagcatgtcgtgaagccggacgcgaccggcggacagcctgttgtctggatgcgcatgaccttcccggacctgaccttcaccgcattcatgctcatcagcaacctcagtcgctccgcgccgtacgacgatgtcaccacctacagcttcgaggcttcggcgaccgcttccgacttcggcctgatcgtcgaggatacccccgacgcggatgcgccggacccgaccagcattcaggtcgtgccggagaccctctcgcttaccgttggcgaaggcttcaacttcgagggcgtcgtgctgcctgttggcgctccgcaaggcctgcgctggacttccagtgcgccgaccgtggccgcggtgaacgcggttaccggcgaggtgagcgcgctgtcggccggcaccgccacgatcaccgctgcttccagcgtcgccccgggcgtcaccgataccgcaactgtcacggttgtcccgctggtgcagggcattaccgtctcgccgacctccgtctcgatcgccgaaggcgccactcagcaactaaccgccgctgtatccccgactggtgcggctcccggcttggtctacgaaagcgcggcgccggcgattgccaccgtgagctcgaccggcctggtgaccggtgttgatgtcggtaccaccacggtgaaaatcaccagtgcggcgcggccgtcggtgagcgtgacagttccggtaaccgtcactgcgccgtga

SEQ ID NO: 358036 - DNA, 618 bp, Pseudomonas aeruginosa
gtgatcctcaccgagatcggtgagataggcgtacacacggcctcgggggagttctttctcctgcggccgtccctgtacgccatgacccagctcggtacgccggccgagattgtcgacgtcttcgcgcgcgtcatgagtgacccgatcactgagaagcatcaggctgaccagttcgccgacgccctagccgtggtggtggcctgtagtgagcaggacctgtccgacgtgtttggctactacgaccaggacctggtctaccggccaggaactgcggacgtcgagcaccttgtgcctctcgcgcgctgcctgctgaagcacggcgtcactggggcgcttccgccgctcccccggcgccacgacgaagagccgaactactcgggggaattcgttgcgcgggagtacgtcgctacggcgatagcgcacctggggctgagcgagcgcgaagcctggtccatgaccatgaccggcctgattggcgccctgcgcgcgaaataccccccaaccgaatcgaacgctccgggcgccagagccccgaccgcggcagagcatgacgcgacgatggagtggttcgacaagatcgaggccaagcgcaaggcgcgggcgaaaggagcaccctga

SEQ ID NO: 358037 - DNA, 786 bp, Pseudomonas aeruginosa
atgaccaacaccacttcattgtctgagctgcaaacctcggcagttgccaagccgcggcagaacttcgcggtcagcatgaccaacctcgaaggcttcgaactggcccagcgctgcgccaagttgctcgccagctcgacgctggtgcccaaggaataccagggcaacttgtccaactgcgtgatcgccttgaacatggcgcagcgcattggcgccgacccgctccaggtgatgcagaacctggtgatcgtccacggtcgaccgacttggtccagccagttcctgatcgccaccgtcaacaccagtggtcgtttctcggcactgcgcttcgagttcttcggcgagcaaggtaccgacacctggggttgccgagcctgggcggtcgagcgcgcaaccaacgagaagctggtcggcgccgatatcaccatcgcgatcgccaaggccgagggctggtacggcaagaacggcagcaaatggaagacgatgcctcagcaaatgctgatgtatcgcgccggctcctggtggacgcgggcctttgctccggaactctccatgggcctgcaaacggccgacgaggtaggcgacgtctacgacgcgcagcaggatgccggtggcagctttgctgtaaacgtgaacgacctgcgagacctgtcgccaggcacgaaaagcagccccgcagcagccgaagaaaccccgccggacggcgtgaacaccgagacgggcgaaatcaccgaacccgccccgggccagcagccggacaccggcgccgacgaactcaatctcgagtaa

SEQ ID NO: 358038 - DNA, 243 bp, Pseudomonas aeruginosa
atgctcgcccgatgccacgacaaagggcatcgacagttcaaggactacggtggtcgtggcatcgcagtccacccgccctggctgaagtttgaagccttcttcgcagacatgggcgcacggccggaaggcacaaccctggatcgccgcgacaacgacggcaactacgagccggccaactgctgctggtccacccgcaccgaacagaaccgaaatcgtcgcaaaccgcaaaggaccccatcatga

SEQ ID NO: 358039 - DNA, 492 bp, Pseudomonas aeruginosa
atggcgacggctcttgagcgcttctatgcctccggcggagaagaccagcagttcgccacgatcgagttgtcatgcccggcgtggccggagcctattctcatctgccagggctatgacgacctaacctgcatgaccgaagacgggcgcctgctgacgttcattgccggagcgatcgacgtatcgattccgaagcgagacaacagcggaaaccagaacgtcggattcgcaatcgacaacgtgaccggattcgcccagcagcgtatcaacgaagccctggaggctggcgagtatgtgaccctgatcctgcggatgtacctggagagcgatctcacagcgcccgctgagcggccataccgcatgagggtcaagacgccgggtttcgagggtctcactgctcaggtcgaggccggttactacgacatcatcaacaccgccgcgctgcgccacatctacaacgtcagcgagttctccggactcaaatactggccttga

SEQ ID NO: 358040 - DNA, 399 bp, Pseudomonas aeruginosa
atgaaggacgtgaaggcggatccggaccagaacccgctggatctgaatggcggcgacggcgacatggaagaccccggcgcctggggcggtatgcaaccagcagacgacagcgacgtcgtagatgccgagttccaagaactgccgcaactcaccgtcgagcgcttcgccggccacaccctgggcgagatcgccatcggcgtcgccaccaagaaggacgtgttcgacgcggcctggctgcaatcgcgcttcgctctcaccaccgaggaagccgagcgcgtcgttctccaactgctggaccagggcgtcatcgtgctcgagcaggaaaacgaggaatcccgcgagttgaacacttaccgtgtagtcaagaagccgggggatatcgccctcgacctggagtga

SEQ ID NO: 358041 - DNA, 1776 bp, Pseudomonas aeruginosa
gtgcccgcccatcgtcgcctgacccaggcggtgcatgccgagggcggcaagatcctgctgcagatcctccacgccgggcgctatggctaccacccgatggcggtgtccgcctcgccgttgaagtcgccgatcagttggttcaccccgcgcgaactctccgagcgtggcatccgcaagaccatccgcgccttcgtccgttgcgcgcggctggccaaggccgccgcctacgacggcgtggaagtgatgggcagcgaaggctacctgctcaaccagttcctctgcccgcgcaccaaccgccgcgacgaccagtggggcggcccgctggaaaaccgcatgcgcctggcgctggagatcgtccgcggcatccggcggatcgtcggcgaacgcttcatcctctgctatcgcctgtcgctgctcgacctggtcgagggcggcaatacctgggacgaagtacggcgcatcgccctggccctggaggaagccggcatcaccctgctcaacaccggtatcggctggcacgagtcgcgcgtgccgaccatcgtcacctcggtgccgcgcgcggccttcgccgaggtcagcgcacggctgcgccacgaactgaaggtgccggtgatcgccagcaaccggatcaacaccccggaggtcgccgaatccctgctcgccgccggcaaggccgacctggtatcgatggcccggccgttgctggccgacccgcagttcgtggccaaggccggtgccggccgggccgaggagatcaacacctgcatcgcctgcaaccaggcctgcctcgatcatgccttcgccaaccgccgcgccacctgcctggtcaacccgcgggcggccttcgagaccgagttgcgctaccgcaaggcgcgcacgcagaagcgcatcgcggtgatcggcgccggccccgccgggctctccgccgcctgcgtggccgccgagcgcgggcatcgggtcagcctgttcgaggcgagcggggaaatcggcgggcagttcaacctggccaagcggattcccggcaaggaagagttccgcgaaaccctgcgctacttccgcgtgcgcctggaacgcctcggcgtcgacctgcgcctcggccaccgggtgcgccagggcgagctggacggtcagttcgacgacgtggtggtggccaccggcatccagccacgccggccaaggatcgacggcatcggcggaccgaccgtactcagctacgtggacgtgctgcgcggcgcgccggtgggcgcgcgggtcgccatcgtcggcgccggcggcatcggcttcgacgtcgccgccttcctcgtcgccgcacccagcgacggccagccgcgggcgctcggcgaatggctcgcggaatggggcgtggacctcgacaacagccagcccggcggcctccgcgaacccgctccgacgcagccggcgcgccaggtctggctgctccagcgcaagcccggcgcccccggcgcgcagctcggcaagaccagcggctgggtgcaccgcgcgcacctcaggcacaacgccgtgcgcatgctcggcggggtggagtacctgaagatcgacgaacgcggcttgttgatccgcgtcgacggcgaggaacgctggctggaggtggagaacgtggtgatctgcgccggccaggagccgctgcgcgagttgcagatcagccaggcggcggaaagcctgcgcttccacctgatcggcggggcgcgggtggcgggggaactggatgccaagcgggcaattcgcgagggggccatgctggcggcgcgcttgtag

SEQ ID NO: 358042 - DNA, 429 bp, Pseudomonas aeruginosa; identical to SEQ ID NO: 325604

SEQ ID NO: 358043 - DNA, 681 bp, Pseudomonas aeruginosa
atggattcaaagttagcgcaagcgcaggcagcagccaaagagctaaagcagttcattgcagagctaaaggacaaacgaattcaagcattgggcgtcaaggaaaggctacaggaagaaaaaaatcttctgttaagtcagccactaaataaagatgacctaaagcagttcattgccacttatgtagatgcgcgtgcggaagcgtttccaaaattggcaaaacttggcgacaccttttcccgcatggccaatccctcgcgtggagcctcagcttatgtgcggggaaaggctttgaacctgcgggatgtcaattcatttcctggaaagacaccggaagaagtcagaagcttctttggcggcaatcttgagtttttccctggtcacttgattacggggtctgacatagcggcttgctatttcttcggagacgttatcaagactaaaatgttcgaggcttttgacggtctgttttctggctatgcgttaccggcagaacggcaagacgtgggaacgtcaattgaagagcggcgagcacgaatctctgatattgaccgagaagttgaagggctggaggagcaagtcgcggcaatagatcaacaactgtcagggcttggcgttgtcgagccggaatcgcgcaagcctctggttggtgtacctttcgtgcgaggtagcgcgcatggctaa

SEQ ID NO: 358044 - DNA, 675 bp, Pseudomonas aeruginosa; identical to SEQ ID NO: 337022

SEQ ID NO: 358045 - DNA, 1086 bp, Pseudomonas aeruginosa; identical to SEQ ID NO: 325453

SEQ ID NO: 358046 - DNA, 891 bp, Pseudomonas aeruginosa
atgaaaggggttcgtcgcccaatcctgcgctaccacggaggcaagtggaaacttgctccctggatcatccagcacctggcgccacatcacacttacgtcgagcccttcggcggcgcagcctccgtcctgctccggaaagcccgcagctacgccgagatctataacgacctcgacggggacgtggtgaacctgttccgcgtcgcgcgggatcacggtgaggaactgcgccaggccctggcgcttaccccgtttgcccgggaagagttcgaagccagctacgcggaaacgtccgatccgctcgagcgcgcgcggcggatggttatccgaagcttgcaaggtttcggtaccgcagctgcgtccggcgaacgtacagggttccgctcaacctcgaccagatccggtaccggacctgcactggactggcgcaactaccccgacacgctgaccgcgataacagaacgcctgcagggcgtggtgattgagaaccgcgacgccctcgcgctgatggagtatcacgaccggccgaatacgctgcactacgtggatccgccctatgtccactcgacccgcagcacgaaggtgcgccacaacgccaccggcaagtcgtaccggtacgaaatggacgacaaccagcacaaggagctggcggcactcctcaaacggctgcgcggcatggtggtgctctccggatatccctgccccctctacgacgagctctacagcacctggcacagagtcgaccgccacgcctatgcagacggctccagagagcgaatcgaatgcctctggctcaacagcgcagcgcttgaggggttggcacaactggacttcttccaggccagtaatgcgtctccatcgccctcattccagaccacggccgctcattactga

SEQ ID NO: 358047 - DNA, 234 bp, Pseudomonas aeruginosa; identical to SEQ ID NO: 323737

SEQ ID NO: 358048 - DNA, 228 bp, Pseudomonas aeruginosa
atggggactcctgctccggccatgcccgctccgggcttggctggttcgcgtctacaagagcccgcaaagaatctcagcgcgacgctgaagaacaaccagaacttctacctggtcgacgaccccagccgcatcggtgatgtgatggcgggtcgttacggcgacgaagcaatggttctgcacatcagccgcgacccgcagaaattccgtcaactactgggaatcaactga

SEQ ID NO: 358049 - DNA, 177 bp, Pseudomonas aeruginosa
atggttcgccaggcgtgcctggtcttggcttgcgaatcgcgaatccaggcttttctggatctggttgagcagcagcttgccgccgcccgcgcaggcaccgaggaaggtcagcagcagagtgatcaactgccacagttccagctcgaccttcattccctattccccttgttccagtag

SEQ ID NO: 358050 - DNA, 225 bp, Pseudomonas aeruginosa
atgctcaatgcccaggccctggcagagccgatccacctcggcgaggaggtaccgtttctcctgctcgacgtgcagcgctgccaggattgccatgagctgctctggcttcttcagccaggcgaccttggccacgccgaacatctgcttggcgatcttgtcggcgtaactccagggcagcctcatctcagccaactgcgcctcgatgacctggacctcggcgggtag

SEQ ID NO: 358051 - DNA, 171 bp, Pseudomonas aeruginosa
atgatcgagttgcacttgctggactgctcggccgggcaatggggctacaagaccattccggagaaagcaggcccgttctactacggctgtccgctggagttcctggacctggctcacgatgagaccaaccaggagtggcgagaccgtctgacgcaagaacaccaagcctga

SEQ ID NO: 358052 - DNA, 153 bp, Pseudomonas aeruginosa; identical to SEQ ID NO: 340999

SEQ ID NO: 358053 - DNA, 1578 bp, Pseudomonas aeruginosa
atggccgtaccccttgccgcagctgctaacaatcctgatggtggcgctacctcagcgtttgatgaccggggggcgtaccttaagtccctgacccctgagattgtgattgcgctttgtgggcccatgggaacgccgttgcacgaagtcggaaagacatttcaagatttactccgaggaactgactttggatacgtagatgtaaaaattctacgccttagcgaccagattcgacgattgaagaagttagagcatgaaaaatcaatagatcggctcatcgaagctggcaacgaactccgacgtgaatacggaaatgcggtgcttgctaagctagcgattcaagagatcctgatatcgagggcggagcatcaggaggcgcaaaacgctgagttgcgaggcaatgatcctgatgcagcattagatcctgatgtttcaatgcctcgagccccaagaaagtgttgccacatcatagactcaataaaaaatatcgatgagctcgcacttttaagatcggtctacggtgacatgctacatgtaataggcgtttactcgcctatcgaaatgcgagttgagcgaattgcacgtatcaaaggccctgatgatgaagtacataagctcatagacagagactcaggtgaggaagtgaaatacggtcagagtgtcgaagatacgtttccgcgctgcgacttttttcttcgggttgactctgctacagactcgcaacgcaatacaagggtaaggcgatttcttgaactgatgctcgggacgaggattatcacgcccactataaatgagcgagcgatgtacgcggcctattcagctgcacgcaattctgcatgcctatctcgacaagtaggcgcggcgatcacaaatgcggagggtgaaattcttgcttcgggttggaacgacgttcctaaagcatttggcgggctttaccataccgtcgatcagaattcatcaactgacgatgatcgtaggtgttggaatattgaaggtggtcggtgcttcaacgatgacgagaaaactaccattgcaaatgcgatggccgatcgcttgatagcaaccgggctggtggaggagtccaacagggcgcgcgcgtttgaaatgcttagaaaagattctcagctgaaaagtttgattgagttttcgcgcgcagtgcacgctgaaatgcacgcccttttaactgctggagaaaccaagggtggacagatcaggaatggcaaactgtttgttaccacctacccatgtcactcttgcgccaggcatttggtggctgcgggcgtcaaagaggtctactttcttgaaccctacaggaaaagcttggcgactagattgcattctgactccattactgagcgggaaagcgacgattcgaaggtacgcttgatgccctttgacggggtcgcgccctctagatttctacgattcttttcagcacaccccgggggtaggaaggatcagaaggggatcatgcatgttcatgaggcttctcccgtgacatccatcacccttgaggctatacatacgcttgaagctttcaccttaagagcattagaatccgccggcttgaacaaacggtga

SEQ ID NO: 358054 - DNA, 1188 bp, Pseudomonas aeruginosa
atgggtagaggcgggaggggagttcgggcggtctccgatacgagcatcgaaatcacgttcatgtatcggggtgtccggtgccgcgagcggatcacactcaagcccaccgccactaacatgaaaaaagccgaacagcataaggcagcgattgaacacgcgatatcgatcggcacctttgactactcggtgacctttccgaggtctgcccgggcggcaaaatttgctccggaggccagccgggaaacattgaatgggttcttgaccaggtggcttgaagcgaaacgtaagcacatcgcgagcagcacgtatgacggctatcgcaagctggtagtgctgcgcctgatcccagccctgggcgaccatatgctggtcgatctgaagcgcaagacggtgcgcgactggctgaacactctgcaggtcggcaacaagacgctgagcaatatccagagctgtctgcgatccgcgctcaacgacgcggcggaagaagagttgatcgatatcaatccgcttgctggctggacatactcccggaaagaagcgccaccgaaggaagatgatgttgatccgttcagtccggaggagcagcaggcagtactgggtgtcctctcggggcaagcccgcaacatgatgcagttcgccctatggacaggcttgcgcaccagcgagttggttgccttagactggggcgacatcgactggctgcgcgaggaggtaacggtgaatcgcgctatgacccaggccgcaaaaggtaaggccgaagcgacaaagaccgcatcgggccgccgtagtgtgaagctgctgcgcccggcgatggcagcattgaaggcgcagaaagcccacacctttctcgccgatgccgaggtgttccagaatccgagaacgttgcagcgctgggcaggggatggcccgatcaggaagacgatgtgggtcccggccatgaaaaaggccggcgttcgttaccgccggccttatcaaacacgccacacatatgcgtcgatgatgctatctgcaggtgagcatcctatgtgggtcgccaaacagatgggccacaccgactggacgatgattgcaagagtgtacggcaggtggatgcctgccgcagatacgaacacaggtcaaaaagctgagcttctatgggcccctgccgccgatcatgaagccattagccgtggaagcgaacactcctaa

SEQ ID NO: 358055 - DNA, 366 bp, Pseudomonas aeruginosa
atggaatttcgccacttaggcaatggacagactttccctccagtagcaccgaacggccggatttacgccgtacctgtgacccaggaaaaccaagtagaaattttctgtctgacagctgcagggattgttggaagcggcgttacggcgaactgggctgagatcttgggcttcagttacgacgacgagtcctgggaaatcatcctgcgcaattacgtcgggaggggaatgcgtttccgtcggggtgtgccctgcggaatcgtcgaagacggctgcgaaactctcaaaacccatatccaagggttcccaattccagtttgcgtaatgaaccgcatcgcatacgagcagaaaaaactgcagcagacctga

SEQ ID NO: 358056 - DNA, 837 bp, Pseudomonas aeruginosa
atgggtaacaaatcaacaacgatccgaatcggcttgctggccgcgacagtagctcttctggttgggtgttctggcacccagggggctaggactgtgcagcttcctgagccgaaggatgtaccgagggaaaaatggtcggatgctatgcgtgttctgaccgccatggggatttccgggcagcgagacgttcctatcgaacttgtgggggcagttgatggggcgagcccagccggcggctctggagcagtactcggggatgctggattaagcgcggttagcttcgcgtcgccacctacggggctgagtggtggagcagcagcgggagttggtttgggtctaatgctgttgggcggatcaagcgatccggcgcgcgcaactcagattgtcgcgtgggtaccccctgaccaggcaggctcgccggacgtggcatctgctcttgcattgcgtaaggtcgaagacgctcgtaagaaggtttttgccaatggcctatcgaagctgccaatgcagacaggtaaatatcctgatggtcatgcccgcagctatgcatccttggcagatagctacgcagaacggccgattccatacagtgatgaggtttctaaatcgccgagctttctgaggtcgccactcagctacgggccgatcttcatccgtgacaaccagttcacgctcgatgcctacaagaacgacattacgacttcggaagccatgcagcttgtttcgcaatatctgcctgagtggatctacatctaccaccctggccagcggctgaggaaaaactcgacccctgcggcaatcttcaatcagggcagggcgttcaacttcgtagggaaataa

SEQ ID NO: 358057 - DNA, 345 bp, Pseudomonas aeruginosa
atgagcaaagttaagtgccagtgctgcaagaagattatggttccaaaggtggtcactagcgcgccgttctacatcaatggaatacccgtgggcggccgtgacccggagtcgtccgtatgccccttctgcctgtcgcagaagtggatgctcaccgaacaccaggctctggctgccggcaaggccaatgccgagttccacggcatcatggtacttgccttggtgaatatcgttgcgttcgcccgtttcggcgaactggcgggcagtatgacgcttacggtgtcagtcgcaagctttctcctgcgcgccagaattatcagggtattgctacggcatctgggccgttag

SEQ ID NO: 358058 - DNA, 1977 bp, Pseudomonas aeruginosa
gtgaacacggaaaatcattcccagacggccgcgtttctatggtccattgccgatctgctgcgcggtgacttcaaacaatcgcaatacggtcgcatcatcctgccattcaccctgttacggcgcatggagtgcgtgctcgcaccgaccaaggatgaggtgatcaaacaaaccttcgctcaggaaggccgtccggacaccgtgcgcgagatgattttgttgcgcactgccggccagcagttcttcaacgcctcgccgctgacccttggcacgctgtccgacacccagaccgccgccgacctgatgagttacgtgcaggcgttcagtaaagacgcccgcgagattttcgagcacttccattttgaagatttcgttcagcaacttcagggcgcgaacctgctgtatcaagtggtgcagcgcttcgccgccaccgatctgagccccgcgttcatcagcaacttcggcatgggcatcatcttcgaagagctgatccgcaagttcgcggaaagctccaacgaaaccgccggggagcacttcaccccgcgagacatcgtgcacctcaccacctcgatggtgatcaccgatcaggaccacaagctcgcgcccaacaacatcgtcaccatctatgacccaacggccggtaccggcggctttctgtccgagggcgatgagtacatccagtccatcagcgacaaggtcagcgtgtcgctgcacggccaggagctcaaccccgaatcctatgccatctgcaaggcggacatgctgatcaagggccaggacgtgaccagcatcaagctcggtaacaccctctccaacgaccagttggccggcaagcgcttcgactttatgctcagcaacccgccgttcggtgttgaatggaagaaggtgcaaaagcagatcaccgatgagcacagccacaagggcttcgacggccgcttcggcccgggcctgccacgggtgtccgacggctcgctgctgttcctcctgcatttggtcagcaaaatgcgtgaccctcgcgatggtggctcgcgcataggcatcatcctcaacggctcgccgctgtttaccggtggcgcgggctcgggtgagtcggaaattcgccgctacttgctgcagaacgatctgatcgaagcaatagtcgcactgccgacggacatgttctacaacaccggcatcgccacctacgtgtggatactcagtaaccacaaagccgccgcgcgccagggcaatgtgcagttaatcgacggcagccatcactacgccaaaatgcgcaaatcattgggcagcaagcgccagtacatcaccgaagctcaaatcagcgagctggtgcacctgtatggcagcttcgagcacagcgcgcagagcaagatcttccccatcgacgccttcggctaccgccgtatcaccgtcgaacgaccgctgcgcctaaacttccaaaccagcgccgagcgcatagctaaagtgctggaagaaaaagccctgcagaaacttgacagcgccgctcaacagcacctgctggacgccctgcatgcggtggacgccagcgtgttgcatcgcaaccgcgagcagttcagcaagctgctgaaaaaagccctcacggtgcacggcgtcagcctcagcgcgccggaactcaaagctctgatgagcgctctgagcgagcgcgaccccgaggcggatatctgcatgaccaagggccagccggaagcggacgccggcctgcgtgataacgagaacgtgccgctgggcgagtcggtttacgactacttccagcgcgaagtcattccccatgtgccagatgcctggatcgacgagagcaaaaccgacgcgctggacggtgaggtcggtattgtcggtttcgagattccttttaaccgccacttctatgtattccagccaccgcgccctctggccgagatcgatagcgacctgaaaacctgcaccgaccgtatcaagcagatgatcgaggggctgtcggcatga

SEQ ID NO: 358059 - DNA, 1368 bp, Pseudomonas aeruginosa
atgagtttttctgcgtatccggggtacaagcattccggggttgagctgcttggcgagtttccagatcactggacgctgaagcgattcaagaatgtttttttggaaaggaccgagcggagttcagatggagctgaggaacttttgtcagtctccgcgtatttcgggataaagccacggtctgagacgctggatgaaagcgatcatctatctcgcgcggagtctcttgaagggtacaaagtgtgccaggcaggtgaccttgttattaacatcatgcttgcctggagtcggggacttggtttttcttggcagagaggaattgtcagccctgcgtactgcgttttttatgtgacggatgggtctgtacctaagtttcttgattacctggtgcgttcagatgagtgcattaggtatttcaaaacacactccgctgggattatggattctcggttaaggctttatccagaatcttttggacgactcttcaccgcaattccacctaatagcgaacaaacccaaatcgcccgcttcctcgaccacgaaaccgcacgcatcgatgctctgatcgaagagcagaagcgcctgatcgaattgctcaaggaaaagcgccaggccgtgatctcccaagccgtcaccaaaggcctcgaacccagggtgtcgatgaaagactccggcatagactggctaggcgaggtgccggcgcattggggcgtgaaggctttgcgttatctgggtgagtgccaaaacggcatcaacatcggaggagaggcttttgggtcgggttccccttttgtaagttatggtgatgtgtataagaacgacgtattacctgctgaagttacggggcttgttcaatcatcacctgaagaccaacagcgttattcgattgagtacggggatgtatttttcacccgaacatcggaaacagttgacgagataggcttcagtgccacctgccttcaagatcttccaagtgctgttttcgctggatttctcattcgatttaggccgactggaaagtctctaacgcctggtttttcgaaatattatttccgcaatcaaggactacgtattttcttcaacaaggaaatgaatttggttaccagagcgtctttaagtcaggatttattgaagctactgcctgtaaccattccccctgtagttgaacaaataaaaatctctgactttctagataaagtcactgcggaattcgcttctttgctgcagcaaggaatcaaggctattgatctgctaaaagaacgccgctccgccctaatctccgccgcagtcaccggcaaaatcgacgtacgcagctggcagctaccgaccagctcccaagcccccgaattagcagtagcagaggccgtataa

SEQ ID NO: 358060 - DNA, 3201 bp, Pseudomonas aeruginosa
atggcggacagcaaggaagcgcaattccagcaggacatcatcgacgccctggccgcccaaggctggctagtcggcacggccagcggctacgaccggcgtacggcgctgtataccgaggacatgctgggctatttcaaaggcgcttggcctgagcgttgggacaagttcgccaaggccaacccgaacaactcggacgatgtgctggtacaaaagctggtgcgcgagctggagcagagcggcaccctggatgtgctgcgccatggcttcaagttgccggcggtgaaggtggaactgtgcagttttcagccggaccacggcatgaacccagacaccctcaagcgctaccagtgcaaccgcctacgagtggtgccggaggtgtcctactcgccccatgcgcgtgaggctggctgcagtgggcagagctacaacccacggctggatctggtgctattcgtcaacggcatccccaccgccacgctggagctgaaaagcgagttcaagcaatcggtggaaaacgccaagcgccagtaccgttacgaccgcccggtaaaagacccgctgacgcgcaagctcgagccgctgctgaccttcaagcgcggcgcgctggtgcacttcgccgtgggccagaatgaagtggcgatgaccaccaagctggcgggtaaggacaccttcttcctgccgttcaacctcggcagcgcggaaggcggcgcgggcaacccgatgccagatgacgaaagccagtacgccaccagctacctgtggcaacgcctgctgcagccggatgcctggctcaaggtgctagggcgctttctgcacctggacaagaaaaccagcgaaggtttcgacggcacaccggtaacgaaggagacgatgatcttcccgcgttaccaccagtgggaagtggtcaaccagttgatcaacaccacccgcgctgaagggccgggcaagcgttacttgatccagcacagcgccggctcgggcaagtccaactccatcgcttggacggctcaccagttggcctcgctgtacgacgatgcaggccagcgtctgttcaactcggtgattgtggtcaccgaccgcacggtgctggatagccagttgcagaacaccatttaccagttcgagcacgcccagggcgtggtcaaaccgatcagccgcgatgttggcaaccagagcaaatccgaacaactggccgatgcgctggctgagcagacgcgcatcatcatcgtcaccatccagaccttccccgcgctgttcgatgccctggacaagtaccccaagctggccagcgggcgctatgcggtgatcgccgacgaggcgcactcctcgcagaccggctcatcggccagcaagctgaaaaaaattctcggcagcgatgccctcgatgccgaggaagtcagcgtcgaagagctactggacgccgccgtgcaggctcgccaaccgaatgaacgcatcagctactacgcctttaccgccacgcccaaggccaagaccctggagctgttcggccgcccggtcgacccaacgctgcctgccagctccagcaacaagccggaggcgtttcacctgtactccatgcgccaggccatcgaggagggttttatcctcgacgtgctgcgcaactacaccacctacagcaccgcctggaaaatcgcccacccggatggcgaagacgatgaggtggacagcaagaaggcgcgcatcaagctggcacgctgggtgcgtttgcatccgtacaacatcagccagaaggtcgaggtgatcgttgagcacttccgcgccaatatccgtggcctgctgaatggccaggccaaggctatggtggtgaccagcagccgtcaggaagcggtgcgttaccagttggcagttaaggcttacgtgcagcagatgggttacaacgatgtgcacccgctggtggctttctccggcagcgtgttgccggatgaggtgatccccgaagaggtgacggaaagcagcagcttgctcaatgccggcttgaatggccgcgacctggcgcaggcgttcgacacccaggacttcaacgtgatgatcgccgccaacaagtaccagaccggcttcgatcagcccaagctgtgcgccatgtatgtggacaaaaagctgcaaggcgtggactgcgtgcagaccctttcgcggctgaaccgcacctttggtgacagcaaggaaaccttcatcctcgacttcttcaacgagccgcaggacatcctcgacgccttcttgccgtactacaccaaggccgagctgaccgacgtgaccgacccgcagatcatctatgacctgcagaagaagctggatgccgagggcatctatcactggcaggaggtcgaggcgttcgctatggccttcttcgaccccaaggcggccgccagcaagctcagctactactgcacgccggccaaggagcgctttgccaagcgttatgccttctccgttgagtcgcgccagcaggcgctggacttcaaacgcaccgccgaggccaatggcgacagcgccggtctgaaaaaggccgagcacgcattgaaagaggccggcgagcaggtggaccagctcgacctgttccgcaagaacctgcagagctttgtgcgcctgtatgagttcctctcgcaaatcgtgccttatgaagaccgcgagctggagcagctgtgcgtgtatgccaagcacctgcacccgctgctgcgcgtggatcgcctgcaacaagacgatgtggacgtgggcgagctgcaactgagccactaccgcctgagcaagcgagctgagcaccagctgcggctgagtgagggggaaggcgaattcaagctaaagccgggtagcgatgtgggcagcggtaagccgcatgacccggagaagaagcgcctgtcggaaatcatcgacgcgctgaacgatatcttcggtgccgaggtgagcgatgacgaccaactgcagttcctcaccggtatcgcccagcgcatcagccgtcaggaagatgtgatggctcaggtgaacaaccactcggtagagcaagtaatgcacggcctgttccccaagcgcgtgctggataccgtgttggacgccatgaccgaccacgagaagctgtcgctggaagtgctggataacgagaccaagagccgggcgtttgcgctagtgattttaaaaatgatcaagaccgcagtggcttttgatgagcgccgcgtaggcggggcctaa

SEQ ID NO: 358061 - DNA, 1584 bp, Pseudomonas aeruginosa
gtgccctccctggccgacgccttgcgcatgctcaagaaccaggccgaacgcacgcccagcccccagtgggtgcgggtggtcggcggctggaacgagttccagttcgccgagaagcgcatgccgaccctggaggaattgaacaaggccgcgccggacaccccggtgttcgtcctccacctgtacgatcgcgccctgctcaaccgcgccgccctgcgcgtggtcggctacaccaaggacacgcccaacccgcccggcggcgagatcgtccgcgacagcagcggcgaacccaccggcatgctgatcgcccggcccaacgcgatgattctctacgccaccctggccaagggaccgaagctgccgctggagtaccaggtcaactccacccgccagttcatgcgcgaactcaaccgcctcggcctgaccagcgcgatcgacgccggcggcggctttcagaactacccggacgactaccaggtgattcgcgaactggccgaccagggccagctcaccgtacgcatcgcctacaacctgttcacccagaaaccgaaggaagaactcgccgacttcaagaactggaccggcagcgtcaagtacggccagggcagcgatttcttccgccacaacggcgccggcgagatgctagtgttctccgccgccgacttcgaggacttcctcgaaccgcgcccggacctgccgcagaccatggagcaggagctggagccggtggtccgccacctggtggagcagcgctggccgttccgcctgcacgccacctacgacgaatcgatctcgcggatgctcgacgtgttcgagaaggtcgaccgcgacattccgttcaacggcctgccctggttcttcgaccacgccgagaccatcaccccgcgcaacatcgagcgggtgcgggcactcggcggcggcatcgcgatccaggaccgcatggccttccagggcgagtacttcgtcgaccgctacggtgccaaggccgccgaggccacgccgccgatccagcgcatgctcgccgagggcgtgccggtgggtgccggcaccgacgccacccgggtctccagctacaacccctggacctcgctgtactggctggtcagcggccgcaccgtcggcggcatggccctgtatccgcagggcctgccgcgggaaaccgcgttgcagctgttcacccacggcagcgcctggttctccagcgagcagggcaagaaaggacagatcaaggttggccagctcgccgacctggcggcgctgtcggcggacttcttcggcgtcgaggaagaggccatcaagtggatcgagtcggtgctcacggtggtcgacggcaaggtcgtctatgccgccgccgagttcgacaagctcggtccgccggcgccgccggtgctgccggactggtcgccggtggccaaggtacccggccactggcggcaaggcgcgccgctgaccgcccaggtccaccagtgcgtcggtgcctgcgcggtacacgcccacgagcacaaccgcgcgcgccactccaacgtaccggtgagcgacttccagggtttctggggcgcattcggctgttcctgcttcgctttctga

SEQ ID NO: 358062 - DNA, 255 bp, Pseudomonas aeruginosa; identical to SEQ ID NO: 327978

SEQ ID NO: 358063 - DNA, 1599 bp, Pseudomonas aeruginosa; identical to SEQ ID NO: 347357

SEQ ID NO: 358064 - DNA, 741 bp, Pseudomonas aeruginosa
gtgcgcttgcgttcaatccggctgggcgggatggcgcacgggggcgctcgaccgttaccgcgaggcggagcctggcgacgatttcgtacgcggtgcccgagaccgcgatggagacctgacgtcggggcgaacgacgccaccggcgccattcgccatggtcgggtcaaccggaacgtcgagcggctaccaggcgctgctgcaggcgcgtcaggaaggccacttcgaaggcggtcttctgcatcggtgtgggcaggctgtcgcggccgaaggcgaaggcggtccagagctggccttcgatctggtcggcaagccagttctcggcctggcggacgcccttgtcgatggcgggctgggcgggaaccggccagagcagggagagaccgggttgccggtcggcgggggaatctcgaccatcaggtccttgtagcgttcgatgattgcgtcgacgtgggtcttttccttttcatccttcgtcatgctgggtactccgtttctgagagtcacatgacctgccgccttcgctgtcaatcgatggaggcaggatcgcgcagggttgacagaccgggaaacggaaccggcagaccacgagggtctccccacgcgatccgccatgaaggcccgcagttggaaaactgcggtcgagccgatgcctgcaaaagcattcgctgctttcgcatgcaccgctcggcgcatcgcgccgtctcttcgggctgtcaaacccggtcacggatttggccgtga

SEQ ID NO: 358065 - DNA, 324 bp, Pseudomonas aeruginosa
atgcgtcaaagggacctgaaattcaccttcgtcgtcggcgaagggaaactcgcgttcgatgtcgtcgagttcgaactggaagaagcgctctgcgagcctttccgcctgaacctgaagctggccagcgacaagaacgccatcgatttcaggcaggtactcgaccagccgggcaccttcaccctctggcaggacggccgtccggcccgctacgtccatggcatcgtcagccacttcacccagggcagctcgggttttcgccggacccgctacgaactgctgctggaaccgcagttggcgcgcctggagctgtgctgcaactggtga

SEQ ID NO: 358066 - DNA, 417 bp, Pseudomonas aeruginosa
atgaaaccgcacctgatctactacgtcgccaccagcctggacggcttcatcgcccgtcccgacggtagcgtcgactggctcgaccgtttcgccgagggcggcaacgaccatggctacaacggcttctaccagggcatcgacgggctgctgatgggccgcggcacctacgatatcgtgcgcgaacagggctgccggcgggtctggctggccggcggcggcagcctcgccggtagttgcctggcggccgggctgctcgacgaggtgatcgtcagcgtcattccgcagctgctcggcgccggcatcccgctgttcgccggcggctgcgagcggcgcctgcaactgctggaacaacatggctacaacagcggcatcgtacagatgcgctaccaggtgatcgccgaggacgacccgcaatga

SEQ ID NO: 358067 - DNA, 639 bp, Pseudomonas aeruginosa; identical to SEQ ID NO: 342287

SEQ ID NO: 358068 - DNA, 1542 bp, Pseudomonas aeruginosa
atgaaaattcgttcgcaagtcggcatggtgctgaacctcgacaaatgcatcggttgccacacctgctcgatcacctgcaagaacgtctggaccagccgcgaaggcatggagtacgcctggttcaacaacgtcgagaccaagcccgggatcggctacccgaaggaatgggaaaaccaggagaagtggaagggcggctgggtgcgcgcggcagacggttcgatccgcccgcgcatcggcggcaagttccgcgtgctggcgaacatcttcgccaacccggacctgcccgagatcgacgactactacgaaccgttcgacttcgactaccagcacctgcataccgcgcccaaggccgagcaccagccggtggcgcgcccgcgctcgctggtctccgggcagcgcatggagaagatcgagtggggcccgaactgggaggagatcctcggcaccgagttcgccaagcggcgcaaggacaagaacttcgaccaggtccaggcggacatctacggtgagtacgagaacaccttcatgatgtacctgccgcgcctctgcgagcactgcctgaacccggcgtgcgtggcgtcctgcccgagcggggcgatctacaagcgcgaggaggacggcatcgtcctgatcgaccaggacaagtgccgcggctggcggatgtgcatctccggctgcccgtacaagaagatctacttcaactggaagagcggcaagtccgagaagtgcatcttctgctacccgcgcatcgaggccggccagcccaccgtctgctcggagacctgcgtcgggcgcatccgctacctcggcgtgctgctctacgacgccgaccgcatccacgaagtggccagttgcgagaacgagcgcgagctgtacgagaagcaactggagatcttcctcgatccgttcgacccggcggtgatcgcccaggcgcgcaaggacggggtggccgacagcgtcatcgaggcggcgcagaagtcgccggtgtacaagctggcgatggactggaagctggccctgccgctgcacccggaataccgcacgctgccgatggtctggtacgtgccgccgctgtcgccgatccagaacgccgccgccgaggggcacatcggcagcgacggggtgatcccggacgtcgagtcgctgcgcatccccgtgcagtacctggccaacctgctcaccgccggcgacaccgcgccggtgctgctggcgctcaagcgcctgctggcgatgcgcgcctacaagcgcgccgagcacgtcgaaggccgccaggacctggaggtgctggccaaggtcgggttgagcgtggagcaggtggaggagatgtaccgctacctggccatcgccaactacgaggatcgcttcgtgatccccagcgcgcaccgcgaggaagcgctttccgatgccttcgccgagcgttccggctgtggcttcagcttcggcaacggctgttccggcggcagcaactccgccgtcaacctgttcggcggcaagccgaccaaccgccgcgacgtgatccaggtcgtgcagatccaggagtga

SEQ ID NO: 358069 - DNA, 663 bp, Pseudomonas aeruginosa
  misc_feature (308)..(315): n is a, c, g, or t
atgagaaagtctcggtcgggcgtcgtgttttttggtgatgcggcccgcatcactctgccaggtcctgacctcggcaccggtggcgaactgggtgtttccagtggaaacactctgccaaggatcgacctcggcgccgccggcgaattgggtggctccactggaaccacttcactaggaaccaacctcggcgccggcggcgagctgggtgttgccactggcaacactccgccaggaccaggcctcggcgccgtcgacgagctgggtggtgccactggcaccacttcaccaggatccggcctcggcgccgnnnnnnnngggtggtgccactggcaccacttcaccaggatccggcctcggcgccggcggcgagttgggtggtgccactggcaccacttcaccaggatccagcctcggcgccgtcgacgagctgggtggtgccactggcaccacttcaccaggatccggcctcggcgccgtcgacgagctgggtggtgccactggcaccacttcaccaggatccggcctcggcgccgtcgacgagctgggtggtgccactggcaccacttcaccaggatccggcctcggcgccggcggcgagctgggtggtgccactggcaccacttcaccaggatccggcctcggcgccgccgacaagctgggtga

SEQ ID NO: 358070 - DNA, 255 bp, Pseudomonas aeruginosa
gtgagttttcagctgtccgtctggaaacggatcgacagaaacgctgtactctcgacctccctctacgcgatacctatatccgagctcaagcccctgatcatcaaggatcagactgacctccaacaaaggctccattgtccagcgctccgtatcgttgatgtgcgatggagtcacaagctgggcctgctcaatccaagcatgatcatcttttacggctacgacctgctcaagctgtacgggtgtcggaaccattag

SEQ ID NO: 358071 - DNA, 1443 bp, Pseudomonas aeruginosa
atggacgagcttcgcatcctcgttgctcggcttggttggccgtcaacgtctacaaggtggtgggccatgcaggagctggcagctaggctgggggagccaggttcgaaggctgagaccgagtccgtgcttctccaaatgctgagctcacgccagcttgaggccgaagtggtcgagatcctgtgtatcttctggatggcggtaagagcatgcggctactcccccacttccaagctggctgagagcacttcgaggtcatccatcctttcggacctcgttctggaaagctgtggtctgttgccagagggcgacgacgaagcgctggaggaggttcccgaggagttcgagataccccaggactttgacggcgtgcagggctcagatttgcctcggatcttccgaacttccttgggaaagcttgagagtcatactgggctgccgttcgtccggcagatggcctttgagtggacggcgaaccgcaccgcctacccagacgctccgttccaaggagacccctggcacttcctgaggcccatgggcgaaggttttgtcggacagctatcctcgcgggctgctcttcgcgccatctccgcctaccttcgcacgctggcggttgccgaagatttgtggggtatgccaacggatctggcggaagaaagggctctcttggctttacctgttcatccgaccttagccttcctccgaccactacgccctgtttggttccctgcaacaaccgacttcgacggtgacaccgaggcaatcgaagcctccctgcgagctctgattagtcgcgtagaggcagcgcgaccaagtgacgaactgatcgcgttcagttcgccaatcgtgatgtcgatcgagaggtgtgtggaggtctcgatcgttcgctggtcacaagcggcgggcagcgagatcgctgatgtggatttggctgtacatttggagaacatctggtccagcgggcggatgcttcgcagtgcggcgcctgagcctctgagcacgacgactcttttgatacccccccatcttggcagcctaatagatggaaagtgcaaggcctggccgcttgccgcgccgctcgatctcgaccgcataggctatcttcaacacgatttgtatccggggcggctattccttccaacgctccctggctgcgaccaggccgagttcaccccttgtggtgggcagttggaggtcaaggtgggcgagcaggtcatcgctgatctctgttactggaatgcgggctggggacccgcacgccccatgcagttcgaaggcaactgtggtgccgcactcatttcaagaggtacgagctatcgggaagcggggggctcaacggaaggggcggttcgctcgttctatctttggcaggtgcgaacactgcaccgagacaacacctttgacaggtttaaccaagcgctggctatgggcgctatgttcgtctag

SEQ ID NO: 358072 - DNA, 315 bp, Pseudomonas aeruginosa
atgaagatcacagctatggaacagagcaaatcggtcagtgatgtcctgtgcgacatctgcggcgatagcacgcgcgttgaagggcaaggattgcaatttggcactcttcgcgccagttggggctatggctcggctcatgatggcgagcgctatgaggtccatctgtgcgagtcctgttttttcagaacgcttttaggtctcagacgtgagcggatggtgaacttcatgttcagtgatgaagaccaagatctcagcgactttgggcgcgttgctcacgatgattttttcaatgagggtggtagctcggccacctaa

SEQ ID NO: 358073 - DNA, 492 bp, Pseudomonas aeruginosa
atgagcagtcgccgagagctgttccgccgcctcggcgggcacccgccgacgcgtcgcccgccgtggaccgccgccgacttcgccgcaggctgcacaggctgcgccgcctgcgtcgaggcctgcccggaaggcgtgctgaagctcggcgccggtcggctcgtcgaactcgacctctccagcgccggctgcacgctgtgcggggaatgcgccagccgctgcgaggccggcctgttcgatggcgcgcgcccggccttcccctggatcgccacgatcggcgaagcctgcctggccctggccgggatccactgccgcagttgccaggacgcctgcgaacccgccgcgatccgcttccgcccgggccccggcggcgtcgccctggccgagctggacagccaacgctgcaacggctgcggcgcctgcctggcgccctgtccgagccaggccatccaactgcgcgcgctatccaccaaggagtctccacgacatgcctga

SEQ ID NO: 358074 - DNA, 1200 bp, Pseudomonas aeruginosa
atgaccgacgagatgatgaacctgcgggcgcttctggagaagagcccggacaccgatctgttgcgcgagatgatcggctttgccagccagcggctgatggagctggaggttggcgcgctgaccggggcggcgtatggcgagaagaacgccgagcgcctggcgcagcgcaatggctaccgcgagcgggactggcagacgcgggctggcacggtcgagctgcgcatccccaagctacgcaagggcagctacttccccggctttctggaaccgcgccgcatggccgagaaggcgctgacggcggtgatccaagaggcgtacatccagggcatctcgacacgctcggtcgacgatctggtgcaggccatgagcggcagcgggatctccaagagccaggtctcccggctgtgcgaggagatcgacgagcgcgtccacgcgtttctggatcggccgatcgaaggcgactggccgtatctgtggatcgacgccacctacgtgaagacccgacaggccggccggatcgtgtcggtggcggtcatcgtcgctgtgggcgtcaacgccgatggccgccgcgagatcctgggcatggacatcggcccctccgaagccgagaccttctggaaggatttcctgcgcaagctcgcgcggcgcggactgcgcggcgtcaagctggtgatctccgacgaccacgccggcatcaaggcggccgtatcgaaggtgctgacggcctcctggcagcgctgccgcgtgcatttcatgcgcaacgtcctggcgcacgccggcaagagcgggcggcgcgtcgtctcggccttcatcgccaccgcgtttgcgcagaacgatgcccaggcggcgcgccagcagtggcgccacgtcgccgatcagctccgggccagcgtgcccaagctcgccgcgctgatggatcaggccgaagccgacgtgctcgcgtacatgagcttcccggccgcacaccgcgtgaagctgcacagcaccaacccgttggagcggctcaacggcgagatcaagcgcagaaccgaagtcgtcgggatcttcccgaacgaggctgcgatcacccgcctggtcggcgccatcctgcttgaacagaacgatgaatgggccgtgcagcgtgcccgctacatgacccgcgagacgatgatagaaatgctcgagccccctgccatgaatctgccagctgtggcagcctga

SEQ ID NO: 358075 - DNA, 621 bp, Pseudomonas aeruginosa
atgaccgcgttcgctgccctgtctctgttccttgccatgatcgcgctcgctgcgatgcccagttcgagtgtggccctggtggttgtccggtccgcaacgctcggggtacgccatggcgttgccaccgcactggggattgtcgtgggcgacttgctcttcgtcgttctggctattgcagggctcgtggctgcggtggaagtcctgggaagcgtcttcaccgtgctgcgctacgtcgccgcggcctatctcatctgggttggcgtgggactgatccgacgtcgcgacccgccacccaagcccagggggacgcatgagaccggcggcatctgggcaagctttgccgctggcatgatcttgacgctcggggatgtgaaggcgatcttcttctatgcggcgctgttccccgtgttcgtcgacgtttccgctctgacggcctttgatgcaagcctcatcgccgcaatcaccgtcgtcgccgtggggggcgtcaaggtcgcttacgcgatggctgcgcgtgcggtcgtttccgcgtccaaagacttgcctttcaagcggccggttcgcgtgacgacgggcgcgttgatgatcggagcgggtggatatctgctggccaaaggcgcgtga

SEQ ID NO: 358076 - DNA, 315 bp, Pseudomonas aeruginosa
gtgaacaatccgcgcttcgaagcctggcgcagccaggccggcgacgacgacctgcacctgcaggtcctcggcggcgagcgcgtgctgccgcgcaacctgcagaaactgctgctcggccgcatcgacgtgctattggaagactcgagcactacctggagcatcatccgcagctcgccggacagatccgccgcgccggcgaactacccgggcggcagccgctgcacgtcggcctcagcccgcacctgccggaggtcgacgcgcgtctcgcggaactcgacgaagggctacgccaactgcgtcgcgaaggcaccctga

SEQ ID NO: 358077 - DNA, 1110 bp, Pseudomonas aeruginosa
atgagcaagaagacgctttcggcggtggggaaaagccctgccgccttgccggccggctatgccggcatccacggcggtatcgtcgaattgctcgacgctgcacgccaggcggcggcccgcagcgtcaatgcgctgatgacggccagctattgggaaatcggccgccgcatcgtggaggccgaacaacagggcaagcggcgtgcgggctatggcgagcagttgattgcccggctgtccgccgacctgaccgcgcgcttcgggcgcgggttcagcccggacaatctggagaacatgcggcgtttcttcgccgcgtacccccggcccgtgatttccgagacagtgtctcggaaattggccctctcggaactggcacaggtgttcaagctgccgtggtcggcctacgtccggctgctgtcggtcaaggacgaccatgcccgtcagttctatgaggccgaagccctgcgcgggggctggagcgtgcgccagcttgaccggcagattggcagccagttctacgagcgcaccgcgctgtccaaggacaaggccgcgatgctggccaagggcgcggtgcccaagccggcggatgtggtcacgcccgacgacgcaatcaaagacccctatgtactggagtttctggacctcaaggacgagtattcggagtccgatcttgagcaagccttgatccggcggctggaggattttctgctggagctgggcgaagggttcaccttcgtggggcggcagcgccggttgcgcatcgaccagacctggtatcgggtggacctgctgttcttccatcgcaagctgcgctgcctggtcatcatcgacttgaagctgggcagcctgacccacgcggacgtgggccagatgcacatgtactgcaactatgccaaggagcactgggcgtaccccgatgagaatccgcccgtgggcctaatcctttgcgccgacaagggccatgcgctggcacggtacgccttggaggggttgcccaccaagatcatggcggccaactaccgaaccgtgctgccggatgccgaattgctgcaacaagagcttgagcgcacacggctcatactggagtctcgtggcacgactcgccccccttga

SEQ ID NO: 358078 - DNA, 696 bp, Pseudomonas aeruginosa
atgaatacagaacatgctcaacaaccccgactgctgacgcccgctgaactggccgcgttcatcaaattattccgcgaaatgcgccagtggtcgcaggagcagttggccgcgatttccggcctcaacgtgcgaacgatccagcgagtcgaacaaggcttgtctgccagtctcgatacccgccgcgctcttgcccgagccttcgatttcgaggacatagacgcgctcaacaaactgttcgccattccgtccgaggaagaagccaaagcggccaaggaaaagttcgaccgggagcacgtcaccctgacagcaattccgctgaccacgggcaagcagttggccaagctggcggaaacttgctcgatggacttgtcagaaccggctttcgagctgacccgagaggcagatgaaacattcgccatgctggtggactaccttcgggattaccgggactgcgccgatgcctacagcgaaacgcagaagttcgatgtgtacgacgaaatgcagtcccacatcgacgcgctcaaggcgcttggtgtctctctgcgctacgccacgcgcaaggtgcaggtgacgtggggctcagatgcagcgggcgccaagccgatgcccgtcacggtgctgtacgtggtcggtttcccgctcggcgaagaacccgagcaattcgcaacaccgaagtccggcggtatccgtctgtag

SEQ ID NO: 358079 - DNA, 507 bp, Pseudomonas aeruginosa
atgtcgcaactctctatcgccttcgattcctcgctgctggtgcgtgacgaccaggggcgctacatgcaggccaccgctgaccagattctggaagcggcccgccaggtcatcgaccagaagataccgcgcggtgcgttgttcacctcgccggaactggtcaaggactacctgcgcaccaagctggtcggcttcgagcacgaagtcttcgcggtgctgttcctcgacaccaagcatcggctgatcgagtacgcagagctgtttcacggcaccatcgatcaggcatcggtgtacccgcgcgaagtggtcaaggcggcgctgcgggtcaacgcggcggcggtggtcttctcgcacaaccacccgagcgggaaccccgagccgagccatgccgacaaggtactgacccagcggctcagggaggcgctggccatcgtggagattcgcacgctggatcacatcgtcgtcggcagcgagggcacggtgtccttcgccgaacagggtctcctgtga

SEQ ID NO: 358080 - DNA, 363 bp, Pseudomonas aeruginosa
atgaaaagagactgggacaccatccgcgatgtattgatcgaagttgaagtactggacagcgctcggcatgagaatatccagtacggccccgccagtgagagcgacgaacctcagaaggacgcgcatggcgttcttctgtggaaggctggatttatcgaaggcattgatgcgagcgatatggatggtgatgccgtcctcgcacaagggctaacgtgggctggtcatgacctgctggaaacgattcggagtaaagccgtgtgggagcgcatcaaatccacggcgaaggacaaaggcattgaactaacattcgatgcggttaaggccctgggcaaaacggcactggctgcgatcatcggcagctaa

SEQ ID NO: 358081 - DNA, 756 bp, Pseudomonas aeruginosa
atgtctgcatctacattttttgtttccaagtccgctgtacgcactctcaaacagagtgcccaacggcgtgttcgcggtgtttcttcttcccatctgagtgaaggtgttgcggcagctttgggcttcaagacccatgcggcgctgcgagctgcacttgagggacgtgcaaccgccgaagctcaaaagcctagcaatgctaagttggtgcagcgcctgcgccagctaggttatgcctcggtgcctgatgatcttcgggtgctgccagagtttgagcactcctattcccctttcaggatctttccgctcaggaaagggcgcagtgtgcgttggcacgcatggcgcaatctgctcgtggctgcgatcaatgcaggtctcgaacagcgcttgtttgggctgtcgccaggtgagaactggtggcctggcggtgcgcaggaaagccatgagtgcgaacgcagctcctaccgcttcaaagtcgatggtgagatggccgcgattgccagtgtggacgctattagtggcgacgagctttccatcagcgtcattctcaatccccgaaaaacagatattcagccggaatggtactgcggcctgactgacggggatgcggtggcgcattgctggctggagcggcgtttgggtgcgtggattcaggacggtggcgagaacttccgctgcaagcgtgtcatgcagtcatggctggcagatctgacgattgagccgaatggttattcggatcagggcagtttcttcatgtag

SEQ ID NO: 358082 - DNA, 279 bp, Pseudomonas aeruginosa
atgctcacgaagatacaactactcaaggaaggctcgtttgatctcgctattcgagccagtgcgactggcaggcaggcgttaccaccttcgcacaggcattcagggcggcggtgtgcgttgcgcacggagaacggtgtgatgcaggagacgctggcgcacctagctggcatcgagcgctcgcacagtaaggtggagcgcggcaaacatgcagcgacattggttttgatcttcaagatagccggagcactggagtgcaataccgctgcgttgatggcttag

SEQ ID NO: 358083 - DNA, 1236 bp, Pseudomonas aeruginosa
atggaaacgaccttgcccagcaacacgcgcgcgctcctggcgcgatcgcatttccccgaggagatggccgcatttgccgattggctgacggccgagcattacacgccaggctcctcacaccgccatctgacgcagttggagcaggctttgccgttgttgccccagccttcatgctcgcaggagcgcttgcaccaggcattcgccgccgtcggctctggagtacccagccggcccgaccgtttccgcagtaccgaacggctttacggcaggtttctcacggcctgcggccgtctggacatgccagggagcgacgatccattcgccggcctgcgcgcggcgtatgacgactatctgtcccgtgtccgcggcctggcggcttcctcgcgcgcgtaccaccgcgccacggtccgggatttccttgagcgcagttcctccgcgacgcaggggctaccggcgttgtctgcccaggatatcgctcagtatgttgccctgcgcagccgccagatgtcccgcgcgtccctgcaaggaacgatcggccgtctgcgtggtttcctgcgttactgccacacttacggccatctcgccagggatctcagtgtgggcatcgaagcaccgcgcctataccgtgacgagatgccgccgcaggccttggattggaacctggtgctgcaactgctgcagtcaatcgacctggacagcaagacaggacgccgcgatcactgcatcctgcacctgatggcctgctacgggctgcgcccttcggaggtcacatccctgcgcctggactcgatcgactgggatgcatctaccgtgcgcgtcgcacagcgcaagacccggtccgatctgctgctgccgctgatgcccgagacgatgcagatgcttggtgactacctggatcgcatccggcgcgcccagggcgacgctcatccgcagttgttcctgcgggtacgctgccctgacggtccgatggctagtggtgccatcacctacatcttcgagacgcgcgtgcggcagtctggattgccgatgggtgggcaccacgtctatcggcttcgacacaccttcgccatgcggctgctcaccctgggagtgggcgtcaaggccattggcgacctgcttggtcatcgcagcatcgagagcaccagcgtctatctgcggctggacaccagcatgctgcaggacgtggcactggaagtccccggaacagaactccaaggaggtcgccatgtgcagtga

SEQ ID NO: 358084 - DNA, 972 bp, Pseudomonas aeruginosa
atgtgcagtgaccttcgccttgccaactgggatgccgccgtttcggagttcctggagagccgccgcgcactgggccgagcgtacaagaaggaagagccgattctgggcagcctgcggcgctttatggcgcagcaggatgcttgcgatctcgatcaggtgctcttcgatcaatggcgtgcgcggtcaggacgccgcaacctgaacacacaggccattcatgaccagacggtcttcaagttctgccgctatcgccgtcgcaacgatcccacttgctttatgccagtcaaggaagaactggcgcggggccagcccaaggcgttgcccacgctcattgagccggagcaggtcgaacgcctgctggcgcatgtttccgcgctgcgaccgaacagcaactcgccgctgcaacctcaaaccatgcgcttggccatcgtgctgttgtacacggcgggattgcggcgaggtgagctgatccgtctgacgctgggtgatgtgcagacccggccaggcgctctttggatacgcgagtcgaagttccacaagtcgcgctgggtacctctgtcggccagcgcccaggaggaactgcaaacctatctggaggctcgccggcaggctggctgcgatctgacgccaggggcgtccttgctgtgcgctcgccgatcgcgcggctacaccggacgcagcatctaccaggctctcaagcgccacttgcgcgatgccggcattcgcgatgagcatggtaaatcgccacgcctgcatgacttccgccacagctttgccgtcgcagtattgctgcgctggtacgaggcggatgcggatgtccaggccaatctgcccaagctcgcgctctacatggggcacgtgtcgatcgcctcgaccgcgtactacctgcgctggatgccggcggtcatggagcgtgcctccgaacgattcgcgcgtgcatgtggggacgtgatgacaggaggtgcagcatga

SEQ ID NO: 358085 - DNA, 1035 bp, Pseudomonas aeruginosa
atgaagccacgccaacctaccgaacttggtcgcgaactggttcgtttcttcgaggagttcctgcccggccagcgtggcctgagtccgaacaccgtgcgcagctatcgcgacgccgtggtgctattgctgcagttcatgtcccgtgacacccagcgccccgtcgagcgactggagataacggacctgagcgccgagcgggtgctccgctttctcgacttcctggagagcgaacgcggcaacggcattgccacgcgcaatgcccggcttggcgccatccacgtcttcgcccgcttcctggcctatcggttgccgcaacatctgggcatcctgcagcgggtgatcggcctgccgttcaagcgtggcaaccgtgaacagcccatcgagtacctgcagcgcgacgagatcgaggcgttgctgcagagcatcgaccgcagcagcccactgggacgacgggactatgccttgttcgccctgatgttcaacaccggtgcgcgcgtgcaggaagtgctcgacctgcgacgctgcgacgtgcggctggaggccccgcctcaagtgcggctgcatggcaagggcagcaaggtgcggctgtgtccgctctggccagccatggtcaaggtgctgcgggccttcatcgacgagtctgccgcaatggatggaagtccagccaatgcccggctcttcgtcaatgccaggggaagttcgctcacgcgcttcggtgtgcgctacctgctgcgccgctacgtggtcagcgctgcccaggcggccccttcgctgcaagacagagacatccacccgcattcgatccggcacagcacggcgatggcactgctcaagtcgggcgtggacttcgccactatcagccagtggctgggccattccggcctgaacacgacgatgcgctatgccagagccgacctggatctcaagcggcaagccatctcccaggtgttcccggacgcactcactccgccgccgaatgcaggtcacttccgctcaaccggccgcgacctgctcggttggctgcggcggatgtga

SEQ ID NO: 358086 - DNA, 753 bp, Pseudomonas aeruginosa
atgaccgtctatttcatcggcgccggtcccggcgaccctgacctgatcaccgtcaaggggcagcgcctgatccgccagtgcccggtgatcctctacgccggctcgctggttccgcaagcgctgctcgaggggcaccaggccggccaggtggtgaacaccgccgagctggacctcgaacagatcgtcgagctactcgcgcaagcccatcgccgcggcctcgacgtagcccgcgtgcattccggcgatccctccctgtacggcgccatcggcgagcagatccgccacctgcgcgaactcggcatcccctatgagatcgtccccggggtcaccgccaccgccgcctgcgccgccctgctcggctgcgagctgaccctgcccgaagtgtcccagacgctgatcctgacccgctacgccgcacgcacgaagatgccggaaggcgagagcctgggcgacctggcgcgccaccgggcgaccctggcgatccacctgggcgtcgcccacctggcgaagatcgtcgaggaactgctgccgcactacggcgccgactgcccggtcgcggtgatccaccgggccagttggcccgaccaggaacaggttcgcggcaccctcggcgacatcctgcccaaggtcgccgccaggaatttccgccgcaccgcgctgatcctggtcggcgaggtgctggccgccgaaggcttcgccgactcttcgctgtaccgcgccgagcatcgacatctctatcgacccggcgaatga

SEQ ID NO: 358087 - DNA, 360 bp, Pseudomonas aeruginosa
gtgcatggccgaaagccccagctcctgatcgatgaccgcctcggcggccgcacactgctcaccggcggttcgctgactcagcaggcgctgtgccgcggcataccgctctgcggcctgcagccgtccctgctccagcgcctgggctgcatcccgggcccgctgttcgccggccaggcgcagctcggcaacctgccggacctgctccgccactgcggcctccaactctccctgggaggcacggcaggcagccagatccgccagggcagcatcgagctgaggccggtagtgccgcgcgccgagccagacaccgccggcggtgccgaggccgaccagcagcaggcaggccagcgcgaccgataa

SEQ ID NO: 358088 - DNA, 2709 bp, Pseudomonas aeruginosa
atgatccgcatctacccgtcaaagcttcagggcgagccgctggagacgcaccatattggccagccgatgaccattgccgcctggctgcgcgccaacgtgaagaactattcagagcgggagatccacccgatcagctttgaagtcaacggcgccctggtcccgtctgccgagtgggatcgcttcgtcatcaagcctgatgatgtggtggacgttactccagagccaaaggagcccatttcggcaactgcgctggcgatctatgcggccgttgcggtggcggcggttgcgctcgttatcacgctcatgcccaagccgcagatgaagagctctggcggcgtgacgcgcggcgatgagctcaacgaggcgtcagccaaaggcaacaaagtcaaaatcaactcgcctattcgtgaggtggcaggcaagcgccgggtttatccagactacctgctgccgccacatcgcttcttctcgtcgcctcgtgaccagtgggtggagatgctgctgtgtgtgggcaaaggcaagttcgagatcccggccagccgaatcctagtaggtgatacgccgctgatatccctgggcagcgatgcggaatacaaaatctaccagcccggccaatcgctggcgggcaatacggctgccgagtggtggcacaccgccgaggaagttggcgcgactgccaccggctccgctggcctggagctgaccgcaacctatgcggtcgagccacagccatccgccaccagctacattttcagcggcgacaccatcaccatcccgtccggtgccggctcgttcccggctggctgggcgcctggcatgatcgtccgcattgaagcgccgcgcccctatacagtcgtcgatggcggggcggatcgcgacatcattcagggcgcgctggcctggatgacccctttccctggtatggtcatcgaagtggcgggcgactatgccggcagttttgtcgttcatagctacacgccgggcgcaggcgtgcctgatgaaatcacgctcgactacccggacggttcaccggtcacggctttgccggtcggctccccctacctgacaatcggatatgccggcctgcgctatcgcctggttgcggcaagtaccacggccatcagcgtggagcgccttaccgacacaggcgggcctgacgtacaggagtggctaggcttcgacgacttcaacagcgccgatgcactcatcacactggacgcctcgacgcaagagggcgactggacgggccctttcatggcctgccccgcgaatgagctggcgagtcatatcgagtgggacgttatgttccctggcgggatcgtcggggtggacaagaaggggcgtaagttctacgtctcggttaccgtcgagatgcaataccgcgattctgcggttgcgggcgcttggacatctgttcgcaaaacctacacggccgcccaggctgaccagcttggctataccgagtcgctgcagttgccaagcatgatgcggcccgaggttcggctgcgtcggatcggcgccaagtctgacagcacgcaaatcattgatggcgttgagtggtacggtctgcgggccaagctgcaggctccgacggtatatgaaggcgtgacaaccattgccgtccgggtgaaggggggaaagcgcctagcggctcaaaccgagcagcagctatcagccgaagtcactcgagtacttccggttcggaccggggaaggcacctgggatgtcgagacgcctacgcgcgatatcgtcccgttcgtggcctacgttgcacgatccatcggctataccgatgacgacctggatttcgccgaactggatcgcctcggagccctatgggcgcagcgcggcgacacattcgacatggcgtatgagtccgcgtccacggtcaagcagatcattggccatgcgctaaaagccggctttgcggacctgaccatcgagcgggggcgcctgtccgctgcccgtgacgagatccgcgacgcgccggaacagacgttcgcgccgaaaaccgacttgtacacgccgcagaacatgaccgaggagctggagcgcgacttctccgcagtcggcccggatgacttcgacggcgtggatgtggagtacgtcgacgaaaccacctgggcggtggagaccgtcgagtgccgcctgccgggcgatatcggtcgcaaggtcgagaagctgacagcagagggcatcactagcaggacgcgcgcttggcgcctcggaatgcggcagcggatggcgcacaagcaccgccgctgggcgtatcgctgggcgaccgagcttgatgcgcttaattcgggcttcatgtcgttctgtcatgtcgcagacgacgtgccaggctacggccagagcgcgctgatgctgagctacgacaacggaatcatcgagtcgtcagagccgttcgactggtccgctggcggcgcgcatgtggttggtattcgccggccagatggcacgctttcaggtccatacgccgcgacgcgcatcgatgactataggctgtcgatcactggcttggacttcgagccagacacctcgtggagcatcgagccgccgcatcttctgtttggtccggtcaaccgctggagctatccggcgctgatcacgtcaatcagcccgagcggcacagatggggcgtcagtagaggcagtcaactacgcgcccgaagtctacacctacgacaacgccagcgcccccaactga

SEQ ID NO: 358089 - DNA, 513 bp, Pseudomonas aeruginosa
atgatcgagtatccgcgcgagtatttgccccttccgctgcgcgagggctatgccttccaggcggtgagccccatgcagcgcacggagatgcagagcggtcgagccaggcagcggcgccggtttacgtcggtgccgactatggcctcggtcgcgtggattctcgatgacgttcaggcgcagctgttcgaggcatggtttgaggatgcgctgaagtctggttctgagtggttcgagtgcccactgaaaacgccagaaggaattcgagactatgttgcccggtttaccgacatttatgccggcccggccctggtaggcgtcagccactggcgttttaccgctgagcttgaactgcgcgaacgcccgatcctggcgccgggctggggcaacttccctggcttcatcgctggatcgcggatattcgaccttgccatgaatcgtgagtggccagaatcgaaataccagacctacatgggcgcctttgacgaaggcgtaaatcaggagtggccagaatga

SEQ ID NO: 358090 - DNA, 507 bp, Pseudomonas aeruginosa
atgcagcaacatatcgaaccgcttgtgtctgttatcagtggcgagccactggcatccagccttgtgattgcgcgcggcatgaaggccaagcacaagagcgttatccaactgatccggcagcgcatcggcgcgcttgaggagttcggaagggtagcatttgaaatgcggacctttggaacgactggcggccggcagcgccgtgaggttgccatgcttaatgaacaacaggccgcactgctgatttcgctcatgcgcaacagcgaagaggtcgtggcattcaaggtgcgcttaatccgcgagttctaccgcatgcgtgatgccctgagccagcgcacccaaaacctgtatcagcagctccaagcgctggttgccgaggaagttgaaactcaggtgaaggcgtcgttcggttcccatttgatgcttgagcggaagcgggccattcctgggctcagagcgcgccgcgaacggcttgagtctgaaatccagccgtcgctacgtcttcactaa

SEQ ID NO: 358091 - DNA, 633 bp, Pseudomonas aeruginosa
atggacgctgaaagcatcatcgggcttcgggtgggcaaggtggttgttgaagcattctcccactgcgccggcaaggcttcccattgggtttgccgttgcgactgcggtaaccgagtcattatgcgccgaggaaatctgatgagaaaccgaactacgaccagttgcggttgctctcggttttctcacgggatgaccggaactccaacgtacagctcatggagcaacatgattgatcgctgtacgaatccctctaacaagcgatatgtcgactaccaaggcagaggaatcactgtttgtgaaaggtggatgacgttcgccaacttcctggctgatatgggcgaaaggccagacgccacctcccttgatcgaattgacaacgacgcaggttacttcaaggaaaactgccgctgggcaactgccttagaacagatgaataacactagaagaaacaccttcgttgagtatctaggtaggcggcaaacagtttctcagtgggcaggccagcttggtattcccgaatgcactctgcgcagccggctaaatcgtggttggtcgattgaagatgcaatgcagaagcctatcagcaagcagcgccgggagtgcaagcagaagaagggaaagcgccgtggctga

SEQ ID NO: 358092 - DNA, 483 bp, Pseudomonas aeruginosa
atgcagggacagaccggcatcgcgaagaaggtctacgagtgcgtaccgatctctgagccctggcgttcgttccaggtgctgaccgcgctccgcaacatgactggaagcacgccggacgttcggattgtccagggctgtctgcgcgatcttgtcgattccggactgatccgccgcactggtactgaccactaccaacgaatccaagtcgagaaaaagaccaagcctcaggagccgaagatgggcgaacccgcgaagaagatcgaaacccagcccgaaccgaagcgctcttcctccccgctggagatgctgggcgaactggcaaacgagctcgccggcatggccgagcacatgaagcgcctgtctgatcgaatcgaggacgtcgctctggcagtcgagcaggaacgcgaatcgaacgctaagtcgatggaaagctatcgccagctcaaagcactactgaagagcctgcaaggggagggtgagtga

SEQ ID NO: 358093 - DNA, 168 bp, Pseudomonas aeruginosa
atggagcaagagttgaagccgtgcccctattgccgaggctatgacctagagcggcgctggtgtcacgtttgcaatggccgtggcgtcgttgatgtcaaggctcaacagcgagagcgcgcagagattgtaaaggcgctgcgcgaagacggaattgaagcgagggactga

SEQ ID NO: 358094 - DNA, 189 bp, Pseudomonas aeruginosa
atgaatcatgaagttgatgttcttgtgcagcgcgccttgaacagttccgccaaagccagctcgctgatccgcaagctggcaactaactcgcctcatgcttccttggaagcgctgaaacagcatgtagcagaattgcaggttgtgcgtaacgagctggccgatcgttttggtcgaagcgcactggattaa

SEQ ID NO: 358095 - DNA, 285 bp, Pseudomonas aeruginosa
atgcaaatcttcggcgttccacttcattcgccccagcgcgcagatctgcccctcctggtggtcaccctcgctctggcaatcgcaggtagtggcttggtgatgcacttcctcgactggagtctcgctcaatccagcgggatattggtaggagcagcggcaagcgcgatcagcaccgcctgtggggttgagcttcctaagcacggctttagaggcttgctggtatttggagtgatcttgctttgcctggtcgcaaccatggcaggtatcgattacctactcagctaa

SEQ ID NO: 358096 - DNA, 237 bp, Pseudomonas aeruginosa
atgaaacgaaaaccgatggatgaggcgatttccgcactcaaggttgctccggtccagacgctgggcgccagtgttagcgctatagccttgctgtacttgttttgtacagattcagagtggtggggaaccgctgcaattgtcgccctgatcttcatgggcctgctctggatggctacaccgggcattatcgaggtagcgaacaaacgcgctaaagcgcgtcatcgctacccgtactaa

SEQ ID NO: 358097 - DNA, 141 bp, Pseudomonas aeruginosa
atggccgatccgctcgatcggcaacgtggcgtcacccagacaccgaatagcaacatttttcgtcaattgctcaccgaatcgagccggaactattatctcttcccggcagaggcgatcgatagcgcgcctctcggacgctag

SEQ ID NO: 358098 - DNA, 501 bp, Pseudomonas aeruginosa
atgattaagaaaattatacttgtaagcgtgattgctgcattgactaccggctgcacaaatctcctcaacataggggcaagtgagtacgcatgtaaaggtatgccgaacggctctacttgcatgtcggccaaggatgtctattccgccaccgagggcgatgactacaaaacccagctgaagcaagaacaagaaggcgttgaggccggcagtgataaatcaacaggtaccggcgcaacgcgcgtgcttatcgcagaaggatcggacaacgccccaatgccgatgagagcgagaaatcctcttccgatccgctcgcaggctgtagtcatgcgtatcgcaattgatccatgggaggacgagaaaggcgatctgtatgttcctggcttcatttataccgaagtggaagcgcgtcgctgggaaattggagctcgcaatccacaagcgacaccaaccctccgtcccttgacggtaataagcactagtgaagccgacaagaaaaagtga

SEQ ID NO: 358099 - DNA, 1041 bp, Pseudomonas aeruginosa
atggggatggcgactgaagagagacttctattgtctgttgctaagtttaattcgacatttcaaggcgtgggtggaattgcggagggggctccggatttcggttttatttatttgctaaaagatatctctcgattggttaggtcgatgataaaaactaccgatctagcgtttgaggttaataaatctggttctgtggttaagaagcgtctgggaacgaaattgctcaggcttattgatttaaatgtgagtgaaattgagttccgcgaggagctttatcgatttgagccgtatattgatctagcgatgcggcatatttttaagtctgaattttataggatgccgccggtgcatctagacggtttgagggggggcgatgcagagctgttcgtcaacgcattcaacaagtgcgtggagggaatgcgagcggaagcaggatctaaagagtttaaggcccgtttgaattgctatcagcgctcagagaacaaaaataaaaaagagttggacaggtacgttgatgcattgtttgatcgttattctaggttgttggtgctaagggtagatctatcttatcgtaaagaatacaaagatatctcgttagagaaggcaatatctgacagggtgcatctatttgaaaatgctagagccaataggctgtttgcggagatggtagggtttatctggaagttggaacatggacaagataagggtttccacttccatgtcatgtttttctacgacggttctaaggtgcggcaggatggttcaattgctcagcaaatagggcgctactggggtgatgttgtcacgaagggtagaggcatgtacttcaattgtaacgctgataagtggcgttacaggcgctgtggaattggcatgattgcgcatgacgattaccagttgcgtagtgggttgtgggatgccgtcgtttatctgaccaaggccgacctctatatgcagctaaagactacaaggcgtggcatgggtaaggggcacttccctggaggtaaagatgtgcgcggaaggccaagaaaatccacgtga

SEQ ID NO: 358100 - DNA, 216 bp, Pseudomonas aeruginosa
atgagcgagtgccgaaccatgaggatcttgcgtctcaaacaactgaccgaacgtatcggtctttcgcgctcgacgatatacgagcgtatcgataggaaatcccctcgctacgacgagacgttcccaaagccgataaagcttggggccgctgcgattggttggcttgagtcggaaatcaacacttggcttgaattgcggagatcaactcagcgctag

SEQ ID NO: 358101 - DNA, 321 bp, Pseudomonas aeruginosa
atgtcattgcaatgccctagctgtaactccccccaaattgcatccctgcaccctgcccagaaggtcggcgccctagtcggtacgatcagtggcgtgacgcgcggtgcgtccatggctcttgccggcagccaggccggtactgccctaaccagtccactgagtatccccctcgccacattgtccagcgccattctcggtggtttggccggaggagttggcggctgtgccctcggtgcacagctcggcgagcaactcgaccgccatgtactcgccaaaaacctctgtttgacctgtggtcatcgcttcaatctgccggcctga

SEQ ID NO: 358102 - DNA, 180 bp, Pseudomonas aeruginosa
atgctcattctcacccgcaatgtcagccaaaccatccgtatcggcgatgacatcgagatcgccattctttgcgtcaagggcaaccaggtgcgtgtcggcatcactgcgcctgcgcacatcacggtgcatcgagaggaggtctatcagcgtatccaggctgcccagggccagtcgtcctga

SEQ ID NO: 358103 - DNA, 189 bp, Pseudomonas aeruginosa
atgaatctactgcgctttttaggtctgctgttcgcactcatcagcctcttcgctggaactgcggccgtcgtgtcgttgctggttctggcgctgcgtttctggcctttgctgttggtcctcgtgctggccctgctgctgttccagtgctttatgagttggaccggcgtacgcatcaacacgccggcctga

SEQ ID NO: 358104 - DNA, 330 bp, Pseudomonas aeruginosa
atgagccctaatccctttttacgcggctacgacaagctgtccattcaactggtcgtgcatgagctgcaacctgacaacactctgcgcgaattgtcttacgtggtgcacgcccaagaccaggaacacacacgggtgctcggtgtacagccgacgttggagcaggcacaaagcatcgtgcagcgctcgagctttgataccgggcatttcagccggtgctgggagatcagtgcagagcaccttccagaggacgtggtgaaccagtgttcctcatgcgcacggagctgcacgacttacaactggagttcttcgagacatcggcgcagagcgtga

SEQ ID NO: 358105 - DNA, 279 bp, Pseudomonas aeruginosa
atgcgcacggagctgcacgacttacaactggagttcttcgagacatcggcgcagagcgtgatcggttgcaagctgcgcaatacgccctggacgggcaagcacctggcgctgctcaacatcagtccggctgacttgcgccagcggcagttggactatgggttacccgccgaactggttgaaatcctgcaccaggctgggcaggccgacgtgcgctttctgctgttcgatccggatgcgacaccactggatggattgccgagcttcaagagtgtcgcttaa

SEQ ID NO: 358106 - DNA, 210 bp, Pseudomonas aeruginosa
atggagcaacagctatgcgtcgaagaaaacctggtcgacgacagtaatagcaatgaagtgaaaatctcctgccctgacaacaacgaacgctccgtaatggcccacgcaagtaccaccgacaagcagtactcctccaataaagatgattacttcaatgtgatcgtcgatagcactatctctcttggtgctgccgggagttcttttgattga

SEQ ID NO: 358107 - DNA, 1023 bp, Pseudomonas aeruginosa
atgaaaggagcaaattttgggttgttggctgcactgatgggagcggctctcaccgggtgcggggatagcgccctagattgggacaatgcccgtatctccgggggcaaggtgtacgccggaagtgacaacgccccgttttcgggccacgttacgaacgctccggagaacgtggtgatagaggcagacagccccgagtccaagctgctaagcctgcatttcaagaatgtggagcccgccaaccgccaggaagccatgtataccgctagcctcctctgcgatgtcgatactaaggacgggatgcgcgacggaaagctggcatgccggaacaatgccggggttgttcgtctggaaggtgagttcagcgggggagttgcggatggcaaatggaccatctatgacactaaaggcaatgtcagcctgagcgctacctacgataaaggcaaaccggatggccgacttgatatcttcaaccccaatggccaaggaaagctattcagtgcaggttttaagaaaggagtagctgatggccccgccgatcgttggctaggcgatggcaatcaggtattttctaccgtgtgggacaatggcaaagagaatggcctacatcgtgaatggtgggactacggaaaactcaactttgaagtttcttacaagaacggcaagcaagacggtctaatcaaatattacaatgatgacggcagtataagtcgtactatcacaccgttcgatggtcagtatgcccggatcaccgagtatgggcccaatggtcaaattacgctgtatgaccttgaccattcaggggctcaacaccctatagccgcccagacggttcaacctcaggcgagccaggacgaagatgaggacgaatggtctacagcggtaaaacccgccaacaagcaatgtgttgatgcgtgggtagactacgtccacaagatttacggtgaagatgccatgatcggcatagagaacatgaaagattgggacagcatgtgcagcggcggccaacatccgcccacaacgtaa

SEQ ID NO: 358108 - DNA, 747 bp, Pseudomonas aeruginosa
atgcgggtcagaaacaacccggcgggaaggcttttggatcttttggaagagctacgaaatacgaatggcaatactccagtgcgtcgagtgttcgcgcacatgttcaatgcggacgaaaacgatacgggtgaggtcctaaggttgctctccgatttttccggcctcgttagggatgcaaaatctgcaacttcgcgaatcgccaatgtcgacaccagcttgtacctagcgccatatttccgcatagaggaaatgatcgggcgtattagcctcgaaaaactatggcatcaggtgaaggagccgttggacgacaaggttctgaccgaactgagattcggtgcagacctgctctccagggcagtcaatggtgcagaactggatgaagacgaggttgttaggttctttgaagagcttgacgctttgctgtgtgatgctctttcttcggacctcccggatcaactgaaacgcctgtttgttaagaatcttgagtcgattcgccatgccttgctggctttcaagatcgccggtgcagatggtcttcaagatgagcttgatgctgtgttgggttcaatcatcaggcaccgagacgagatggtgaaagccggtgatggtgggccaaaacaaaagctaatagaacggttattcgccttggttgccaacatcaacgaggctgtgacgttcagtcaaacggcagtagcgattgcgccgccagtggctctcttccttaccagcttcttagccaagggttga

SEQ ID NO: 358109 - DNA, 735 bp, Pseudomonas aeruginosa
atggaggcaaaaggtaacgctgcagagcgcttgctcaggatacttgaaggtatgaagcgcgccccgggccagacgacattggctattgcctgggccaacacattggagtgcccggatcctaaagagctatttcgctatctggctgacgtgattcaccttgcagatgaagcgcgccaggaaatttctgctttgccagaccttaaccacgagttgtttttggctccgttttccaatattgacagcctgctaagccgaaccggtttgagtcaacactggagcgattacgtggctctagtagacgaaaccacccttcttggccttcggtttgctgctgaacgtgtgagtcgagagggaaggccaacggcttatatggctggggacgaagcaaaggatttgattgccgatctcaaccaaatgctcgagcaggtgcttgcttcggaattgccaggcgacataaagcatcttttccgtcgcaacctcgaagagcttcgccatgccttgcttacctttagaatttctggggctcaaggggtagctgacgaggttgaccggacctttggttctatctcgcgccatatcgagataatcaggatggaaaccccagacgcagagaaaggccttgtggaaggggtgttcaaattcctcgatcgagttaattcggcgattagctttgcccaaaatgcaacccctctggcaccggcactgaaggggcttctggagtctctctccaggtaa

SEQ ID NO: 358110 - DNA, 570 bp, Pseudomonas aeruginosa
atgagcgacgggccttttagaagtctgcagatgcgcaagccctggaaagagctggccaaacgaggtgaccaagagacgtacgacgccgtgcaagtggcagaggccgcgaccgttgcccttgcttccgacttcaaaatggaggtctccccatacctcacgcaagagctgaaagccatttttgaaggccgtgacaactccctactgatgcctgacatcgcccttcagcaattggaggaaatgaaggctctcgctgccggttcagtgtttggaaaaaatgcagtgctatgcagcattgagctgatcgatgaaggaaaattcggagcggatgcatttcacgaagcgataggccttgccgcaaagatgcgagggctagcaaacgtgatatcggtcaaagagcactttctcagggagtcaaatcaacaacgtgcagagcatgtacataatcgcctctccaatgcgatctgcggactatcagaaattcagcttggcctgcgcctctctagcgcaggagctgttgagatgcgacaaccagggaagatgaccgggattgaagctggagtacccctgtga

SEQ ID NO: 358111 - DNA, 1374 bp, Pseudomonas aeruginosa
gtgaaaagcccaatttcgctaaaagagatggtcgtctgcgtggtcgagcctggcacccgcccacgaaaggacgcggtgccctgccgcattggaaaaaacatcaatttcgatcttgaagctctcgcttccttctcttcgcacaaatgggaaccactggtatatgacgctctagttgtagccgcggctgttgagttctgtgatcgcgcccttgcgcggagtgcaatgacttggggcaggcgcttttttgttagcattccggtccacgatctcgataaatggtcagaagttaccgtaacgaagcccctagtggatgctttgaatctgctcaccggagatgactggcatttcgagttttccgctcgcaaagctccagcagaagcgccggttcaggatcacatgaagtttcccactaacgcggaagctgtcattgcttacagtgacggcatggactcgcgcgcggtagccggcctagagagtaggcgtttaggcaaacgcttggtccgtgtcagggtaggcaataagcaacatgacatttcaaagagagaacgcttacaaattccatttacggcactcccctacgacgtaaagcttgagggacgtagaaatgctgaaagtagtgctcggagcagaggattcaaatttgccactgtatctgcaatggcggcctatctggttgacgcgccagcgatcatagttcctgaaagcgggcaaggtgccctcgcaccagcccttctcccagtcggccatgggtacgaggactatcgaaatcatccagtcttcaccaagctaatggagcgctttgtcaaagccctactcggctacccgctccaatatcagtttcctagactctggatgacgaaaggtgaaaccctgcgcgaattcgtcgatgcctacggaaatgatgcgaactgggcatccactagatcatgctggcaacagtcgcgccaagtagcagtgctaggtgcacgcagacaatgtggaatctgtgcagcatgcatactccgccgcctcagtgtccgcgccgcaggcttggaggaagtgccagagacctatacgtgggagtcactgagtacgacctcttgggaagctggagcggcaaaagacttcgacagacacacccaggccttgagagaatatgccatcgcaggggtgctccactttgaacatctctctttaattagggactctataccgtacgaactgatcaaacgcctcaggacgaacgagctagctcgtgctttggccgaggcgccgcaaactgtggcgaaaaatcttgaccggctcttgcaacaacatgccatggaatggtcagcgttcacgaacgatctgggatcagattcgttcgtgagaaagtggatagatcacgcatcatga

SEQ ID NO: 358112 - DNA, 630 bp, Pseudomonas aeruginosa
atgaccttttcaagctgcctcattaaccagaggaacgccattgtcctggatgccagcgtaatcataaatttgctggcgacgggtcatgcgaacactatcttgcaagcattagctgcccccctctatgtaaccgactacgtcgtgcgcgagattgagcaaggcgcagtgaatggcaggccagaaccagcgctgcttgctgaactgatcagtaagcaagtcttggtagtcaaagagctaacaggaaccgccttggaaaatttcttcgggttggtatccggacatacctcaagctcgcttggcgatggcgaggcggctactttagcccttgcagacagaaatggattctctgccgcaattgacgaaaagaaagctacccggatagcagaagaacgctttgaggccctaaagctcgtcacaaccgtcgatattcttgcagcaccacctgttcagggagctctgggaaaggatgctctcaccaacgcaacacttcgcgcgctacaacgagcaaggatgcaagtgagggagtatcaattcgactggattgttcaactagttgggctagaaaatgtgaaatcatatcctagcctgaggcgatataccaaaagactactacccacacttagcctttag

SEQ ID NO: 358113 - DNA, 1113 bp, Pseudomonas aeruginosa
atgttgtacccctataagaggcctcgtcatccgatgcgtgccatgcacggttttatcacttacatctttgataaggtttggtgctgtgcgccaaatgaggagtacagtcttgagttgtttaagggttttccaaacctatatgcagtcatgtatgagttgcatcgggcggatttggcaggcgaagagaagggtgcaggagctttcttttatcgctacgtcaataaaatcttcaaagagttcaagagtcttagttcagaagagttaaagttctaccgaaaggccttcagggataataatcatatccaggcgctttgcgagggtagaaaggagcccgttcgctatattgcgggtgctcagagtccactgatggacacggtagaggctttctttagtaagttgtatagctgcgggttctttagtttgaaagtggttaaggagcacatcggagcagacttacaaaagcactatagcgattttgcttatctgaacaaaatgccttgctgtcctttctgtggtcttttacccatggattccgaatatgatccgactcgggaggcttatgatcattatttgccctccagcaagtatccatttaactctgtgaatctaagaaatcttgcgccttcctgctataaatgtaattcgcaaaataagggtccaaaggatcctttgcatgatgaagctggaaataggtctaaagctttttatccatattcctctgatggttaccaagttaaggtttctatgcatttcaagtcggctgccaggctcccggcagaggaggaagagatttacatcgatctcagctgtgctgggtatgaggaggagatagcaacctgggatcggctttacaaaattcgtaagcgttacgttgctaagtgcttgtcatcttccggtgcaaaatattggttgcagcgggtgctagatgaaaataaaaattacaagcaggtttcccaagatgctttaagtaaagagctgaagcagtttgagagctttccttggcacgaaagtaactttcttaagatggcattttttgacgcttgccaagaagtagcattgattgatgtcttggtggataattctaaagtcgatcaagattgttcgagagtgtag

SEQ ID NO: 358114 - DNA, 1881 bp, Pseudomonas aeruginosa
atgaagctgctacgcctgaagatcaccgaccccaaaggctttcgtagcttgccctgtggttttgagcaccacttccgcaccgagtggagcttgcaggacgagctgacgcaagcgaacgactttgcgcccttcgtctgcgctgggctaaatggcagcggcaagtccaacttgctcgaagcactggcggcgattttctatcacatggagtgtatttatctagaaaatcttcccgacagttttcgccacgatgaagagtacaatcccaaaggcttcagaggaagcaaaagcttacctgatggtttcgaaattgaatatttaaccaagccgcaaaagctatttgaagtaagagacagcggtcataaggcaagagttctcatccaaaaagtaccggatgaatcgccaaaatggtggctactaaacgatgcagattctgacaagtccattgagataaagctggaacgcacagaattgcgtcgattgctgcctgattttgtacttggttattcatctggcgaaaacgaaatcctcagcttgcccttcttcaagatgcgtttcgtgcagttcgacgagtattggaatgcactgacccggcaactgagctaccccggccacccagaaacacgtctggcctatctggacagcggattcagccaggccatcctactgtgcaacctgctgtttcaggacgacgccacactgcagcccttccgcgaggatgtaggtatcgaggcgctacgagagttccgcatcatcctgcgccgccgaattcccatcgacacagtgcaactggaagccttcgatctcgctgatgaagatcagaagcgcgagcgacgaaatcgactacaggcggaagctcgtacacgcggactctcggagtctgagattagccaatcagttgatgattgggtgcgccgcgagatcatcaaagacaatcccgcgctctcggaaactgatgagccagggagtacccgctatcgtctgaacttgctgcagctgctggagggtgacgagacgtcctcgctggtggtgagcgccctcaagcgttgcgccacgctcagttatatcgacgacgccagcgataccctggtgctcgactactgggtgaatgaggcgacccggcaagcattccacgacaacttcgatggctcggcgctggcgctgtttcaggcgtttcaggtgctgctaacgcttaacctgtatgccgtcaacgatgttctgaagaccgatctctacacctccaccagccactatgtcagcgagacggtgcccaccttggcatccgaccagcgcgtcatgcgcttcaagttcgtgcgcttcgcgaagcagggggcggcgcaaccgatgatgctcaaggagttgtcggacggtgagcatcagttgttgcacagcctaggcttgtgtttgctattccgaaacaccaacagcctatttctgcttgatgagccggaaacccatttcaatccgcactggcgcgccagttttattacccgtgtgcgtcagtgcttttcgggtatttcggattttgtgcaagagatgctaattaccacccacacgcctttcctgatttccgacagtaagccggataaggtgttggtgtttgacaaagaccaatccaatggcgtggtcagtatcagtcagcctaaatacaatacattgggcgcatcaattaacaagattacgtatgaaactttcgacaagccagaaactattggagatggtgctaaatatttattggaccttttggttgctgactccatggggaaaacagaccctcacgggcttgcacgcaagatcatggataccattggcgactctgtggagcgcacgttagccgtgcatgctttattgcagggggcaggggccggtaaggagttggattga

SEQ ID NO: 358115 - DNA, 1233 bp, Pseudomonas aeruginosa
atgaagggagctgctggccacaagcgcgtaccggctgaattcctagagaacttcgagattccggactggcccctcgacgaccaaatccgcattgcccatctgctcagtaaagtggaagggctggtcgcccaacgcaaacaacacctgcaacaacttgacgacctgctcaagagcgtgtttctggagatgtttggagacccggtgcagaatgagaaaggttgggacaaacctgagctgagtgtctttggcaaaatttcgactggtaatacgccacctagaaatgagcctgcaaattacgatggcgatttcatcgagtggatcaagacagacaacatcacgggcgatgctgttttcgtcacgcctgccatcgagcacctttcggaggttggcgcaaaaaaggcgagaacggtcacgagcggtgccttgcttgtggcctgtatcgcgggcagcgtcgagtcaatcgggcgtgccgcattaacagacaggatggtgtcgttcaatcagcagatcaatgccatccagcccggcaaggatgtaaaccccctgtatttatatggtttgttcaagttgtctcgggcctatatacagagccacgctacgaaggggatgaagaagattctgacaaagggtgattttgagaagatcacgatgatcaagccgcctgttgaaatccagaatcaattcgctgtcgtcgcagaaaaagtcgaaggcattaaatcccgctaccaacagagcctcaccgatctcgaatccctctatggtgcattgagccagcaagccttcaagggcgaactggatttgtcgcgggtggccctacctgccttacgcatcgaaggagaaagccccgtggccgctaccgtgcccgtgcctgcgcccatcaccacgccggtgatggagctgcccgaaaccgatttactgctgcccgcactgcacgaccgcgcacagcttgcgccgctgctgcgcttctggctggaggcctatcgcacgcagctgggtggtgtggctttctccctcgaacgcttcatcgacgccgcgcaaacccggcttgccgaactgcacccggacaatgatttcgcacttggtgccagcgactacgaagccatcaaggtctgggtgttcgatgaaattcaaaatagaaagctcaaacagacccgagacattatttgtatcgacggcaggcggcaattcggtaatcagattttgttgcgtgccaggaggcacgctcagcaatga

SEQ ID NO: 358116 - DNA, 510 bp, Pseudomonas aeruginosa
atgaactcaccctctgaatcccccaagcatccagcagtcgcggagcttgatcgtgtctattccagccttgtcgttcgaacggaagaactgcgcgatgcgtttttccagacagctctttcactacacgctggaaagcctgggcacataccgatcgtgatccgtatccggcaatccagcccgaacgccgtcaccatcgaatgggcgaaagtcattttgccgaggctcaaggaaggcgaagcgaagaaaccgcgggtcatccggacaatcaacaagggcccaggaagcaagtacccggtctcgtcgttctcgttcgttaaggagccgttgaagagcatcgttcgggcctacgaaatccagctcgccgaaatccgggaagcatgctccgtcattcagcgcgtccgtcgtcagcttgtccctgctgtgaaaagggccggcgtggtcgacggctcaatttctgcgttcatgacccatgatccagtgcgcggcaaacatcgcccttcagggcggtga

SEQ ID NO: 358117 - DNA, 1053 bp, Pseudomonas aeruginosa
atgaacttcaaagatctgccaaagccagtctatgatgagacgcttgcttcttggctatttcgttgtgctaacaatcgacgttccagggcagggcaacgcttcagattggaggatcgcccaaaaacttggtgggtaggggtcgaattgaagaccgctgatgtcgatactgactttgtagctgctgaaaataaactgcgagatgcggggtatgaaacgaactccaagatattagaaaaggttttcgcgccgcaaaagaataattttgtaggctggagctttcgccggtttttttgtgcggaatgtttgcgtcaagatgtctccgaaggtcgtctgccagcttggcggaagagctggtgctatgagtacgcatctgtatgtgccatccatcggaaacaactagatatcctcgctgacccatcgcacatctccaaagcgtgggatgcttttgttcagcattgtaacagtagtaccaatcgtattcgtcgtactgatattttctttgctcgcctacgagctagcaccttaagcagaatcgctaaggcggtagaaagtggggtggagagagatcattctaatttgagtgagtcatttggcaagctaatgcatgtattcctacaagcacctttcaaaggaactcatggcggcgcagccaggatacatttccaagctgagcgtggaactcagtttgctgcaccaaattctctaatggaaagttttaccatgggggcagcgactgcggattgctccagcagaatcggtgggatagtgctagccagtttgctactgggagtcatccccgaatccagatttttagcattcgttcagtcctgcgaagtaatgaacatcaacaatatgatgccaagagacttacatcgcgctgcagcctttccccatttagataaagttggatacggcgtattgcatgattatctcggcgacataccgcggtcacggtatcctattttagatcgacacctacagttgcaggaggatcgctataagcgcgaaggggcattcgatgggcggcgctttgggttgatagagagtgcctga

SEQ ID NO: 358118 - DNA, 1068 bp, Pseudomonas aeruginosa
atgccctcctcccagccgctggtgctaacagagttggccgacagcacccgcgccgcggctgaggcattcatcgcggcaggcactgcggccaataccgtgcgtagctaccagagcgccctcacctactggtccgcgtggttgcggttgcgttatcgccgctcgctcggcgacggcgcgttaccacccgaggtcgccgtgcaattcatcgtcgaccatttggccaggcccgatacttttggtaactggacacacctgctgccgccggccgtcgatgccgcgttggtggaagccaagatcaagggcaagccggggccactgtcgttcaataccgttagccaccgcttggcggtcttggctaaatggcatcgtctgcagcactggctcaatccaagtgaagatccggcagtgaagaccctgctccgcgaagcgcgtaaggcccagacgcgtcagggcgtttccgtgcggaagaaaaccgcagtggttctggagccgctgcaggccatgctcgccacctgcaccgacggcatacggggcgtgcgcgatcgcgccctgttgctgctggcgtggagcggcggcggccggcgccgttcggaggtaatcggcctgcaagtcgaggacctgcgccgcctggatgccgagacttggctgtacgcacttggcgcgaccaagaccgacaccggcggcgtacgccgggaaaaaccgctacaggggccggcggcgcaggcgctgaacgcgtggctggaggcggcaccggccagcacgggaccactattccgccgcctgtacaagggcggccgggtcgctgcgagcgggctatcgggcgaccaggtggcgcgcattgtcaaacgtcgcgcggcactcgccggactcgacggcgactgggcggcgcacagtttgcgctcaggctttgtcaccgaggccggccgtcaaggggttccgctcggcgacgtgatggcgatgaccgagcatcagagtgtcagcacggtcatgggctattttcaggccggctcgctattgggaagccgtgccagccaactgctatcaacggagccgcccaatgagtgctag

SEQ ID NO: 358119 - DNA, 345 bp, Pseudomonas aeruginosa
atgggcgcggataccctcatcggcaacgacgtgtataacacgcaaaacgaagacttgggtgacatcaaagaaatcatgctggacaccgccagcggcaaggttgcctacgctgtactgtcgttcggcggtttcctggggatgggtgaaaagctgttcgccgtgccgtgggctgctttgcgcctggatacggtgaacaagcgcttcgtccttgatgccggcaaggaccgcctgaagaacgccccaggcttcgataaggacaactggccaaacatgagcgatccgacttggggcagaggtgtccacgactactacggcaccacgtgggaaagcgagccccggctgtga

SEQ ID NO: 358120 - DNA, 516 bp, Pseudomonas aeruginosa
atggatctgatctggcaaacaatccaggccgagtttgccgacattggggatgagcacgagattgtgcgaatcctcgtacgcctgttgatggctgccgtactgggcgcggtactgggcttcgagcgcgagcacaagggcaagtccgccggggtgcgcacgcacatgctggtttcgctgggcgcggcgctattcgtgctggcaccgagcatggccggcgccgacgaacaggcgctcagccgggtaattcagggcatcgttgccggcatcggctttctgggcgcgggcaccattctcaaaggcaatggccaggacaccagtcatgtcaaaggcctgaccacagctgccgggttatggatgacggctgccatcggtacggcagcggggatgggacgcgaagccacggcgctggtcagcacggtgctggcgctgttggtgctgggcacgatgcctttgctggtggacaaggttgaagggcagaacgaagaaaaacagaaggaggagggcaggaagcactga

SEQ ID NO: 358121 - DNA, 4110 bp, Pseudomonas aeruginosa
atgaaatcgtccagcaagcccacgctcgcctcgccgcaaaaccctgcgctaagccccagccatctggactttccagtggtgggtatcggtgcatcggccggcgggctggaggcggtccaggcgtttttccagcacgcccccgaacactgcggcatggcgttcgttgtggtgttgcacttgtcgccggaccaccagagccaggccgaccgcttgatccagcgcgtcacgcgcatgccggtgtgccaggtaagcgagccggtaccgatcgagcgtgatcacgtctatgtcatttcgccggccaaccgcctgtccaccaatgacggctacctgcgggtcagcccggccaagcgcagccgcggcgaccacgtcgccatcgacctgttcttccgcgaccttgctgatgtgcacaaggaccatgcgttctgcgtgatcctttcgggcagcggcagcgatggcgcagtgggcctgtcgcgcatcaaggaacaaggtggcgtgacccttgtgcagtcgcccgatgacgcccagtaccctgacatgcccaaggccgccatcgccaccggcatggtcgacctgatccttccggtggccgagattccgggcaagctggtggaactgtggcgctcggctcagaaggtcaaactgccggaaatcgaggatgacagcctcccgccgccgctaggcgaacgctcaggcgacccagcccaatccgacctgctcctcgacgatatcctcgcccggctgcatgccagcaccggccacgatttccagcactacaagcgcgcgacggtgctgcgccggcttgaacgtcgcctgcacgtcaccgcgcagaccgaccttgccggttaccgcgactacctcgagcggcatcctgaggagtctcgcgccctgttggcggacatgctgatcggggtcaccaacttctttcgcgaccgggacgccttcgaagcgttgcaacaacaggcgatgccggggctggccaacgacgacagcgaggatccgcagcgcgaaatacgcatctggtcggcgggttgttcatccggcgaggaagcctacagcctggcgatgatggcaaccgagcaattggcgatggagcagcgcagtgccaaggtgcaggtgttcgccaccgacctcgacgagcgcgcgatcaatgtcggtcggctgggcgtctatcccgatgccatcgccaccgatgttcccacggccaggcttcgccagttcttcatcaaggaagatcagaattaccgcgtacgcaaggacattcgcgaaaaagtgctgttcgcccggcacaacctgttgtccgatccaccgttctctcagttggacctggtggtatgccgtaacttgctcatctacctggaccgggaagtgcaacgggaaatcctgcggctgttccacttcgccctgcgcaaaggaggttacctgttcctgggcagttcggaatcagcggacgtggcggccgacctgtttattgccgtggacaagcgccatcgcatcttccgcgccagggaagtagaaccggcgcgccgcccggggcggcttcagacgcccgacacgcaagcagtgcgcgccaaacccaagcccctgcgcaagctgtcctatgctgaaatccatcaccgggcattgtccaggcgcacaccgcccagcctgatcgtcgatggcgatggcaacatcttgcacatgagtgatggcgtcggccgcttcctgcgccatgccggtggcgaagtcagccccagcctgctcaacctggtactcgcgccgctgcgccctgccctgcgcagtaccttgttgcaggcccagaacaccggccagccagtcagctcgggcgctgtgatcaccaccgtcgacgatcagcgcgtcgaagtccagttacaggtcctgccccaccaggacgaacccagtggcagcgaatgcctgctggtggttttccaggttcgcgaagctgatccccacaacccgcctgctattcagcaaaccgaaggcatggtgttgagcaccttggagcgcgaactgcagcgtacccgtcagcagttgcaggaaaccatcgagcagtcggatatctccagccaggagctgatggcctcgaacgaagaaatgcaggcggtcaacgaggagctgcgcctggccagcgaagagctggaaaccagcaaggaagagctgcaatcaatcaacgaagaattgctgacggtcaactacgagctcaagaccaaggtcgatgaaaccgacaagatcaacgactacctgagcaacctgatcgcctccacccagatcgccaccgtgttcgtcgaccgcaacctgcacattcgctggttcacccccagggccaccgatattttcagcatgctgccggtcgacactggccgctcgctgctggacatcacccatcgcctggagtacccaggcctggcggacgatgcgcgtgcggtgatcgagcgcgaaaccacgatcgagcgtgaagtgattgggcaggaccagcattggtacctggcgcgccttctgccttatcgggccagcgagcagaatgtcgatggcaccgtgctgacgttcattgatatcaccaaaagccgcgcagccgaagaacgcttgcgccaaggtgaggagcgcatgcgcctggtcgctgagagcacccatgacttcgccatcatcctgcttgacgaacagggcctgatcatcgattggaacacgggcgctgcgttgatcttcggctacgccaaggatgaagtgattggccagcactatgcgctgatcttcaccgatcaggaccgcgaagaaggcgaaccagaacgtgaactgcgtgccgctcgcctgcatggccgaggccaggacgaacgctggcatgtgcgtaaggacggcagccgcttctactgcagtggggaagtttcacgcctcaagggcagcagcctgcgcggttacgtaaagatcgcccgtgacctcactggccacaagcgcctgcaggacgaacaaagcaagcgcctggccgagtcacaaagctccagccacatgaaggacgagttcttcgcggtgatgtcccacgagctcaagcacccgttgaacctgattcagctcaatgccgatatcttgcgacgtataccatcggtcacaagtaccggcatggcgagcaaagcggtcaacgtcattcgcgaagcggtcaccagccaggcgcggatcatcgatgacttgctcgatgtagcgcgcatccgcacgggcaagctcaaactgaagacccagccggtcgatttgtgcgccgtgctgcagggtatctgctccgtagcctgcaacgagcagcgcggtcgcaaagttcggctgacgctgccggccgatggcgaaccggtctatgtggaggccgacagcacccgtgtcgagcagatcatctggaacctgctgaacaacgcactgaagttcagccctgccgatggcgaaattctgttgagacttgctcggcaggctgagcaggcgcgacttgaagtcattgatcagggcataggcctcgccaaaaactccctggaagatatttttgagctgttcaaccaggcggcacccaccggccatgggcgagaggggctaggtattggcctttccctggttcgtcaattggtagaagcccatggcggagcggtcagcgtagagtcccccggaataggccagggttgtacgttcatcatcaccctgcctttgtgcgcgtacgcccagcaaccccaggtgcagggcgaagtgctgccctcagaaggtcggctgaaaggggttcgcatcctgctggtggatgactcggtcgatgtgctggaagtgatggaacaattgctgttgatggaagatgccgacgtcgatgcctacagcgacccgaaactggcgctgcagtcggcggcagatgcgcgttacgacgtgatcatttccgacatcggcatgcctggcttggatggccatgcactgatccgggcgctacgtggcctggaacatctgcgctacatcccggccatcgctttgactgggtatggggcaagcgctgaccaatacaagtctcgccagtctggttttgaccgccacttaaacaagcccgtgggttacgacgacctgattgacgcgatcgagcgcctgaatggctcagcgtcggtttga

SEQ ID NO: 358122 - DNA, 1098 bp, Pseudomonas aeruginosa
atgaatgatcgaatcatcgaactgttcaccgacaccacattcttcggcatttccatcctcaacctgctggtagcgctgtgcgttgctgtgctgacgttcctgattgccagagctgtcatcggcctgttgatgcgcagggtgcagcgctggtccgaacatgacggggcaatcagtcaggtgctggccaaggtactggccggcaccagcaacagcctgctgctgctcgcttcgctgctggtgggtctgagcatgctggacctgcccgagcgctggttgggccgggtcagtagcttgtggttcgtggtcgctgccctgcagatcggcctctgggtcaatcgcgccatcgcgctgggcctgacccgctacttcagccggcacagcgccgacggcctttaccaaggcagtgcgctggccacgctttcggcctggggcgcgcgcgtgctgttgtggtcggtggtgttgctggccatgctgtccaatctcggcgtcaatatcaccgccttcgtggccagcctgggtgtgggcggtattgccgtcgccctggccgtgcagaacattctgggtgacctgtttgcctcattgtcgattgccgtcgataaacccttcgaagtcggcgacttcatcgtcatcggcccactggctggcacagtggaacatgttgggctgaagactacacgcatccgcagcctgggcggtgagcagatcgtcatggccaatgccagcatgatcagcagcacgatccagaactacaagcgcttgcaggaacgacgcatcgtgttcgagttcggcttgtcgtacgacacgcccaccgaggcggtaaaacaggcacccgccatcgtcgaagaggcgatcaaggcccagcagcaggtgcgtttcgaccgcgctcatttgcgcggctttggcaaagaagcgctggagttcgaatgcgtctatatcgtgagagacccgggctacaacctctacatggatattcaacaggccatcaactttcacctgctcgaacgctttacccgaatcggcgccaaatttgccgtgccagtgcgtgccatcaaggttacggcgatgccgcaccccctcgttcagtctcaggcactgtga

SEQ ID NO: 358123 - DNA, 501 bp, Pseudomonas aeruginosa
atgaacaaaccattcttgaaaatcgccggggtaaccctgttgatgggcctggcttcgctgcaggtacaggcagcgtcttcggacgacttcgtcgatgcggccactgaagccggtatcgccgaagtggtcaccgccaacctggcgcaggaaaagagccagagcgcagatatcaagcaattcgcccagcaaatggtcacagaccataccaaagccaatcaggaactcggtgatatcgcgcgcaagctggacatcagcgtgcccgacgaagcagcgctgaccgacaaggtcaagaagatgattctcgaatggcgcgaggagtcgttcgaccggtcatacgtcaataaccaggtcgacgcgcacgaaaaggccgtggagctgttcaagaaagaggtcgcctcctccgacaagccggagctgaaggccttcgccagcgacaagctgccaacgctgcaacaccatctggaacaggccaaggcactgcaagccactcacggcaagtaa

SEQ ID NO: 358124 - DNA, 1326 bp, Pseudomonas aeruginosa
atggtggcaatgacacaggcaggtaccacgaacaacaaggccagcgcagggctggaacatcgctatcgagcgttacttgtgggccctgaaccgaccagtggggcctggctggaggagcagttgggccatgctcgtctgcttgccgacgatctgccagttgatccggggctgctcctgcaatgggccgatgcccatgcatgccgtgtggcaaaagagcatgcggtctacatggaacaacggcggcagggcggggcgcgtcggtattttgccaaccgtgcccatgccttgtggttcctgcagcaagtcgcgccgaccaaggctgtcgatggcgcatggctgcatggggccctgtggcattggcaggatccacgcttccacgggctgatccgcactttcctcgaggaactcggggacggcgacccccgctgcaatcacgtgttgatctaccagcgcttgctcagtcggcttggctgcctgcaggaacgctcacttgacccagctcgctacctgcagggcgcgctgcaactggccttggggcagcattgccagcggttcctgccagaactcatcggttacaacctgggttatgaacagccgcccttgcacctgctgatcaccacgcatgagttggcagagctgggtatagatgcccattacttccagttgcatgtgaccatcgacaatgccgccagcggccacgcgcggcgcgccgtggagagcgtcaccgagctggcgcgcgatcagggtccggcgttttacgagcgcgtgcggcacggttatcggctcaatgacctgggaatcgaaacgccgtcgttgatcgcctcgttcgatttgcaggccgagttgctcggcgcgttggaacgtaagcgcatctacgggcagtgcatgcattcggaccgttgtcgcctgcaaggacgcaccatcaaccagtggcttgctgagcccggcgcaatgcacgggtttctggaagcgctgcaggctcagggttggatcaagcgtgacagcgatcccaggcatagccgcttctggtcgctgatcgaggggccggtcgctcccatgttcggtgtgttcgatgcctatgaaaagcagctctggcatgactggatcgctggaacctggcaaggcgcagagacccgtcgggtgccgccagggcagtgggagcaggccctgcagctggcagatgaaacatcccttgccccgcagtctgcggacatggctgcactgatagaagcaatggccggcaatcgacatgctaccccggagggcctgcacgccacccgcgcgtacatccaggccaccggcctgatgcacggagggttctactga

SEQ ID NO: 358125 - DNA, 954 bp, Pseudomonas aeruginosa
atgcagctcaaccaggaccaggtccgtgccgatgaggccttgctgcagctggggctccgcctgcgtgccgacggctatcgtttcacctgcgttacgccggcgactcaggccagagtcaatgcccgtgccgacgcgcaacaggcgcgtacgttgcgtgatgtgttcggctggagtcgacagtttgccgcgtcgctgcttagccctgacgaactggagcagttgcgccttgccagggtgttggaggcacaggggactctgtggcgcagcactgtgcgctggtccagcctggacgatctgttgctggtacatgctgcctggccaacggacagccgcgacgcggtgttctttggcccggacagctaccgtttcgcccagctgatacacgatcatttgagaagcacgcccgagcgcgtgcagcatgccgtagacatcggctgtggcagcggtgtcggggcgttgctgattgctcgcgccgcccaacacgctcaggtttgcgcagtggacatcaaccctatggcattgcgctacaccgccatcaatgccgccttggccggtgtggccaatgtttcggtcgagcgcagtgacctgctcaatgacatcgcaggtaccttcgacctgatcgtcgccaacccgccgtacatgctcgacgccggacagcgcgcctaccgccacggcggcggcgcactgggtgccgagctgtcgctgcgcatcgtcgagcaagcccgggagcgcctgtcgccagggggcacgttgctgctctacaccggtgtcgccatcgtcgaggggcgcgacgcgctgcttgaagccatgcggttgcgcctggcagggcctgcgttcagttggttctatcgcgagctggacccagacgtattcggtgagcaattgcttgaacccggttacgagcaggtcgagcgcattgccgccgtggccctgaccgtcacccgtcgcggttga

SEQ ID NO: 358126 - DNA, 1107 bp, Pseudomonas aeruginosa
gtggcgcggcagtgcacgtttggcatcgaggaagaatacctgctggtgaatctggccaccgggcaggtcatggcggctccgtcagcagccgtggccctctgttgtcgggatgcgctgggcccgtggttcgcggaggaaatgttccatagccagatagagatcgcttcgcccatattcgacgcactgcaccaggcgcgtgagttctttggcgagcggcgacagcgcctggcccaggcgctggccgatgagggcgccgggctgtacggcgcggcgagccaccccagcgcccagtggctgcgccaacgcccacgtggctccccgcactatcgccagttgttcgacgattaccagctggtggcccggcgcagcctgttgaatggcctgcacgtgcacgttggcgtaccggtgggcatcgatcgtatgcgggtgatcaatcgggtgctctactggctgcctttgttgttggcgctgagtacttcgtctgcgtattggggcggtgaggataccggctacatgagctaccgccgcgcagtgtgcggggaatggccgcacatggggctgccagagccgttgccggactggagcgcgtaccagcgctaccgggcattgctgcaacggaccggtagcctggccgaggacggtgacttctggtgggcgatcaggccctcgcggcggtttccgacggtcgagctgcgtatctgcgatggctgcccgcggctggaggatgccctggctgtcgccggcctgtttcgccaccttgtcgggcaggcgctggcccgccacgacgaccccgccagccgcgagatgcgctggattagccaggaaaactactggcgcgccctgcgtcagggccgcctggccaccttcatcggtgtccatgagcaacagccggtcagcgccgagggctggctgatgcagttgcagctgcaatgcccgccggacaccgccgatgccgagcgatcattcgttcaggcccggcatatcctgcgcgagggcagcagtgccgatcgccagcgccaagccttcgcgctggcccgtgaacacggcctggataaccgccaggcgatacgcgcagtggccgggcaggtgatgagcgaccatcggtag

SEQ ID NO: 358127 - DNA, 138 bp, Pseudomonas aeruginosa
atgaaactcttctgcctgctgcgtggctgccaatggcgcagcctggtggtgtgtgaagtcgccgggcttcactgccagtgttgcgaacgctgtggcgcgctgcgctacagccagcccggtcaacctttcaatgtgtag

SEQ ID NO: 358128 - DNA, 837 bp, Pseudomonas aeruginosa
atggcccgatcaatctggaaaggcgcgatcagcttcggcttggtgcacatccccgtctcgctgaataccgccgtgcgcagcgagcgtgtggacttcgactggctggacaagcgcagcatggagccggtgggctacaagcgagtgaacaaggtgaccggcaaggagatcgacaaggagcacatcgtcaagggcgtggagtatgagaagggccgctacgtggtgatcagcgaagaggaaatccgcaaggccaggcccgaagcgacccagaccatcgacatcttctcgttcatcgacgccggcgacattccgctgcaacagtttgacaccccctactacctgagcccggaccgtcgtggcggcaaggtctatgccttgctgcgcgagaccctgcacagcaccagcaaggtggccttggccaccgtcgtgctgcacacccggcagcacctagcgctgctgcgcccgctggaggatgctctggtgttgatcaccctgcgctggccggaagaggtgcgcgggctggatacgctggaactggacaagagcgtgaccgatagcaaggtagacaagcgtgagctggacatggccagacgcctggtggaggacatgagcgggcaatggacgcccgatgattaccatgatgcgtttcgccagaccatccttgacctggtggaggagaaggccagcaaaggcaagatcgagaccgtggacaaaggcgaaggcgcggcggcggagaagggcgccgatatcatcgacctcaccgaactgctcaaacgtagcctcggtggcaagaccaagaccaagaaaccggcggccaaacggccacgcaaggcctcttga

SEQ ID NO: 358129 - DNA, 663 bp, Pseudomonas aeruginosa
atgatcgccgtcatcatccccgcccacaacgaagcccgtcgtcttgggcactgcctggccgccgtcaagctggcggtgtctcaggccgaatctgcgggcctggcggccgaggttctggtggtgctcgatcgctgcgtcgacgccagcgcgcgcatcgcccgccgccatggtgtgcataccctggaactggaggccggcaatgtcggcatcgcccggcgcctgggcgcggcgtggatgatcgaacgcggcgctcagtggctggccttcaccgacgccgacagtcgcgtgcccagacattggctggtgtcacaactgcaatggcacgcggacgcggtgtgcggcacggtgcatatcgagcgctggcagccatggcagaacgcagcgttacgccagttgtatcgcagccgttatcaggcacgtgacgggcatcggcatatccatggcgccaacctcggcgtatgtgccaaagcctacgagcgcgtgggaggcttccagccattgccggcgcatgaagatgtgcaactggtgttggcccttgaagccagcggcgcacagatcatctggacggcggcgcacagcgtggccaccagcagccgggtggacagccgcgcgcgtcagggcttcggggactatctccgcgggctggaggggcagctaccgtag

SEQ ID NO: 358130 - DNA, 600 bp, Pseudomonas aeruginosa
atgagcctggacgcacagtatttcgccgacttgtatgccggcagcgatgacccctgggcctttcgtacccgctggtacgaacggcgcaagcgcgagctgaccctggccagcctgccgcgccaatgctatgagcgcgtattcgagccggcctgcgccaacggcgagctgagcgtcctgctggccgagcgctgtgccagcctgttgtgccaggacatcgaagcaacggccgttgccctggcccggcagcggcttgcgggcgtgagccacgcccatgtcgaacagggccacctgccgggcgactggccgggcggtcagtttgacctgatcgtgcttagcgagatcggctactacctggaccccaccgactggttgcaggtggttgagcagtcggtggccagcctgacgtatgacggcggtttgctggcctgccactggcgccatcccatcgccggttgcccgcaggatggccgcgaggtgcatgctctgctggcccggcatctgccactttacccactgctgcgtcacgaggaggcagacttcctgctcgaatactggtcgtgtcagcccagcgtggtggacctcgacgagacctgcccatga

SEQ ID NO: 358131 - DNA, 771 bp, Pseudomonas aeruginosa
atgagtcagaacctgatacaggctgcgcaagggacgccctggagcgcctggcagcaatctgctcagctgacccgcgccagctggatgctgcctgagcagttgtgccctcccggaaggcgcctggtcatactggcgccgcacccggacgacgaaatcctcatggccggcgggctgctggccagcttccagggacgagaacaggacgtgctgcttgtttctgcaaccaatggcgagggcagccacccgcattcctcacaatggcccgagcgccgcctgcgtcatcagcgcccactggaaagccgccatgccctgcaactgcttgggctggacctcaaccgtttggactggcgacgactcaacctcaaggatggcgcgctgccccatgatgaagccttcctggtcaatcacctgaaccagttgctcaaacctggcgacctgctgctgaccacatggcgcggcgacggccattgcgaccacgaagcagcaggtcgcgcctgtgcccaggcggcccaggccaggcgtgtacaactggatgaggtcccggtctgggcctggcactgggcaagccccgatgacccgcgcctgccctggccccgggctcaccgcctgcagctgggcgatgagcacctggcgctcaagcgccaagcccttgccgcccatgccagccagttgcagcccgatggtgatcgcccaccggttgtgccagaacagctgcaggcttgcctgttgcaaccgttcgaactgatcttcctgtcaacggaggcaacatga

SEQ ID NO: 358132 - DNA, 1026 bp, Pseudomonas aeruginosa
atgatggaactgacccacttcgattcgttgttacaccgctttgctcaccgttcgcaggccatcgaacgcgacgcttcgctaatagaactgatgcaggccttgcagggcgaacgcctcgacgtgctcccgttgcccggccagggctgcacgctagaacgctggcgcgtcctggcgcgggtcgccggttgcgatctaagcctggccaaactttatgaaggccataccgacgctctggcaatcctcgccgaatgcggtgccgcccagcatgccttcaacggcatttggggcgtgtgggctgccgaaccgccagatgcccgggcatatatcgtcgagcgggacggtgaacgcgtacgcctgcaaggccgcaaggcttggtgttcgggcgcgttgcagatcgaccgtgccctgctgactgcctgggaagacgaccagcctcagttggtggccatcgaattgcctcatcccagccagcgcatcctggccgagcattggcaggccgtaggcatggccgccacccgcagtgtcgtcatcgaattcgacgactcgccagggctggccatcggttcgcccggccagtacctgtcccggcccggcttctggcaaggcggcgcgggtatcgccgcttgctggtatggcgccgcggaggccttggcggactaccttcgcgaacattgccgtaaaccccggcgcgaccagcatgccgatgcgcatctgggcgcagtcgatgcagccttgtacggtgcccgtgccgcccttcgcgaatgcgctgagtggatcgaccggcaccctcaggacaacgccagcttcgaggtgcggcgcacccgcgcccaagtcgagcaagcggccgagcaggtcatccagcatgtcggccgggcactgggcgccacaccgttctgtcgcagcagccatttcgcaaggctcagtgcagacctgccggtgtacctgcggcagagccacgccgagcgcgacctggccgagttgggccgacaactgaccggccttccggcgggagtttggcaactatga

SEQ ID NO: 358133 - DNA, 2007 bp, Pseudomonas aeruginosa
atgctggtcaagtcccatgacgggcaggcgcgcagtgaaacggactacagcattgtcgaggccctcccggacagcgtgctgagcgaacgtaccctgcccccacgcagcccggccaaggcgaccactgccaggcacaagcgagtcagccgcaaacccctgccggatacgctccagccgcaactggccacgttggtcgattccccgccaagcggcgattggcgctatgaagtcaagttcgacggctaccgcatcctggcgcgtatcgacggtgacgacatacgcctgtttacccgtaatggccacgactggagtgcgaagatgccccggcaggtcgaggcgctcaaggccctgggcctcgactcggcatggctggacggcgagatggtagtggtcgacaacaacggcgtggccgacttccaggccttgcagaacgccttcgacatcgaacatgacgagcgcatcacctactacctgttcgatctgccttggctgggcggtgaggacgtgcgagcactgccgctgcaacagcgccgtgcaaccctcgcccggttgctggaaggccatgcatcgcaagtactcaggtattccaccgattttgaggagcccgtcgagtcactgctcgacagcgcctgccggctggaactcgaaggcttgatcggtaaacgtgccgacagcccctacgttggccggcgcagtagcgactgggtcaagctcaagtgcaagcagcgccaggaattcgtgatcgtcggctacaccgaccccaaaggcagccgcaacggcttcggcgccctgctgctggccctgcacgaccacggcagcggccaactgcgttacgccggcaaggtcggcacgggtttcagcgctgccaccctggatagcattcacgcccgcctcaagccgttgcaaaccgacagatcgcccttgccgaaaccacctaccggtgccgaagcgcgcggcgtgcattggctcaagccacagctgctggcagaggtcgcctatgcccagatgacccgcgaaggcatcgtgcgtcactcggtgttccgcggcctgcgtgacgataaacctgccaccgccatcgacctggagcgagcaatgcccaccaagcgcgcagcacagacagaacccgagaacctgggcaccctgcgcctgacccaccccgaccgcgtggtcgacgcaaccacgggtaccaccaagcgcgaggtcgcccagtactacgctcaggtcgccgactggctgctgccacagctcaaggaccggcctgtagccctcgtccgggcaccggatggcctgggcggcgaactgttctttcagaaaaacgccggccagctgcatatccccaaggtgcttagctacaccaaggcccaggccggtcaggcggccatggtgctcaaccgcgccgacagcctgctgggcgcggtgcagatgaacacgcttgaactgcacacctggaatgccaccaccaaggatttcgataaacccgaccgctttgtcctcgacctggaccctgaccctgcgctgccctggaaagccatgctcgaggccacccagctgacccttaccctgctcgacgaactgggcctgaaggtgtttctcaagaccagcggcggcaagggcatgcacctcgtcgtacccttgacccgacgcgctggctgggatgaggtgaaggactttagccatgccttggtcaaccacatggccgggctgttccctgatcgtctcagcgccgtgtccgggccgaagaaccgggtcgggcggatctttatcgactatctacgtaacggcaagggtgccaccaccgtcgccgcctactcgctacgggcccgcgagggcctgccggtgtcggtaccgatctggcgtgaggagctgagccagctcaagggtgccaaccagtggaacatcggcaaccttcacacgcggcttgcacaggtcgacgatccgtgggccgaaatgggcaagacacgccagtcgatcacgttgcgtatgcgcaagcagttgggtattgcatga

SEQ ID NO: 358134 - DNA, 477 bp, Pseudomonas aeruginosa
atggccaagcccctgcaggagtaccagcgcaagcgcgacttcaatgccacgcccgagccggctggcaagcgcgcccgccctcgctcagcccatgcgttgcagtactgcatccagaagcacgatgccagccacctgcactacgattttcgcctggagctcgacggcaccctgaagagctgggccatccccaagggcccctcactggatcccaaggtccggcgcctggcagtgcacgtggaggatcacccactggactatgccgatttcgaagggcgcatccctgaaggccactacggcgccggcgatgtgatcgtgggaccggggtgtctgggagcccgaaggcgacccacgcgaagcgtatgcaaagggcaagctgcgctttcgcctgcagggcgagaaactgtcaggggtctggaacctgttccgcacacacctggctggcaagaaagagcagtggatgctggtcaagtcccatga

SEQ ID NO: 358135 - DNA, 462 bp, Pseudomonas aeruginosa
atgtccacacccgatgacccaaaaccgcccattgagatcgatgacaccgaggaccgcatgggcagcgtccacgagctggatttcagcgaacgccgcgatgaacgccagggtcgtgtcggcgacgagcgtccggcgcgggaaattgccgaggattatccgccccggcgtgttgctgaaagcgggatgaccggcggcgaggcgttgagcgacagcctgcacgaggacaatgtcaccctcgatgacctgagccccgatacgctgctcgatgagaccggtgctcgcgacccggatgagcctggcagcggcggcccggcagacaagaccttgcgccaagtggaggccgacgagatcggtggcggtttcggcctggacgaggccgaactggcccgctccgcgccgctggacggcgagccgtggaccgatgaggtggtacccgatgatgaagggagagagccgaaatga

SEQ ID NO: 358136 - DNA, 960 bp, Pseudomonas aeruginosa
atggccactacccgctggaagacctggggcaaacgcttgctgactgtgctgttcctggtgttgatacccgcactgctgttcaccctggcgcgtaacctggactggaacgaagtccgccaatcgctgctggcttaccggccctcgaccctggctttggggttgttgctggccctttgcagttacctggtattcgccagttacgacctgctcgcccgcgcctacaccggccaccgcctgccggcccgccaggtactgccggtcgcgtttgtctgctatgcgttcaacctaaacttcaccacctgggtcggtggcgttgccctgcgttatcgcctgtacagtcggctgggcctggataccccgaccatcacccgcatcctcaccttggggctgctgaccaactggatgggctacctgctgctggccggcacggtattcgccctgggcttcgtgaagctgccggaaagctgggcggtgggtgccagcggcctgcgcctgatcggcgtactgatggtggcggtagcgttggcttacctgtgcgcctgcgccttcgccacgcggcgcacgtgggcgctgcgcgggcacgaagtcatcctgccgagcctgcgtctagcgctctgccaggtggcgctgggcgctagcaactgggcgctgatggcagcgctgattcacctgctgctgccacccgagctgttctatccctcggtgctgggtgtgttgctgatcagttgcgtggccggggtggtcgcccatattcccgccgggctcggcgtactggaagccgtattcctggcgctgctccacagccagcttggccaaggcaccctggtcgcggcgctgctgggctatcgaacgttgtactatctgatcccgctgctgttggcggtggtgacctacctgatcctcgagaagcgtgccaaggccttacgcagagcggcaggcacggccatcgacaagcactga

SEQ ID NO: 358137 - DNA, 1203 bp, Pseudomonas aeruginosa
atgaagctgtcttggtgcgacggcaaccgtgtcgagttgctgataaacggcgagcagtattacccccgcgtattcgaggccatggcccaggcacgcgaggaaatcctcctggaaaccttcatcatctacgacgacaaagtcggccagccactgcggcaggctctgatcgatgccgcgcggcgcggggtgcaggtcgaggtggcggtggacggctacggcaccgccgacctgcctgacgagttcatctcgtcgatgaccgaggccggggtgcgtttccattcattcgatccgcaaccgcggctggtgggcatgcgcaccaacctgtttcgccgcttgcaccgcaagatcctggtaatcgacgggcaacgcgccttcatcggcggcatcaactacagtgccgaccacctgggtgacttcggcccacaggccaagcaggactacgccgtggaggtcgtcggcccagtggtggcccaggtgcatgcttcttcctgccgcatgctcgcaccggtgctggatgccgccagtagggttcagccgggcggcatcgcttcaggcccggcgagcgccgtgctggtggagcgcgacaaccagcgccatcgcaacgatatcgaagcctgctacctgcaggttttccgtgaagcaaggcaacgaatcgtcgtggcgaacgcctacttcttccccggctaccgcttgctgcgcgaactgcgcaacgccgcccggcgcggggtcgaggtgacgctgatcctccaggggcaaccggacatgcactgggtacgcgcgctctcgcggctgctctacaactacttgttgcgcgacgacgtgcgcatccatgagtactgccagcggccgcttcatggcaaggttgcgttggtggacaacgactggtccaccgtaggctcaagcaacctcgatccactgagcctgtcgtttaaccttgaggccaacctgctgattcgcgaccccgcgttcaacgaacaactgtaccagcacttgaccgaactgagccgggagcactgcaaggccgtgacgctggagcgcatggtgcgcggctactggtggcgtgctccgctgatcttcctgggctttcacatcacgcgctacttcccgcggatcgccggctggtttccggcgcaccggcagcgcctgcagtcgctgcaagccgacggcgaggccccggctgattaccacgggggcaaaacctga

SEQ ID NO: 358138 - DNA, 774 bp, Pseudomonas aeruginosa
atgaacccgacactgcccgccccccgctgcatcatcgacaaggtcaccgccatacatcacctgacggtactgaccctcaacgtgcacaaaggcttcaccttgttcaaccgccgcttcattttgccggacctgcgcgaggcggtacgctcgaccggcgccgatatggtgtttcttcaggaagtgcatggcagtcatcaacaccatgccgagcgccatcccaagtggccacagacaccccagtacgaattcctcgccgacagcatgtggccgcagttcgcctatggccgcaatgcggtctacccccatggcgaccatggcaacgccctgctgtcaaagttccccatccgtgcccatgacaacctggatgtttcggtccatggcaacgaagaacggggcctgctgcattgccagctggaagtgccgggccatgaacaggtgcacacagtctgcgtacacctgggcctacgtgaagcgcatcgtcagcgtcaggtcggcctgctgctggcattgctggacagcctgccgccggatgagccggtcatcgtcgccggcgacttcaacgattggcgcttgaaagcagatgcgcggctgtcgagccacctggtggaggctttcggcaggccggcacgcagctttcccgcgcgcttgccgatgctgcggctggaccgcatctacctgcgtaacgcacaagctggtgaagcacgggtgttgtccagatacccatggtcccacctctccgaccatgccccgctggtggcgcaggtgacgccatga

SEQ ID NO: 358139 - DNA, 921 bp, Pseudomonas aeruginosa
atggtgagtgagatccgcattggaatttccggttggcgctatggcccatggcgcaaggacttctaccccgaggggctgcgccacgacgacgagctggcctttgcctcgcgggcagtcaacagtatcgaaatcaacggttcgttctacgcactgcaaacccctgagcgctatggcaagtggcgcgaccagacaccgcagggattcgtgttctcggtcaaggcgccgcgctacatcacccatgtacgcaggctccgtgaaatcgacgaggcgcttgccaacttcttcgcatcgggccccttgctgctgggtgacaagctgggccccttcctgtggcagtttcccccgaacctgaaattcgacgcgcagcgcttcagcgactttctggccaagctgccacgcgatcgcaaagccgcccgcagccttgcgcgccacgccgccgaacgcctgcaaggcaacgacggcactgccgtgccggggaatgcgcgcctgcgccatgcggtggaaatccgccaccccagcttcctctgcgacaccttcatcaacctgctacgcaaacacaaggttgccttggtggtcgccgacagcgccggcaaatggccttatgtcgaagaggtcacggccgacttcgtgtacctgcgcctgcatggcgatgtcgagctgtacagcagcggttacacggccagggcgctacgccgctggcgcctgcgcatccaggcctgggctgcgggcagccagcctgaggatgctcagcgtgtggtgcgccgcgccccgaccagacgcacctcccgtgacgtgtactgctacttcgacaacgaccagaaagtccatgccccttacgatgcccgccgcctgctggacaagctagggcttgacggcgagctggcgaccgaaccaggagtcgagccgcaggagccgctatga

SEQ ID NO: 358140 - DNA, 381 bp, Pseudomonas aeruginosa
atgaagttcgatcggtttgcacaatggctggccaaccacagcgggcggccgttgaccttcgttattgccttgatgttgatcattgcctggggcgtaagcgggcccttatttcatttcaacgacacatggcagctggttatcaatacgtcgaccacgatcatcacattcctgatggtgttcctgatccagaatacccaaaaccgtgatagcgacgagttgcacatcaaacttgacgaactgttgcgcacgacccaacgggcgcacaaggcgttgctcgaccttgaagatatggggccagctgaacttcatgcgcttcgaaagcgataccagcaactgggggagcacgacgaagcggggccggacagggaggactcccattga

SEQ ID NO: 358141 - DNA, 540 bp, Pseudomonas aeruginosa
atgagtgcaaaactgagtggcaagcgcgtagcctttctggtcaccgatggtttcgaacaagtggaattgacgggccctcgcgaagccttgcagaaaaacggggccgtggtcgacatcctgagtgacaaggaaggcactgtccgcggctggaaccatgacaagccggccgacgaatttgcggtggacgcgacgttcgacagcgcccacctcgacctttacgatgccgtcgtgctaccgggtggagtccagaattccgacaccatccgcctgatacctggcgcccagaaactggtgaaaagccacaactcggccagcaagccacttgcggtaatctgccacggcgcctggctgctggtatcgagtggactggccaagggcaaacggatgaccagctacaagaccttgcaggatgacatccgcaatgcaggtggccactgggtcgatgaagaggtagtggtggacggcaaccttataaccagccgcaagccggatgatatccccgccttcagcgagcaattgatcaaagcccttgctggctag

SEQ ID NO: 358142 - DNA, 243 bp, Pseudomonas aeruginosa
atgagcatcgaacgcagcattcctgaacttgaagcctggtacgcgcagtacgacgacatcagctaccggcgcgaatcgccggatgcctaccaccacgaactggttcgcaccgccgaggcgctgcgggacgacggcgcgattgactgggatgactggttggcgctgaaggcactggccgacgaggcacatatccgggcgctggaagatgccgtacaggctcacgtgagcgaccctgacgcatga

SEQ ID NO: 358143 - DNA, 792 bp, Pseudomonas aeruginosa
atgaaagcgctgaagatcgcgaccttcaatatcaatggcatccgcagccgcctgcccgcgctgttggcctggctggagcgggagcagccggacattgcctgcttgcaggaactgaaggcggccgatcagcagtttcctcgtcaggccatcgaagcggcaggttatggctgcctgtatcaggggcaaccctcctggaatggcgtggcgatcctggcgcgtgatagcgagccgctggaggtacgtcgcgggctgcccggcatgcaggacgatcagcagagccgctatctggaagctgcggcgcatggtgtactggtgggctgcctttacctccccaatggcaacccgcaacccggccccaagttcgattacaaactgcgctggttcgagtgcctgatcaagcatgcccaaacactgcaggacagcagccatcctgcggtgttggcgggcgatttcaatgttgtgcccaccgatctggacatctataacccgcgctcatggctcaaggacgcgctgctgcaacctgaatcgcgggcgtgtttccaacagttgttggcgcagggctgggtcgatgctgttcgtcacctgtatcccgagcagcgcaactacacgttctgggactattttcgcaatcattgggcgcgtaatgccgggctccgtatcgatcacctgctgctcaaccccagtctcagcccttatctgaagcgggcgggcgtggatgcctgggtgcgcaacgaagccaaggccagtgatcatgcgccggtctggatccagttgggcgggcgccgccagtaa

SEQ ID NO: 358144 - DNA, 1125 bp, Pseudomonas aeruginosa
gtgcggttaaatgattttatcttgcagaacatggagcctattctcaaggcttgggaggacttcgcccgcactgtcgaaacgcccatgcctgaccttgacgctgcaggcctgcgtaatcacgccgaagctatattgcgtaccgtggcactggacatggtgtccccccagactgctattgagcagtatgagaaatctcgtggcctgcaagcaacggggccggttgaaactgccgcccagatccacgccgtcacccggttggaggctggctttacgcttgatcaagttgttgccgagtatcgagcgctacgagccacagtgctgcgcctttggctgccgcatcagttgacaggtgaatccctcgacatcgatgacatggttcgtttcaacgaatccattgatcaggcactgggcgagtccatcacttcctacggcattgcggtggagacgacccggaaactggttctaggtgtactcgggcatgacctacgaacccctatgactgcagcccttctgggcgccgagatgttgagccgtaaaggtcagctaacggagcgcgaccgaagaattgcagaccagattgcggccagtgtgacacgatccaggcaaatcgtaactgatctactcgatctcgccaaagcgaacctgggtactgacattcccatccagaaagaggctgtcgatctttaccacgtgtgccatacacttgtgggagagctccgcgcttctcggccagagatcaccgttgttctgctcggtagccagcaagcacctggccagtttgacgccgaccggatggggcaggtgttttccaacctgatctccaatgcgtttcaccatggtgatcatgccaggcccatcaccgtaaccttgacccagggccctgaggcggtcgagttcagtgtacataactggggcaagcccattgcgccggatgtagtacctcatctattcaaccctcaggccaggtactcccgattgacgtcggaacatcacgaggcatccggtgggctgggccttggcctgttcatcgtaggcgagatcgtggcccggcatgggggggctatcgacgtgaaatccaattcgtcatcgggcaccacattccgcatatccctgcctgtggcatga

SEQ ID NO: 358145 - DNA, 465 bp, Pseudomonas aeruginosa
atgaacgctatcgacttactgatccaagaccacaagctcgtgaagaagctgcttgaagagctgtcgaccaccaccgagcgcgcagtgaagaaacgggccgagttactccacaggatcgagcaggagttgcagatccacaccacgctcgaggaagaaattctctacccggccatcaagcaagcgggtggcaaggaagaagcgaagatgtactacgaggccaaggaagaacaccgcactgtcgacgctctcgtcctgcccgatctcctgcataccgaaaccggcaccgtcgaattcgccgggcgggtcaaggtcatgaaggaattgttggagcatcacatcgaggaagaggaaggcgagctgttccccaccgcgaagaagctgctcggcaagggcaccctcgaggagcttgggcaaaccatggaaatgcagaaaaagatgctcaagggcgagcagcgagcagcttag

SEQ ID NO: 358146 - DNA, 255 bp, Pseudomonas aeruginosa
atgtcggaagatgaactgctatccaggcgtcaccctgttcaagaagatatacctatgcagcagcgcgtccggcgcttcgagcgcgtgggctggtacgtgctcgtggccatcgtattgcttgccttggcaggcctgttcggagaggacgatatccttgagtcagtgcgggacagccaaggcatcgagcacattgagcaggtgaagttcgccatcgtcgagcgcaatggaaagatttcgatcattcctgctgagtga

SEQ ID NO: 358147 - DNA, 504 bp, Pseudomonas aeruginosa
atggaaaacgaccctgtactggccaccctcggctatctgaaaaacaacaaactgattttgagcacagcagaatcgtgcactgcgggttgccttgtggctttgttggccgcgataccgggtaccggagaggtgctggaaagcggctatgtcgtctactcgcccagcgccaagaagcgcttgctgggcgtcagcgccgaaaccatcgaacgatacggcctgaccagcgaagcagtagcctgggaaatggccttgggcgccttgagagacagcgatgcgaacgtggtgatagccaccaccggggtagccgggccgacacccgaatccgggataccaccggggacgatgtgctttgcgtgggctttcgccggcgagccaattgccgttttcacgcgcactcagcgtttcttcggcgagcggtctgaagtcatgcgccaaggcgcccttttcgggttgacccggctttcccactatcaccagcgctggttacgcggcgagcgcgcctga

SEQ ID NO: 358148 - DNA, 858 bp, Pseudomonas aeruginosa
atgcgagacttcccgaccccgcccttcccatcgcagcctcaaaatgtccctggctcacagcgcaagatggagccctacccggattgtggtgagcagtcgtataccggccacaatcgactcgaaggcaagattgcactcatcaccggagcagacagcggcatcgggcgggcagtagcgattgcctatgcccgtgaaggtgccgacgtggccatcgcttatctgaatgagcatgaagacgcgcaagaaaccgcgcgctggattgagtccgcaggccgtcaatgcttgctgttgcccggtgacctggcgcagaagcagcactgctacgacattgtcgaaaagaccgtcagccagttcgggcgtatcgacatcctggtcaataacgcggcgttccagatggcccacgaaaccctggaagagatcgacgatgatgaatgggtgaagaccttcgataccaatatcaccgccatcttccgtatttgccgggcggcagtgccttccatgcccaagggcagttcgatcatcaataccagctcggtcaattccgacgacccatcccccagcctgctggcctatgccacgaccaagggggccattgccaacttcactgccggcttggctcagttgttagccaagaaaggcatcagggtcaactgcgtcgcgccgggccctatctggacgcctttgattccggcaaccatgccggacgaggccgtcaagaactttggttccggctatccgatggggcgcccgggacaaccggtcgaagtcgcgccgatctacgtgctgctgggctccgacgaggccagttacatcagtggctcacgttacgcagtgactggcggcaaacccatcctttag

SEQ ID NO: 358149 - DNA, 465 bp, Pseudomonas aeruginosa
atgtttggttctcccaaggagcgtctcgatttttaccggcgtgagatccagtacgaaaccagcatcctggccaaccgcacggatgcctacctggcggcgcagtcctttctggtcatcgccttcgtctcctctatgggaaatctgaatcaaggatggggcgagatgttcaccctgatcgtaccggcgttcctcgccttgctcggggtactgagctcactcaacgcctggcctggcatccgggcggcatacaacatcatcgatcactggcagctcaagcaaagtcatctgctgcgcagcgagccgttgatgggactggcttacgatgaatcgccgctgttctgcgaggcggaaacctcgcgtgcaggccatcggaaatcactgctgttttcgctgcgcacaccgtggatctttctggtgttctgggtgctcctgggtagctactcggtgtacatccaactcgcctga

SEQ ID NO: 358150 - DNA, 159 bp, Pseudomonas aeruginosa
atgcagccgaaaaccgaaggctccgaagaaaaagggccaagcgatttgcctttcatcaatgatccccaaaagtcaacgtcgccacctttgaatgacgctgatgccacggaggcagccgaggcggaggaagacatccaggatgacggcgaatccatttag

SEQ ID NO: 358151 - DNA, 435 bp, Pseudomonas aeruginosa
atgaagctccacatcgagggtttgtcgttgtcaggtaagacggtaattgtggtagaagacgatccaacgcttcagaccctgctggtggacatcctgatcgagttgggcgccacctgtgatgcgttcgataactcagaagatgccttgattcacttgatgggactcaagagcgactgctcgttgatcgttgtcgaccacggtgttccgggaagcatcaaaggtatggaatttatctccatggcacacgaaaggtggcctggactacccgccattctgacctcgggctaccagcttgatgcctctcaggtcaccccccccgttacctacctcttcaaaccgtggtcgatagacgagctcgctcaagctattggccaggcgcttcaccctgcaaatatgccttctactctgcagtcgttcgaccagcaaggtctctag

SEQ ID NO: 358152 - DNA, 1344 bp, Pseudomonas aeruginosa
atgaccttcatcgtctggttcgccatgctgggcgcagtcttgctgctgctcgcactctcatccgcctacctgcgctggatccctgtgacctcgtctttagtttgccttgccctgggtatcggcctgggtacgtcggggctgggttttcttcagctggatttgagcaagtcgagccggtggatggagcacctcacagaggtcgcggtgttgttttcgctgttcttcagtggtttgaaattgcgcttgcccttgcgcaaccgcagatggtggagcgccttctaccttgcggggcctgtgatgttgctctgcatcgctggggttacgctgttgctgcgttacggcctgaacttgggatggggtatctcggtgctgatcggagcgatccttgcacccactgaccctgtgctcgcaaccctggtgcaggtggttgatgcccgggacgatgatcttgtccgtttcagcttgtcgggtgaggcagggctcaacgacggcgtggcgtttcccttcgtcatgcttggactgttcctgcaacaggacaatggccaggcctggttcagtgaatggttgctcaaggacctgctttgggcagtaaccgcaggcatgctgcttggctactggatgggccgcggcctgggaaagctcacgcttttgttgcgtctgcgcaacgacgacagcaccgtctcgcccaatgactatctggcccttgccctgattgcgttggcatacgtgagcgccgagtcgatacaggcctatggattcctcgcggtgttcgccgctggcctgggtttacggcaggcggaggttcagaccgccaatagcccagaagagccggctgctgaacatctggtacagcctgtgctaggtcaccagcacgtggcgccggagctagccgtcaaaggcgatgtgaaagggctcgacgactcgcaggtagcagcggggatcatgttgggtgacatgctggctttcggtagcctgatcgaacgtgcaatggaagtatttctggtgaccctgctcggggtagtgctcattgagcattgggactggtgggcagtgctggttgccggtgctttgttttttgtcattcgccccatcagtatcctattgttcccggctcgaggaatgctggatatccgccagcgcggccttttaggatggtttggtatccgaggtatcggcagcttctactacgtgttctatgccctgaatcatgggttgcttcccaccttggccgcgcagagcatcaacctggtgctgtcagtggtggcgttgagcattgtgctgcatgggttgagtgtccagccgctccttgccagatacgaagcgtggaaggagagggtctcctga

SEQ ID NO: 358153 - DNA, 267 bp, Pseudomonas aeruginosa
atgcgaacattcgagaaaaacctctccgccgaccagttgctgaagctcaactgtttggcagcctggtacggcgtgctggaaagtcgggccttgagaatggactcgcctgacgactatcacgaggaattgcttcgccaggccgatgagatggatcgtcgagggattatctgctggcaggaatggcgcgatcttcgcctggaggctgacgctgcttacttgagagcggtagcaggggaggactatctcccggtaaatcctaagaggtag

SEQ ID NO: 358154 - DNA, 1326 bp, Pseudomonas aeruginosa
atgatcaatcaaacgacaggcatgaaatcaggcgaacgctatcgcgtggagaacgtggagcgcgctcatcagtttccaggcttctttcaagacggaaagtattatctgggccctgaacttctcaccgccgtgggctggcttgaaggtacacgcttcatctacgacagcctggatgccgacggtgaacccgtttttgcaaaccgagaggcaggcacgatcgaagggctgacgttgaccctggtcgatggcaccacgctcgaactctcgcggatcgaggccagcgaaaccgttgccccccttgaccacagtgcctcgggtaaagaacgagaagcgtccgacagtggcgcttcggtcaaagggcctctgcgcggcaaggttgtggtgatcactggcgcgtccagcggtataggccgcgccgccgcgcatgcatttgcgtgcaaaggtgctcgcctggtactcgccgcacgcgacgaagaggcgttgttcaacgtcctggatgaatgcaccgattgcggtacggatgccatagcgatcaccaccgacgtcacccaaagcgaccaggtgcaagcgctggcggcgcaggccgccgaatttggccatggacgaatcgatgtctgggtcaacaacgccggagttggcgcggtcggcattttcgaggacaccccactggaggcgcacgagcaggtcatccagaccgacctgatcggatatctgcgaggcgcctacttcgcccttcccttcttcaaggcgcagggcagcggcattctggtcaacacgctgtcgctgggcagctgggtagcccaaccctatgccgccgcgtattcggcgagcaagttcggcttgcgtggactgaccgaggcattacggggcgaattgactgaatttcccgacatccatgtgtgcgacatctatccagcagtcatggacacaccaggcttccgagacgcaggcaactacaccgggcatgcgttgacaccaccaggccccatatacgaccccgaaagggtgtcagaggccatggtggcctgcgcaatctcgcctcgagctcacaccacggttggcactgcggcgcgactcgcgcatttggccagctacctgatgccaggcctgcctctgttgtcaggaaggctgacgcgctgggggataaatcgcagccccatagccgaagcatcatcaggcaacctctttgagccgccaagtggcaggaggggtatcgacggaggctggaggaagccaaaagacaaaacgccgctgctgatcggcgcagcggcgctgggaatccttgtgggctttacactcacacattcacgacgcagggatagctag

SEQ ID NO: 358155 - DNA, 234 bp, Pseudomonas aeruginosa
atgaacggtctcgccagctacttctggattgccgtggcggcaatccttttactcattgatctgtgggccatcgtcagcgtcttcagaagcaataaatcagatgcagtcaaagcggcctgggccctgctgatcgtggcgctaccgctggttggcctggggatctggggcgttgctggcccgcgcggcatcaaacgaggtaccgggcccacttccgacgagcacagcaaaggctga

SEQ ID NO: 358156 - DNA, 1203 bp, Pseudomonas aeruginosa
atgagagcactgacttaccacggagcaaacgacgtcagggtcgataacgtccctgatcccgtcatccagcgagaagacgacatcatcctcaaggtgactgccaccgccatttgcggctccgatttgcacctctatcgagggaaaattccagaaaccgaagcgggcgatatttttggccatgagttcatgggcatcgtggaagacaccgggagtgcagttaccaacctccagatcggcgatcgggtggtgattcccttcgtgatcgcttgcggccactgttttttctgtcagcgtgatctgttcgctgcttgcgaaaccaccaacacggggcgtggttcgctcatcaacaaaaagggcatccccccaggcgcggcgctgtttgggtacagccatctgtacggtggtatccctggtggccaggccgactacgtaagggttcccaacggtaacgtcggcccgttcaaagtgcccaccgacctggccgatgacaaggtgctgttcctgtcggacatcctgccgaccgcttggcaggcagtcattaacgccgagattggcccgggttcaacgttggcagtctatggcgccgggccagtaggcttgctgagtgctgcctgtgcgcgaatgctcggcgcgcagaccattttcatggtcgatgacagtgattaccgcctggcgtatgcccagcaagcttacggtgtcgtacccatcaacttcgagcgggacgatgatcccgcagacagcatcatccgtcagacacccggcatgcgcggtgcggatgcggtgatcgacgcagtcggtttcgaggccaagggcagcactgccgaaacggtgatgacggcgctgaagatcgaaggcagcagtggcaaggcgctgcgccagagtattgctgcggtgcgtcggggcggcgtcgtgagtgtccccggtgtgtacgcgggcttcattcacgggttcatgttcggcgacgcgttcgacaagggccttaccttcaagatgggccagacccatgtccagaaatacctgcctgaactgctggaacacatcgaagcaggacgtctgcaaccggaattgatcgtcactcaccgcctggccctcgaagaagcagccatgggctacaagatgttcgatcagaagcaggacaactgccgcaaggtcatcctcgtgccaggcgctgcacccggcaccctgggccccgactacgtatag

SEQ ID NO: 358157 - DNA, 390 bp, Pseudomonas aeruginosa
atgaaagcgatggacactgcaacagccaaacgcaaaggcatcaagttgcgcgccaccatcatctaccgcaaggatggagaggttttgttcgttcgcaagcgcaacgccaagtggaacctgccgggtggacgtgtcgagcggaacgaaacgcctcttgaggcggctatgcgggagatggccgaggaaactggcctcgcattcgacgagcttcgttaccttaggatgtaccgggaggacaaggtcatccattatctgttcgaagcccgaaaggcagacgataagccacgccctcgaaacgagatcgaggcttgccgctggatcaatgcgagggatgtgtcgaggcgccgagtaaggcgcccgatcaagagcatcctgaaacgctgcgcctga

SEQ ID NO: 358158 - DNA, 2199 bp, Pseudomonas aeruginosa
atgatcaacagcacaccagtagtcggcacgcccctggaccgcgtggacggtgtggcgaaggtcaccgggcaggcccgctatgcgggcgaataccccgaagcgggcctgctccacggcagcatcgtgtccagtaccattgcccgcggtcgggtactcgacatcgacaatgcgcaggccatgcgcgtgcccggggtaatcgccgtgctcgaccatggccatcgtccgcctatatccagttatgacgacgactacagcgatgccgactctgccgtaggggcgccttttcggccattgttcaatgatcgagtgctgtacagtgggcaaccgttggcgctggtgatcgccgaaaccctcgaactggcccgctatgcaggctcgctgatcaaaatcaaatatgccgaggaggctcaccagacagacctgggcgcatgccaacaatcgcatgccgcacccgccgaaacaccggcgccgcgtggcgacttcgccgggcagtttgccgaggcgccggtacaggtggatgccacgtacctgacggctaacgaacaccacaacccgatggagccccatgcgtcgaccgtgcactacaagcccgacggcaccctggaaatccacgacaagacccaaggcacgcagaactgccaggactacctgcacaaggtgttcggcctgcccaaggcaaacattcgtgtgcgggcggcattcgtcggcggcgccttcggctcgggcttgcgcccgcagtaccagttgccgctggcagtgatggcggcgttgcacctcaaacgctcggtacgcgtgaccctgacccgtcagcagatgttcacctttggttaccggccccgcaccgagcaacgcttgcgcctcggagcagacgcaaacgggcgcttgctggcagtcgctcacgatgcgcttggccagacctcccgcttcgaggacttcaccgagcacctggtggaatggagcggcatgctttaccagtgcgataacgttgcgctcagttatcgcctggcctcgctcgatgtgtacaccccactggacatgcgggcgcctggggccgcgtccgggataattgcactggaatgcgcgatggatgagctcgcctgtgcagcgcaagtcgacccggtagacctgcgccagcgcaacttcgccgccaacaacgccaacgagggcaagccctactccagcaaggagttactggcgtgctatcagcaaggtgccgaacgctttggctggcatggccgtaatccgcaaccgcgcagcatgcgcagtggccaccggttaatcggctgggggatggctggcggcgtctgggaagccatgcagatgaaggccagcgccaaagcgcgcatcgatgccgtgggccaccttaccgtcagcagtgccaccaccgatatcgggaccggcacctataccgtcatgactcagatcgccgccgacgcagctggcgtcaaagtgcaggatgtcaccttcatgctgggtgactcctcattgcccaccgccccgcttcagggcggatcgttcacggtgtcgtcggtgggctcggccgtgcgccaagcctgccatgtcctgcgcacccaggtgctggaacatgcgcgcaacatatacccccaggtggccaacacaccccggcagcagatcgttttcaccgagggctacctccacgcgggcaaccatcgctgggctttggcggacatcgtggcgagcgcccccaacggtaagttcgaagtgcagatcgacaccgagcccggcgccaggcgccagtcgttctccaccgccacccattcggcggtattcgtggaagtccacgtcgacgaggaccttggcacgatcaatgtaatccgggtggtcagcgctgtggcggcgggacgtgtgatcaaccctaaaaccgcacgcagccagatcctggggggcgtagtttggggggtgggcatggccctgcacgaagcagcgttgaccgaccatcggctaggccgcatcgtcaatcacaatcttgcggagtaccacatcccggtcaatgcagactgcggggatatcgaagtgatcttcgttgaggagcacgacgacattgtcaatgaactgggctccaagggcgtgggcgaaatcggcgttgtcggagtggccgcggcggtggccaacgcggtctaccatgccacgggcaagcgtgtaagggagtttccgatcacgctcgacaaagtgctgtga

SEQ ID NO: 358159 - DNA, 1002 bp, Pseudomonas aeruginosa
atgacgcccttcagctaccacaagcccgcctcggtcagcgaagcggtgaacctggctgacgcctgctcgcacttcatcgccgggggcaccaacctggtcgaccttatgaaggaaaacgtggtgcgcccagagcgtctgatcgacatctccggccttgggctggacggtattctctgcacccccggcggcggcgtactgatcggtgcacgggtgagcaatgcagacctggcctggcacccgatgatcgagcagcattatccactgctgtcagacgcgatcctggccggggcatcgccgcagttgagaaacatggccagtaccggtggcaacttgctgcaacgtacccgctgccactacttctacgacaccggcaccccgtgcaacaagcgcgaaccgggcagtggatgccctgcgcggacaggcatgaaccgcatccatgcaattctcggagccagcgacgcctgtgtcgcgatccatccctcggacatgtgcgtggcattggcagcgctcgaagccgtggtccacgtacaggggccgtccggcgaacggcagatacctttcgcggatttccatcgcctgcccggggacacccccgagtgcgacaatcaactggcattcgatgagctggtaacaggcatcgaactgccgcccccgctgttcgaacaccattaccgttatctgaaaatacgcgaccgcgcctcctacgcgttcgcgctggtgtcagtcgctgcagccttgaacttcgatggcgatgtgatccaacaggcgcgcctggcgctgggcggcgtagcccacaagccgtggcgggattcggttgtggagtgcatgctagccggccaggtgccttctgaagcgctcttcacccgcgctgcacaaacgatgctgcaaggtgcacaacccctgagccacaacggcttcaaggtaacgctcgctcagcgagcaatcgtgcgggcattggatgacgcggcgcgcggtgccgctaacgggagggtacgcccatga

SEQ ID NO: 358160 - DNA, 528 bp, Pseudomonas aeruginosa
atgagcgcgatcgcttacaacggggctgcacagcaccccatctgcctgaccctcaatggtcagccccgaaccctgcaggtgcatccctgggtcaccttgctcgacctgctgcgtgagcaactcgacctggtcggcaccaagaaaggttgcgaccatggccagtgcggcgcctgcacggtgctgcgcgatggcaagcgcatcaatgcctgcctgaccttggccatcatgtgcgacggggccgacctggtgaccattgaagggctggccagcggcgacgttttgcacccgatgcagcgcgccttcatcacccacgatgcgttccagtgcggttactgcactccggggcagatctgctctgcggtggggctggttcacgagggacgtgccgacacccgcgaggccattcgcgagcagatgagcggcaatctttgccgctgtggtgcctacggcaacattgtcgcagcggtggaagaagcattaccgttgatgaccgacggggccccgccgcaacgagggcagactccatga

SEQ ID NO: 358161 - DNA, 1788 bp, Pseudomonas aeruginosa
atgaccggcacggtaggcgactttctggtagagcgtttgtatcaatggggcgtacggcgcatcttcggttaccctggcgacggcatcaatggtgtattcggcgcgctgagccgggccaaaggcaagatagagttcatccaggcccgccatgaggagatggccgccttcatggccagcgcccatgccaagttcaccggcgagctcggtgtgtgcatggccacctccggcccgggcgcctcgcacttgcttaccggcctgtacgatgcgcgcatggaccaccagccggtgctggccatcgtcggtcaacaggcccgtgcggcactgggtgggcactaccagcaggaactggacctgctgtcgatgttcaaggacgtcgccggtgcgttcgtccagcaggcatcgacgccggagcaggtgcgccatctgctcgaccgtgcggtgcgcaccgccgtcggcgaacgccgcgtcacagccatcatcctgcccaacgacctgcaggacctaccctacaacgaaccacccagggcccacggtacggtgcattccggcataggcttcagcaagcccagggtgctgcccttcgaggaggacttgcagcgcgcggccgaagtactgaacgccggtcgcaaggtggcgatactggtgggtgccggcgcgctgcgggcgacagagcaggtcattgcaattgccgaagcactcggcgccggagtggccaaagcgctgctgggtaaggcggtgctgccggacgacctcccatgggtcactgggtcgatcggcctgctcggcaccgagcccagttatcatctgatgagcgaatgcgacaccctgctgatgatcggctccggctttccctattccgagtttctacccaaggacggccaggcacgaggcgtgcagatcgacctgcaacccgacatgctaagcctgcgctacccgatggaggtcaacctcgtcggcgacgccagcgaaacattgcacgcactgttgccgttacttgaccacaagaccgaccgacgctggcgcgacaaagtagaaacctggcgtgcgcagtgggacaagaccgtggccaaacgcgccttggtcgaggcggacccgatcaacccgcaacgcgtggtccatgaactgtcccctcgcctgcccgaccacgccatcatcaccagcgactccggctcctgtgccaactggtttgcccgcgacctgcagattcgccaggggatgcagtgctcgctgtccggcggactggcttgcatgggcgcctccgtgccctatgcgattgcagccaaattcgcttacccgcaacgggctgtggttgctttggtgggcgatggggcgatgcagatgaacaacctcgccgaactgatcactgtggccaaatactggcagcaatgggacaacccacaatggatctgtgccgtgttcaacaatgaggacctcaaccaggtgacgtgggagcaacgggtcatggagggcgaccccaagttcgaagcttcgcagtcgatccctgacgtgccctaccatttgtttgccatttccattggcctgcaaggtatctacgtagatcgcgaagaggacgttgccgctgcgtgggagcgtgcgctggctgcagatcggccagtactgatcgagttcaagaccgacccgaacgtgccgcccttgccaccccacatcaagctggaacaggcaaagaagtttgccagcagcttgctcaagggcgaccccgaccaggcgggcatcatcatgcaaacagccaagcaggtgctcgggtcggtgctgcctggcaagaagtga

SEQ ID NO: 358162 - DNA, 525 bp, Pseudomonas aeruginosa
atgacgctcatgaatacacaagatgccagtgtgcagaccttgtatttcgaagacgacggcgcgacgccgaacagccattttcccgtactgctttatcggttgaaacttgacccgtcggaggacaatgccagcgcattcgaggtaatgtttgcggctcaccaatggatcccgctctggcgctcagggattttcgactatcaccactttcatccaaacgctcacgaggcactcgggattgcctgtggacgggcccgtttgacgcttggcggtgaatacgggcaaagcgtgagcgtggagcggggagatgtgctggtgctgccagcaggtacgggccatcgctgcatcgagtgcagcgataacttcctggtggtcggcgcctatcctcttgggcaggaagactacgacattcagcggcccgacagaacagcacacccgcgcaatctcgcgcgcatcgcccaggtgctgtgccctgaacaagacccggtctgcggtattcggggcatgctgctgacgcaatggcgttga

SEQ ID NO: 358163 - DNA, 381 bp, Pseudomonas aeruginosa
atgccacgcggtgacaaggacaaatatacggacaagcagaaacgcaaggccgagcacatcgagcaatcgtacgaggacaagggcgtgggcaaggacgaagccgaagcgcgcgcctgggccaccgtgaacaagcaatccggtggtggtgaaaagccgggaggctcggggagcaggactgcgtcacgcgagaagaagaccgcacgcacggattcagccaaacgcgccgccgagtctcgccaagggcactcacgcacttcgcgcgcgtcgctggaatcacaaagcaagcaaagccttatgaaggaggcgcgcagcaaagacatcaagggccgctcgcgcatgaataaggcccagttggtcgaagccctgcaaaaacaggggtaa

SEQ ID NO: 358164 - DNA, 228 bp, Pseudomonas aeruginosa
atggctgatcagatagcccgactggacgctgagctcgtctttctggatcagattgctgctgaattggagcgccaggtgggacctagcactgtcacgcgcccgctggtcatcgcatggttgagcgaatggttgaaggtggcgggcgaatcgaaacctggtttgcctcacctgcctcactctctcaaagcggcttatgccgcctggacgcatcaagccgtggatcgctga

SEQ ID NO: 358165 - DNA, 927 bp, Pseudomonas aeruginosa
atggaagctgcactggcgaacaaatggaaatgcctggcacggacaatcacgtacgttggttgggcgctgttctggctattgctgtgggacgtcgccgtcactctggatacgatgctcgttgcgggatatgggtttgagctgccgttgatgcccctgtcactgttttgctcagccctggtagtgctgatcagttttcgtaactccagcgcttacaaccgttggtgggaggcacggacgttatggggttcgatggtcaacagctcgagaagctacggccgccaggtactgacgctgatcgacgatgagcagcttgccaacccagtcaaggctaggctcattcagcgtcacgtggcctacctccaggccttgcgaatgcatctgcaaggaaaacgggacatttctgctttagcgccgctgctgtccacccacgacctgcagttgctcaccacagcgagcaatttgccaaacgacatcctcagcggctccgcagagatcatcgccagggagtttcaggaaggccggctagacagtatccgcctggcacgtcttgagtccacgttggtcgatatttcaagttggcaaggcggaatggagcggattgccaatacgccgcttccctacccttacacctatttccccaggatattcagcaccctcttttgcgtgatcatgccgctcagcttggtgccctctttgggctggtttactccgatcgtctctacggtggtaggttgcatgttgctggccatggagcgaatcggcaccgacctgcaagcaccattcgggcgtagccaacacagcattcgtaccgatgacctctgccgaaatatcgaaaagaatctacagtcgatgtttaactcacctgagcgtggggccttgtcactgacaccatgccttgttatcgaaaggcaccgctctgcttcatga

SEQ ID NO: 358166 - DNA, 1044 bp, Pseudomonas aeruginosa
atgaagcgccaggatggcgaacgttttatggagttctgcatcaggcctccggccgaatggatcggcccaatcgtcaaggccaggtttaagcgtatcggaggccgcaaggccaaagacacggacacgtatattgccaatcctcaatggcgtccctttttctttaccaccagcaaaagatccgtgaaaattgcaaaagagtcactgcgcgagcttgagccgcagtcacacaagctggctcaggactcgatcgctcaaatctttgcggtatgtggtagttttttccaattctgtactgatgaaggcttgactgaaagtgtcaaccccattcgagccattaagcagaaatctaagtataagcagcgtgtttctggcactcataaagctaaatctttgacgccactccaatggagctacgttcttgatacagctgcaggcatggcggattctgatccggataaacatgagcgcaccttattcatcgtctcaacaatcttttcgatgtacctccgtatttcagacttggccggccgtgataactggcaaccgttaatgagtgattttcgcaaggactcatccggcgcctggtggtttcacgtaatcagcaaaggtaacaaagtagccaagattagcgttaaaaatgaatatatcgagatctggatgcgtaggtaccgccattacttaggcttgactgctacgcccactccagatgaagcaacccccctcctccgcgctcatcatggacgagatggattgtctgaaggacatattcgtgtattggtgcagggtgtctttgatgaggccctaaagcacatgaaggaggaagatcgagctgaggacgagatagatgccctgcgttctgcctcgacccattggctccgtcatacctcagcaaccttcgatgcaaaagttcgcaatgataaagacctgcaggctgatttgcgtcacgaaagtttgtccactacggtgaacaattactaccatagcattgacgaacaacgccatcggtccaacaaagatctgagtattgtagatcgtgatctctga

SEQ ID NO: 358167 - DNA, 5790 bp, Pseudomonas aeruginosa
gtgacggatgaagctgtcagacaagcaacatgtatggtcatcaatgcccacgaggtggggacgggctggctcatcaccccttcacttgtactgacggcctttcactgtgtggaaacggcagtgtcatctggtgaatgcctcacggtccaatttggtaccggtgctgcagcgatgcagcaccgcgtagagcttcaggcccacgatgatgacctggatgtttgtctgctgcgccttcctactggtatggagatcgagcccctcgcgatcgataccaggcttcccagagcaggcgaaaaatggtctgcgtttggctatcccgtgcacaaactggacttgggccatgcgcttaacggcaccatccagcaaaggttggaagaactcattcacggcgtggatctagacctctcggtcagccctgatacgcagcttacgaattacgacggtctttctggcgcggtcttgacggtcgcaggcgattgctgcgggctattgagggtgagtgtgaataccgctctcgctgccgttagcttccttcaactgcgcccgttccttgaagcccatggggtactggtcgaggacgctccagacgcgacaccgagcttgccgttcggcactcgtccggacttcgaccatatgtttgaagagcgtctggccacgctacagaatggttacgtcatcatggagggggcacacggcatcggcaagtcgagctattgccagcaatttgcaccctccagcgaaagggtcgaggtgttagggacatatgcgctctctgagcgagggagagggatcacgcctgcgcaccaggcccagccggaggtttttttcgattggctcaattcgctatggtcgagttcggtgagcggaaaaccggcgcggttgcaggagctttcctatccggaactgatccggagcagtcataagcgactccaagatctagccaatcgatacgcggcggtggggaagatcggcctgattttcattgacggcctgaacgaagccgccagcgccggcacagacgctctgaaacgcctgacggcgttattcccgccagcattgcccaccgggttggtgattgtgatcaccggtgtcggcttagacgcgcatgccgcgagcatcggcacagtgttgcagggtgctgttcgattgacgctacccgcgctggggcaggactgccaacgtgttttgtgcacagacttgttggatccgggcgtggcaacctcaagcctcgtctccctgttatgcgagcgggcaaaggggcatccactgtacctgcattacctaacggacatggtaaacaatggggcaagcgaagccgatatcatcaagatgccggctttcagcggtaccatccaagactactatgaaaccttgtgggggcagctgctgcccgatcaggatgctgtcaacctgctgggccttctggcgcgactgcgctggggggtatccactaaagacctgaccgtgatgctacatccggccgagagcgcggtttatgtttccacgctcaccaggatccgccatctgttctctaaagcggacaacaccgaaatctaccatgcttcgttttctgagtttgtcgcgcacaaaaccactgcgatgagtgagcgcctgcaggaacggttggccgcgttctgcagttcagcgcaaagcggcgactatggacagttgaaccgggtctatcacggactactgggcggatccgaggcgcagttgcaggcgatccaggactgtcatcagagctgggtggacatctcggttacactcggggctgaaccggatgtgctccttggcgacattgaggcgacgcttgccgcagcgacgcggatcggcgccgcccaggatacgattagcttactgctgttgtcgcaacgcctgactttccggtacaacaccttgttcgcccaagcggccgagcaggtggctttggctttgtgtgcgctggggcagaccgaccaggtgcttcgtcatgtgattcgcaagagtcgcctggtcgcccctccactgggcgccttcgctgtcgctcaggccttaattcggatcggcagtactgagaaagccctagagctcttagacaaaattcagcaatcattggataccgtttttgagcagtttcaagcgaccggcagtatcgaaactgacctctttattgaagttgtcttgcagcgacttcatggattcgcgctggaatgcgcagctggtggtgagccaccggtagggcggttcttagaggcggtgatacggcaggtccgggccgttccgcaagcgttcagcgcaagtagcacggttgatgtaatcgccaacctgggcggcagcttctatggtgccagattatgcctaagcgggcggtataagccggtagcgcaaatacctctggctgaggctccgcctgaatcgctgcttacgatgctgcttggtattctcattcatgccgaaatgaattcgcgcctttatggaatttccctgcctccaagcattattgcactgctgctgagcgatctggcaaaagccagtgaccgactcgagcagcctgccgaattgcgcttagccgtggtcaacgcattgatcgagaccggggcatcattggaccttatacgcaaatgtgggggggccaatttagaaaagaccgagccgctggtgctgtattcatccaatagggcacgaccggatcgcgaaggatttcaagagtcgtatgagctgtggcgggctacggactttttcgatgaaagtccggcgcagccggtaattccccccgttccaagcgacgactgggaggagtggttgcgctcgctggtggctgctgttgcctgggcagacggcactgcccgtcgggcaaaagcaagcactgatgagcagacgcttggccaagtatgggcatttctgtcggaccacgtaatgccgatcctcacacgcccgttgagtgttcgcattcaatggcagcaggcgtatgccatcccggaatctatctttccaatgcttttccagcggttggcgaaacttctgctggactgtctcccaaatcaagccggccgactcttagacgtattcactcaggggttcgccgagcaattggggctgtacaatgaaggttttcgacagtccttagctttggtggcagaccaattcatgaccgtggcgctggaggcggagactagcgatgcgctgttcgaccttgtaatccgctggcgcgattacgtccagataaacgtggaaaaccgctacgagctcataccggaactgctgcgtatagtaccgttgttggcgcgtctggacgcacaggaagaggcggcaaaaacttaccaggcggttttgcgtttttcgatggggcccagctggtacaaagaggatcagctatcactaatgtccagcacgctcgcatcgctgcctgcggccgcgccggtaccgaccgcatcgctgatgcaagttgcggcgtacctagagcgcgctagcggcgagatgacgtttcagcgctatgtacgggctgacaagggcaatttcattgctcaactgtgccggcgatcgctatacagccaagcggttgactacttcaaacatcaatcatgtggaacattgtcgcaactgcacgcacaagcagcggctggcggcctagaccgagtcgcgccattgactggcatgcatttcccaggcggcgcgcttgaagagcaggccgccctgctcgcgctgttgcgggaaacaccggagactgtcgactggcgattgcactgggccttgctggaagtcttccaggacggcgatgaacgtcacttaagcggctggggcatgcaatatgctcgtttgatcagcacaatggctgcaccctccgatgaccttgcctgggcggcgcgacgcattagcaccatttcgcaaggaatgaatgccggtcggtcgcgcagtctgctgcgagccttagtgtcaaacttgccgacgacacatgcccccacttttgagccactacttgcggctatcgagcagcagacagaaccagatccatttgagcagttcgcgcccagcaccagccatcccgcttccctggttgaacctgaggggacgccagatgccgaatccagcaacgcctccacagtggaggaatcgctgtaccaacccggtgtgtttggaaagttctctgttgacgagcaggcacgcatcgacttgcaagcggtgcttacacttaagcgtcgtggtaacacatcggccgccgttaaggcggctgtcaatgttttgcagacattacaggaaggcggctggtccatctggacgagcaaccacactggctcacccgcggagcagatgatagaaaacgaggtcctggaggctgacgctgtagctaggctttatggccctctgattctggaggaacgccatgttcaccgctggctgatcgcgtcccacctcatcgaaaaagtggccagcaagctggatgctgaacagcaaggcacaatactcgatgtcgctctcgagcacgtgggccacatggtcggtatagcctcaccaaaaggattcgagtacctgggtggttccacaaacagcgctgaaacagcgctattcgacttgttgctgtggtcgctcgatcatccgtcctgggagcgccgggatggtgctgccgcgatgttgctcagtttgatgactcaaagggaaaagtacttcgccccagtggcacgcctcgcgttctcgatggatcctaacaatcgggcagatctcgccgcagcggtgctggataagttgtcccggcgaaaccctgtgaatttctgggagcaactcgctccgcatctcgagatcgcatcgctgctgagcgagtgtcagcacgtgtcgcggttggccatcctttcacgcattgttgatcgcgccgcagaaaaggacagtgtcacggcacatgcagcgcgagcagcaataagtgccgtgtttgacaaacagatcactgaattgtctgtcgaggaggtcgagccgccagagtacttcccactcgatctgcgatcgcactgggatgcacttgcgaggcagggagtcgtgacgggaaacacgcggagcacagtcgataagacgctagcgcacatgtgcacgccgttaccgattgacgtcgcgcagttgctggagcaccgccttgcagaaaacttcagagagccagaccaattcccaacgggccgctgggccaacagggtacgatatgcgttcaatacagcactatataaacccatgtcccgagagcacttgtatgccatcgacgatctgctgcggtgctacaatcccaatgcttgcgcgacacctcagaacgggccgcagctgatcacaaaccttatagccgcgctaaaaaaccgttcactgcgagggttccagccgtttagtaatgatttagtgtttctagacgtgcaatgcgttattcagctcaacgggaaagtggctactgttgaactgctagctcaccttcattcgcctgatcctcggcagtcaccgtatgtatcgcatgaaggattcaaagcaaccgaggttgccccacaggccccggacgggccgatggccatttgtgtgcgggcacgtcctacggtggcttattttgcatcgcgcacgcctgccgtgccgacgcgcaaattcctccagttgatcggggccagcgaatcggcaactgtccgctttcactggcgtgacggcagcagcgtggtgggaggcggagccagtcgtcgccacgaggctgctatgcttgcgattcatgaaggggccctgacactcccgcgtggctgggatatcggctgggagcttcgtctaaatggtgaaactctcgcagtacttaatggttga

SEQ ID NO: 358168 - DNA, 1188 bp, Pseudomonas aeruginosa
atgcttaaactgaaaatgtacccagccaagaacggcgacgcgtttttgatcaatgccaatggtcactacctattaatcgacgcaggctatgcaagcacgtacaccactcaccttgcggcggagttggccgcgttggcggaggggggcgaatgcctcaaactggtagtgtgcactcatattgacgcagatcacattggcggcctactggcgctattcgcctccaacggaggccccgagcgccgcctgattgaggtcgacgcggtctggcataacagcctgcgctcgttaccctacaccgccgatggtccttgcctaaccgaatctaccggtgtgctggaggccatcaagcgccgcggcttccctgtgccgccggcgcttgctcccaatcctatcggtgctgggcagggcagttcactggccaagctcttaagatcacgtgattatcactggaatcatggtgatggttcttgttctatcgatagccgcagcggtgcctacagcttgtccgaccaggtgcagctggaggtgctagggcccaccatcgaacgattagaggcgctgcgcatgctgtggctcaaggatatgcgccgacttggctaccgaggcaagccgatcagcagcgacctggtcgacgatgcctacgagatgtggtgcagccacgacgcgcaaagatctagtattcccagtgttcgacccattgcagcacgctgcgagggaacgctcgctgaagcctacacgccggatatttcggtagccaatggcagctccattgtgctggcgctcaccgccggtcgcgccagcgtgctgctactgggcgacgcgtgggcagaggacgtagtgggcgagttgaaacggcgcaaccaaggcgcccaacagctcatgttcagcgcgattaaaatcgcccaccacggcagcctccataacaccagtccggagctgcttgcattgatcgatgcgccttgctacctcatttccaccaatgggcttcgccacgcccacccagactttgaagtcttagcagcgatcgtcgaccgaccagctgcctttgagcggaagctctatttcaattatgacaccgcggccgcacaacggctgcggacctattcatcaaaagccggcgcgcgcttcagtgttcacatcgtcgacggtgaatggatccaactaggagacgtcagctgtgacggatga

SEQ ID NO: 358169 - DNA, 1770 bp, Pseudomonas aeruginosa
atgagcgcatctccgttaacctacctgacggccgcagtcgagctgcaagaaaacgcggatcagtggactgtttatgaatcaacaggcaactgcgtgatcttggccgggcccggcagcgggaagaccaagaccatcaccgtcaagattgccaggctgctcactgaggatgtccgctggccgcaacgtatcgcctgcatcacctacagcaatgcctgtgtgggggagttgcgaacccgcttgagccggcttggcgtggaggatggcaagcgcattgccatctctacggtccattctttttgccttaccgagctagtcctgcccttcgcagggctggcgaagcttcgggtgccagatccgttagcagtagcaacccccgagcaatcgcgtcgcttcttcgccgccgcttatgaagccgttcatggcggaaggatgaactctgcattccggaccgcctgcgatcggttgcggcggacgattcctgatcgtaacagcgtcgaatggcattcttggacaccaaggcagacgcgagtagtcgaggcttatgaagatttgttgctggcgaacggactgatcgactttgatggcttagtgctcgcagggcttgagcttgtcgagaggcatagctggatacgtcaagcactccgggcgaagtacccagtcgtcgtgattgatgagtatcaggatctcggcctgcctctgcaccgaattattttggcattactcggtgatggtgttcgcatcatcgccgtcggtgatcccgaccaatcgatctatgggttcactggcgcgcggccagagctgctcagaacccttgctcaggatcctcgagttagccctgttaccctccgtctgaactaccgctgcgctgatcgaattattgcggcgtccagagggctcttacccggcagcgctgcattcaggtcccacgacggtagagtcggtgaaattaacttttacaagcttaaggttggactgcaagggcaagcgcaatatgccctcgaaacgatcctgccgaccctgctcaccgacaacccgcactggcagcgcggagatattgccttcctgtaccggtcatacaaggaaggctcagctattgctgaaatcgcggacagcctggggttgcgctattttcgtctggacaatggctcgcctatcaaacgcacaaggctcaccgagtggttgggtttagccgcacggtggtgttctggtggctggaagactggtgaggtccagttgtctcacgtgcttaaagaatggcagcgactgaaccgctcgcgaaccagcgacacagcaagactcgtgattaggaagcaattaatcactgcacttttctcgctgagggagagtagccttccacttcacgcatggctgaaggcgctgcgagatgcagccctgtccactctgcttctcgaggagccgggtctcgccgatgaggtggatacatttaacgaattgcttgctgcgacagccaaaggcgcagcgctcggcaacttcactgtgcagatctttgccaaccagggcaaaagtcaggaccaaatcaacctgatgacactgcacagctcaaaggggttggaatttcaggcggtactcatgcttgcgctagaagacgggaattttcccaatgactacgacaaagccagtgccgaacagctggaggaggccgggcgcttattttatgtcggcgtgacacgcgcgaaagaacagatccatatgctttatggttggagcgagtcgcctttcatcaccgccatccgagcggcagtgaggtga

SEQ ID NO: 358170 - DNA, 759 bp, Pseudomonas aeruginosa
gtggcgcgctcgctgcatggcgtcaaactgaatgacgccgatcgggaagaccttgagcgctacatggatgtgacccgtggagagctgttttttgccaagggcgtgattctggtcgaaggcgacgcggaaaagtttctcctgcctaccctggccaagctgtatgacaaggccttcgatttcgatgctctgggtatcacggtgtgttcgatcgcgggcaccaatttcgcgccttacgtgaagctgctaggccctggcgggcttgatcttccattcgcagtaattaccgattttgaccccaagggctccgagatcagccaagaggacgaagatcctgaggagggtggagtcgaatctagctatggcaagaatcgagtcgtcaatcagatcttgcggcacatcctgcccgtagcagaatggaaggatctcagtttcgaagaggtgttggctctagcacccgagaaaggtgtctttctcaacgagttcacctttgaagtggatgtattcaacgctaaagcggagagctattttcatcaggcagtaaaggcagccaccagcaataaggcgatgcatgctcgcttcgaagccttaggcgacgccccgttgactctggacgcgaagcaattcctcaaagacatcgactcaatcggcaaaggacggttcgcccagcgattggcgtccgttttacttgaggaggacgctgacgtatgtccgccctatatcaaggcggcacttgagtacatgaggagaaagcttgcatga

SEQ ID NO: 358171 - DNA, 303 bp, Pseudomonas aeruginosa
atgagcctcgggttcctcaatcgcgaggaacgtatgctggcgttcgccttcttctaccaagtactggtgttcgaggtgtttgagcgccaagtacagcacattcgccgaccccagacttgcctcggcaacaccccgcttcccgccgtctatcatcatcagcaatgcgcgcaacaaccgttcggggtccgtcggcgcaaagcccagggctgtttcaatcgcgtgcttagcccctaccatccgttccaactgatcgttgacttgctttacaacggcggcaagttcgggcagcgcagcgatttttga

SEQ ID NO: 358172 - DNA, 348 bp, Pseudomonas aeruginosa
atgccttggttttatatccaggtcgtgcataggtctggacgtgagaattttgccagcatgttcatgatgtaccacgcacacgagctcaagcagttcatcgatgcgcagtccaaccgtgtgtgggtagagcaggttcagttggtcacaccacctcatgtcaatgggcaacccatctggcttatggagccgcttgtaaaggtggcaatcgtcgcagatccgatggacggatcgcattgcctcgtctatcaagtggcaagtggagccacctattcattgagagacgatcttgataaaaatttggctccaatctgcaccttgttttcagaagagcgcgaccttcggcgatag

SEQ ID NO: 358173 - DNA, 750 bp, Pseudomonas aeruginosa
atggagctcgccagaatagaagcggtgaccagcacagttatgaaacctccgaaaactcctcacatcgcaaaccgtgcttcacgcgtccgcccacctaaacaatgggtttctgggcggaccggctcagccacatctgtcgcagagtttatctccaatcgtatcaaacacatgcccaaaggtgagccgtttgctggcgctgtttttgcgcatgcgggctcccgcgcttcggtaggtcaggcgctgtctcgactggtgctcagcggctcactagaacgtgtttttcgtggcgtttacatgcgccccaagcacagcaagtacactggcaggaaaattcgggctaaccccatttcagtaatggaggccatcacaaaggcaagaggcgaaactatccagatccatggcatagaagctgtgcgtcggctgggactaagcacccagatgcaggttctgccaacttattacaccagtggaccgacacgtgaaattaagatcggaaacgcggtggttcgattgcgtcatgcatctcgtcaacgtctccagtacgccggcacccaggtaggggtagccctgaccgctttgttgtatcttggaaaagaagggctgactgaggatgtcttgagtaaggtagtcaactcgctgaatgctgtggaattgaacaagctgatggcctgcacgatgcctaggtggatgctgtcggcattggcctgctccgcaaaggttgggattcgaacctcagcaggggttaggtga

SEQ ID NO: 358174 - DNA, 990 bp, Pseudomonas aeruginosa
atggcagtgggcgtaccagaaaacgacgtgtttgctgccgcggacgcggtcctcgcccgcggcgagaggccgacggtggagcgggtacgccttgagctggggcgcggcagtccggcccgggtcggtaccttgctggatcaatggtgggagcaactggccgcccggctgcgcggcgaagcgcgcctgccgggcctaccggcggaagtagcgcaggccttcgtggccatttggcagcaggccaccctgatggcgcaaggtgtcgctgagcaggccctggatacccagcgtcaagtgctggccgaggagcgcgagacactggcagcgctggaagcccgcgccctcctggaggtggtccaggcacagcagcaaaccgctgagaccgtcaacacacggcaacgcgtggaaacccgcctggccgatctggaacagctgctagttcagcgccaggcgcaaatcgacgacctgcgcgcgcaacgcgacgcgctgcagacgcagcgtgacgaatcccaaacgaaggtggccgagctgcggcagcagttgcacgacagccgcgaacaggccgagcaggcgcgcgttgagcaacagcgctatacccgcgatgtcgaagatcgcgcctatcgcgagattgatcgggcccgcgaagagagcaagggcctgagcgcccaactcaaggacacccaaggtcagttgcacggggtgcaacagacactggcggtcgcgcagaaggccctggccgaagcatgtgaacagcgcagcactgcccaggcgcagagcgtggcactgaccgaacagcgggatcaggcacgcctcaccgcccagcaagcgggcgagcaacgccaggatttgcaggaccgtctgcagcgcgccgaggtggaactgggggaggcgcagcgtagcgcggcagcccacggagcccgtgcacagaccttggacgtgcaactaggccagctgcgcgataccctgcagcagaaacggcgtcagcgttcttga

SEQ ID NO: 358175 - DNA, 993 bp, Pseudomonas aeruginosa
atggcaagaggcggcattaacctggcactggtgcgcaaggcccgcgaggcgctgctatcgagagggcagaaccctagcatcgacgcgatacgcatcgaacttggaaataccggctcaaagactacgattcagcgctatttaaaggagatcgattcacacgatccccgaccttcggcttcgccttcgcggctaagtgatgagctcacggagctcgtgggcaagatgctcgagcgcttaatggaggaggggaacgaagcgctggcacacgagcgagctttattcgaagttgagcgtaaagcgatgagctcagaggccagtacacttcaaggtcacttggagcaggcgcatcgggagatcacaaagctgcagtcggcactgcagacccaggatgaagaactgaagacccttcaatccagccttcaaaccgagattacccgtaacgcccgcatcagccagagctgcagtgaccttgagattcgtgtccaagagaaggacgcccagatcgaatctctggaggagaagcatacgcatgccagagaagcgctcgagcactaccgggtagcagtaaaggaacagcgcgaccaggatctaaaccgtcatgagtctcagatttatcagatacagcaggaggtgacagtcctgcagcaaacactcatggttaagcaggaagaagccactcggatgatccgcgacaacgagcgtttgattgctgaaaaccgccagcacgccaaggaagctgctcagcatcgcgacactatcgagattttgaggggtgacttgggtatcgcgaatgcggcgattgcccgcgcggtaggtgcgaaggagttgcttgagcatcagcttgaaaacaagtccaaagaggttaccaaagcccaaacccaggccgcagcggctgagaggagagagagtgatttgatgcaaaaaatcgcgagcatagaagccgaagtcaaggatttgcgcgcctcgaacgagccaaatgactctaaggtatag

SEQ ID NO: 358176 - DNA, 945 bp, Pseudomonas aeruginosa
gtggttgaagtggtcagcaaggcagataggtacttggaggcgagcgttcgtcagaacacgtcgaagagctatgcggccgccctctcccatttcgaaatcacctggggcggcttcctgcccaccaccactgagtccgttgtgcgctacatcgctgagtacgccgaccaactggcgctgagcacgctgaagcaacgtttggctgcgctagcaaactggcaccaaagcaacggcttccccgaccccaccaaagcccccaaggtcaggcagttgttgaaagggatccgggcagtacatcccgtgcagcagaagcaagcagctcctctggcgttactgcacctcgaaaaagcagtggcgcacctggaggatgaggttgctcaggcgagagccgccggcaacatggccgcccttctcaaggggacccgcgacatcgccctcctcaccattggcttttggaggggattccgaggggatgagttggcgaggctcacgatcgagaacacccatgctgagcgctatgtgggcatcaggttctacctgggtttcagtaaaggggatcggcagaacattggccgagagtacaaaacaccatcgctgagcaagctctgcccggtggaggcgtatctgaattggatcgaagttgctggcctcacccgtggcggtgtattcaggggaattgatcgttggggcaacatcagcgatcgcccgctcgccgcccatagcctaattcccctgcttcgcgacactctggatcggtgtgggttgccgtccgaaatctacagtgcccactcgatccggcgcggatttgccacctgggcagcaagctcaggctgggacatcaagacactaatggagtacgtcggctggagcgatatgaagtccgcactacgctatgttgagcctgcacagcaatttggcgggctaattaggaagcttgaagaccgatag

SEQ ID NO: 358177 - DNA, 2439 bp, Pseudomonas aeruginosa
atgggtggcatgaaaaaagacttgatgccggtgatccggaatcttgaggacttcgacacgcgcagcggaaatctgctggagcgcctggtcttcaaccaccgcctgccgttcgtggcgggcatcctgttggtgaccctggtactgggcttcatggccttcacccgactggagctcaagcccagcttcgagaagatgattcccaaggggcatccctacatccagaacttcctggagaatcgcaaggccctgcgtggcttgggcaacagcgtgcgcatcgtggtggagagcacccagggcgacatcttcgacccggcctacctcaagaccctgaaacaggtgcatgacgagctgttcctcaccgcaggcgtcgaccgtgcctggatgaaatcgctctgggcccccggcgttcgttggaccgaagtgaccgaagagggcttccagggcggcccggtcatgccagatggctatgacggctcgccggccagcatcgagcagttgcgacagaacatcgcgcgtgccggcattgtcgggagcctggtggccaacgatttcaagtccaccatgttggtagtgccgctgctggagcaggccaccgcaggtagtcagggcgtggactatcacgcgttctcgcgaaacctggaagaaaaactgcgcttgcacttcgagtacggtgacgaccgcaaagcgcaggcctcgggtgaagaagggcagggcccgatcaagatccgggtgatcggctttgccaaactggtgggcgacctcattgacggcctgatgcgggtgatggccttcttcggcctggccgtggtcaccactttcttcatcatcctggcttacacccgctgcctgcgcagcagcctgctggtgattttctgctctctgctggcagtcgtctggcaactggggatcgtcgcctggctggggtatgcgctggatccgtactccatcctggtgccgttcttgatctttgccatcggcgtgtcccacgcagcgcagaagatgaacggcatcatgcaggacatcggtcgaggcacccacaagctggtggctgcgcgcaacaccttccggcgcctgttcctcgccggggtcaccgcgctgctggccgacgccgtgggcttcgccgtgctgatgctgatcgacattcctgtgatccaggacttggccatcaccgccagcatcggcgttgcggtgctgatcttcaccacgctgctgatgatgccggtagcgctgtcctacaccggcgtaggcagcggggccgccaagcgtgccttgcgtatcgattccaaggccgccgcgcacaagggctttgggcatgtctgggacttgctggaccgcttcaccgaaaagcgctgggccctgaccaccgtttgcctggccttcgccatgggtgtcggcgggttcatggtcagccagcacctgcagattggtgacctggacgcgggcgccccggagttgcgtccggagtcgcgctacaaccgtgacaacgcctacatcaccagccattacgcgctgtccagcgacctgttcgcggtgatggtgaaaacggcgccggagggctgcctgaactaccagaccttgatccaggcggatcgtctggcctgggcactgcagcagcatccgaacgtgcaggccaccacatcgctagccaacgcggttcggcagatcaccgccggcacctacgaaggcaatccgaagttcttcagcttgcagcgcaatcaggacgtgctcaactacgccgcccagcaggcgtcggtgaacaccccggaaatgttcaataccgactgctcgctgatgcctgtgatcgccttcctcaaggatcacaaggcccagaccctggacgatgtggtggccatcgccgagcgcttcgctgctgacaacagcgagccggaccgggagttcctgctggcggccggcagcgcggggatcgaggcggcgaccaatatcgtcgtgcgcgaagccaaccgcaccatgctgttgtatgtgtacctggccgtgacgttgttctgcctgatcaccttccgcagttggcgcgctacattagtggccctgctgccactggtgcttacctcggtgctgtgcgaggcgctgatggtgtggatgggcattggtgtgaaggtcgccacgttgccggtaatcgccctcggcgtaggcatcggtgtcgactatgcactgtacctgctcagcgtgcagctccagttccagcgccagggcctgccgcttgcggccgcctacaagcaggctgtgttcttcaccggtcgtgtcgtggcattggtgggcatcacccttgcggccggcgtggtgtgctgggcctggtcgccgatcaagttccaggccgacatgggcttgctgctgaccttcatgttcctctggaacatgctgggcgccctgctgctgatccccgcgctctccaacctactgcttggtggcaagcgcctatag

SEQ ID NO: 358178 - DNA, 1059 bp, Pseudomonas aeruginosa
atgtcttatttcaaactgatcggcctgggtcttgccttggcggcgggcagctgtgctgccgcgcctgtggtggatgtgctcgacctgccgtcaacacacagcgaactggcaacccgcagcccgctgctggacctgacccaggccggccagcggctgatcgccgtgggccagcgcggccacatcctgtattccgatgaccacggccaacgttggacccaggccagcgtaccggtcagctccgacctgaacgccgtgcagttccccactgagcaacaaggctgggctgtcggccatgacggcgtggtgttgcatagcgtggacgctggcgcaacctggaccaggcagctcgacggccgccagctcgggcgactgatgcaggattactacagctcccgccccgacgccgcgcagtggctggaggagggcaagcgcatcgagaccgaaggtgccgacaagcccttcctcgacctctggttcagcgatgaacgcaatggcttcgtcgtcggtgccttcaacctgatttttcacacccgtgatggcgggcagagctgggagccctggatggaccgcaccgacaacccgtcgggctaccacctcaatgcgatcagcagtgatggcaagcatctgttcattgtcggcgaacagggtctgttactgcgcctggacgacggtggtgaacgcttccaagcgctgcaatcgccctaccagggcagctttttcgggatcagtgcccagcctggcgtggtgctggcctacggcatgcgcgggcacgcctatcgcagcagcgatggcggtgtcagctggtcggcggtgaacaccgggctgagcagcaacatcaccgcgtccgagcgcgatgaccgtggtcatgtctacctgttcgctcagacggggcaggccgtggtgagcgctgaccaaggcgcccgctttcagcccctggatattggccaggcagtaccgatctacggcgccttgtcggcggccgaggagagcctgctgctggtagggccgcgtggtgtcagtcagcgcactccggcacttggaaaacaagaacaacagtga

SEQ ID NO: 358179 - DNA, 1359 bp, Pseudomonas aeruginosa
atgaaattcgtgaaaaccctgatggcggcttccctcgcggtggccttcgctagcgctgcccatgccgccgtttcgcctgatgaagccgcgaaactgggtaaaagcctgaccctggtgggcgccgaaaaggccgccagcgcagacggctcgattcccgcctacacagggggtctgacgaccgcaccggccagcttcaaggccggcgacagcatgcgtccagatccctttgccaacgagaagccgctgctggtgatcgatgccaagaacatcgaccagtacaaaaacctgctcagcgccaccaccatggagttggccaagcgttaccccggtttccgtgtcgacgtcttcccgacccaccgcagcgcggccatgcctcaggcagtgctggacaacgcggtgaagaacgccacaggcgccaagactgccaatggcggcctggcgatcgagaacgtgctgccgggcgttcctttcccgattccgaagtcgggcgccgaggcgttgtggaaccacctgctgcgttaccagggcgtgaccatcaacgccaagtacgactcctggaacgttgacgctgcgggcgtggctaccctggccaccaccggccaggccttcatcaactacccgatctacgaagacctgtccaaacccatcgccaacaccgacgtctattaccagatgaagctgtactactctggcccggcccgccgcgccggcgaggcgatcatgatcaaggacgcggccaacgccgtcgaacaaccgcgccgtgcctggcagtacctgcccggtcagcgccgcgtgaagctggcgccgagcctggcctacgacactccgaacccgggtaccgccggtgccggtacctacgacgacgtgttcgtcttcaacggtgcgcttgaccgctatgactggaagctggtgggcaagcaggaactgatcgttccctacaacacctacaagctgacctacgcaccggacccgaaagccctgaccacacccaaccacctgtcacctgacttcgtccgctgggagaaacaccgcgtgtgggtggtggagggtacgctgaaggaaggtgcccgccatatctatgccaaacgtcgcttcttcctcgacgaggacagctggatcgctctggcctcagaccagtacgacgctcgtgggcaaatcttccgcggctccttcgctttcttaagccagagctacgacaagcaggtcccggacaccttccccttcgtggtctatgacctggtgggcggtgcctacaacatcaacggtatcgtcggcccgcacggcggcatccgctacatcgacgcactgtccaaggcacagtgggcagcagagtccctggctggcgccggcattcgctga

SEQ ID NO: 358180 - DNA, 1920 bp, Pseudomonas aeruginosa
atgaaagacaagaaccctcacctgaacgtgcgcaggtgcctgctcgcgtcggccatcgccgccggaattggcgcgccagccgcggtacaggccatggaagtcgacaccggtaacccggactgggcggtgcgattcgacaacaccgtgaagtacaactacggcgttcgcaccgaaagtgccgacaagcgcatgctggctacgccgaacaacaacgatggtgactacaacttccgtcgctccggtaccaacatcaccaaccgtgtcgacctgttgaccgaactggacgtggtccaccagcagaacaagggctttcgcgtcagcgccgccagctggtacgacacggcctacgacaataccggttccagctccaacccgttcgtcaacggcaacgagtcgttctcgcgcattgccggtcaacctggtaccaacaatgccgtgctgggcagtccgcacctgtccaactatgcccagcgttattacagcggcccatccggtgaaatcctcgacgccttcgtgttctacagcactgaaatcggcgaggagtcgatgttcagtatcaaggccggtcagcacaacgtctactggggcgaaaccatcctcaacccggtgcatgccatcagctacggtcagtccggcctggacctggccaagcttgctgccgcaccgggtaccgaggcgaaggagctgttcgttccgcgcaaccagatttccacttccctgaccatcaaccccgaactggtcgtcgccgcccagtactttctcgactgggatgccgcgcgcctgccggaggccggcacctactacggcagctccgacgtggtgggcttcggcgcccagtccttcctcctcggccacacgggcggccctggcctggcgggaccgaacggtactctgacgaacgtccgccgtggccacgacatcaccccggacaagcggggtgactggggcgtgatgctcaagtggtcgccggagtggctcgatggcaccctcggcgcctattaccgccagaccgcggaagtcctgccgcaggccgtcctcgatgtcaccgggctgacagcacgcggtgcggcgggccccgtcgccaacgtgcagaactccatcagcaccagcagctacaaactcgcctacggcgacgacatcgacatcttcggcctgagcctgtccaaggaaatcggcggcatcagcgtcgccagcgacctgaacattcgccacaacatgccgctggcgagcatcccggccatcgtcagtgcctcgggccctggcggcctcgcctcggggctgggcctgctgccggcgcgtataccgggctctggcgtggtcaccgaactgccgagcagcggcgacagcatgagcgccaccggcgagaccctgcactggaccctgaacggcctgatgaccatcggcgatacgccgctgttcgacactgctgcgctgctgggtgagctctactacagcaacctgctgaaactcgatagccacaacgaggcgctctacaagggcaagggcacctaccggggtatcgacaaaccgacccgcgacaactggggcatcgcggtgaacttcacgcccacctggtaccaggtgttcccgggtgtggacctgtccgcaccgatgtcggtgaacgtcggccttgacggcgtttcgccggtccaggggggcggtgccgaagacaccggcaactattccctgggtatcggcgcggccatctacaaccagtacttcgtcgacctgaagtacgtggattctttcggcgatgccaagaagtgcaccaacggtgccaccgacggttcgacacctaatgcattggatgccacgcagcgctacacctgctatgccgggggctattcctccttctccggcggcggggccaccacggaagaccgtggcgcggtttacctgaccttgaagaccaccttctga

SEQ ID NO: 358181 - DNA, 1011 bp, Pseudomonas aeruginosa
atggcaagcatggctcgcgcagcagcgctgaccaactacgtggaggtcgcccagcatttggggctgaatgtccaacagcaattgagccaattcgggctcaatcgcgccatgctggagaatccggagctgcgcattcccatgaccgttgtggccggtttgctggagtcatccgcacaagccagcggctgtgaaacgttcggcttgcgcatggccgaatcacgccaactctccaatttcggcgccatcagcttgttgctgtcgcatcagccaacgctccggaccgccctggataccgtcctgaaataccgccacttgatgaacgagtcgctggctatccaggtggaagaatccgacagaaccgtgacgctacgggaagaaatcgccgtcgacgaacaggttccgctgcgccagagcatggaattggctatcggcgtattgcaccgtttctgcggcgcccttctggggtctaactggagaccgctgtgcgtcagtttttcccatccggcaccggcgaatctggatgttcaccgacgtctgttcggctgcaggctggaattcagcagcgagctcaacggcatcatctgcccgacggccaatttgaatgtgcccaatccgtcggccgatccagccatggcgaagtatgcgcagagtttcgtggagtcgctgccgggagctgtaagaggatcaaccctgaatgaagtcaggcaggccatctatctgctgctgccgatggggcgcgcaaccatcggtcaggttgcccactcgctggccattaccgtcaggaccatgcagcgacgtatcgaggagtccggcacgacctactcggatctgtacgacgaagttcgccatgagctgttgattcgctacatggacaatccgcgttattccctgagccagatcgcgtgcttgctgggctattcgacccccagctcattcactcgatggttcaccagccagcacggcgtgacgcccgccaaatggcgcagccagcgcacaggccatcccgagtga

SEQ ID NO: 358182 - DNA, 1968 bp, Pseudomonas aeruginosa
atgagtgaacagcctatcttccagcccagttccgagcagattgcgcacacgcgcctggccagcttcatgcgccatgcgggcaaccgtctcgatcgtgaactgagcgattacgacaccctgtggcagtggtcggtcgatgagcctgagcagttctggccgttgatctgggatttttgcggtggtgtcggtgagctcggcaatcgcgtgctggagcatccttcgcagatgcccggcgcacagtggtttcccgatgcacgcctgaactatgccgaaacgctgcttgcccggcgcgacgagagcgatgcgctggtgttctggggcgaagacaaggttcgacgccgactttcgcgagcacagctctatgatcaggtgtcgcgattccgtcaggggctggagtcgctcggcatcggccccggggatcgggttgccggtctcatgccaaacatgccagagacactggtcgccatgctcgccacggcttcgctgggcgccatatggtcctcggcctcgccggactttggcgtacaaggcgtagtggatcggttcggccagatcgaacccaagctgttcctgtgcgtggacggctattggtacaacggcaaggccaacgcctgcatggaaaagaatgccgagatcgcggcacgactgcccgggcttgtggcaaccgtggtcgttccgtacctggatgcgcgacctgaggtcgggaacatcgccggtggcatcgactacgatgcgtttctggcgccattcagcgccggccagatcaacttcacccgtgttgcattcaaccatccgctgttcattctctacacgtccggcaccaccggcgtgcccaaatgcatcgtccatgggcatggcggaaccttgctgcagcatctgaaagagcatcagttgcacgctgacctgcgccccgatgaccggattttctacttcagcacgtgcggctggatgatgtggaactggctggtatccggcctggcttccggcgccacactgctgttgttcgacggatcgcccttcatcgccggcgaggatggtcggcctggaagtatcctcttcgactatgccgatgccgaaggcatgacgcatttcggcacgtcggcgaagttcatcgacgccatctgcaagagcggcctttcgccgcgccggagtcatcggctgtcggcgttgcgggctgtgttctcgaccggtagtcccttgtcgccggagggcttcgagtacgtctaccgcgaaatcaaggacgatgtgtaccttgcatcgaaagcgggggggactgacatcctctgcgctttcgtgtgcggtgtgccgacgctgccggtctatcgtggcgagattcaacgtgccgggttgggcatggccatggcggttttcgacgaggccgggcaatccgtcaagtgcgccaagggcgaactcgtttgcacccggccattcccttcaatgccggtggggttctggaatgacgaggatggagcgcgataccgcgctgcctatttcgaacgcttccccaatatctggtgccacggggacttcgcggaaatcacggcgcatgacggtttcatcatctacggccgttctgacgccacgttgaaccctggcggtgtgcggatcggcacggcggaaatctatcgccaggtagaacaattgccggaaatcgtggaatcgctggtgatcggtcaggactgggctgacgacacccgggttgtgctgttcgtcaagctgcagcctgttcagctgctcgacgaggccctggttgcacggatcaaacggcagatccgcaacaacaccacaccgcgccatgtgcccgccaaagtcctgcaggtggaggatattcctcgaaccaagagtggcaagatcgttgaactcgcggtgcgcaatgtggtgcacggattgccggtgaagaacgtagatgcgctggccaatccggacgcgctggagttcttccgcaatcgcccggagcttgccagctga

SEQ ID NO: 358183 - DNA, 1023 bp, Pseudomonas aeruginosa
atgacggatttgaaccttgtcacggggtgcatgggcattggcgcccgcgcccgcttactgatgcctggcctgatcgcaagcgtcatggtagccgccgcggctactttcctgtctgaacactacgatgcgccggtgatgctcttcgccctgctgctaggcatggcgatgaactttctttcgggggagggcgtctgcaagcagggtatcgagttcaccgcccgcgaaatcctgcgaatcggcgtcgctttgctgggactgcgcattaccttggaacaaattgccgcgctcggatggcagccggtcgtcatggtcgtggtgctggtcaccgcgaccatcctggtttccatcgtggcggcccgggccatgggcttcaatgcgttgttcgggctgctcagcggtggggcgaccgccatctgtggcgcctcggccgccatggccctggcagcgtcattgccggcgcatccgaagaaggagcgcgccaccttgttcacggtgatcggcgtatcggcgctgtccaccctggcgatgatcctctatccgatgattgcccgtgccttcgacctggcgccgctggatgccggcatctttctaggcggtaccatccatgacgttgcccaggtggtgggcgccggttacagcatgggcccagaaacaggggacagcgccacggtcgtcaaactgatgcgagtggccatgctgctgccggtgattctctgcgccacgatcatcacccgcgcccagggcgcggagccaggcggcaagcgcccgccgctgctgccctggtttgccgtgggttttgtcgtgctcgcgggcatcaacagcaccggcatcgtgccggcgcagctgcaaagtgccggcaacgatctgtcgcgctggtgtctggtcatcgcgattagcgctcttggcatgaagacccaacttcgggaactggtctcggtgggcatcaagccggtcctgctgatgctcggggagaccgctttcctcgccgcgctggtattggcaatgctgcggttcgccccgtga

SEQ ID NO: 358184 - DNA, 666 bp, Pseudomonas aeruginosa
atgcttgaccaaacaagacaaacacttagcatctggtgccccgggtggccgattggcaagcgctacctgcaccaggcgctggcgtcgttcacccagagccaccccgaactctgtgtccagattcgctggcggggcgttcagctgctgccggagctcccggcgcagggcgtgcccttcatggcgttccatacccagcgcctgggtgatgaaaccgcggcgcgggcccacctggagcaggttcaggaggccgcctaccgtgccgacgtgcagatcgatctgcagcgcatcgagcgcttgcccaacaccgccaatgcccaccgtctgatggaattcgcggcggcgcgggctggcgagcggcaggtcgacaggttgctggagcgcctgttcgcgagctatttccagcatggcgaggatctggctgatcgcgcgctgcttttgaagctcgccagcagttgcggcctggatgcggctgagtgcgaggcggtgctgtttgacgacggtcgcccgtatatcgcccgggacttcgtgccgagtgaccgcgcggtgccatcctttgctttcgatcagaagttgaccgtggcgggcgcgcagcccccatggctgctgctcgcccaattgaaccgggtgttggaacgacgctcggcacgcacggtgtgccacgcatga

SEQ ID NO: 358185 - DNA, 1635 bp, Pseudomonas aeruginosa
atgcttggcttaatgcaacaccacccactcctgctctcctcgctgatcgaacatgcatgcgtgtcccatcccgacgcacaaatcgtttcccgaacggtcgagaggaccattcatcgctgcacctatgccgacgttgggcggcgctcgaaacaggtcgccaacgcgctggacgcgttgggcgtgaaacctggtggctgcatcggcaccctggcctggaacggctaccggcacatggagctctactttggcgtgtctggcgccgggtcggtgctacacactatcaatccgagactgtttgcagagcagatcgaattcatcatcaacgacgcgcaagatgagtatctgttcttcgacctgaccttcaccgacctcatcagacaattggcgcccaggctcaagacggtgaaggcattcattgcactgtgttcgcccgaagacatgcccgacttggaacttcacaatctgctgtgctacgaacagctgatcgcccatcaaagcgagaccttcgaatggccgcaactcgatgagaacagcgcctcttcgctttgctacacctccgggacgacgggcaatccgaaaggcgtgctgtattcgcaccgctcgtccgtcctgcactcgatggtgtcctgcatggcctctggtttctcgctttcggtcgaggattccattctggtcgtggtccccatgttccacgtaaacgcctggggcatgccgtactccggcgcgctcagcggagccaagctggtactgccgggcccggcgctcgacggcgccagcctctatagcctcatgcgcgatgagcgcgtgacgatggcgctgggggttcccactgtatggatgacgctccagcaacatgcggagtcgactggctgcatacctcgcgaggagctctgcctcaatcgcgtcgtgatcggaggtgcggcagcgccacgaaccgttgttgagcgtttcgagatggcattcaatgcccgcgtggtgcatgcctggggcatgacggaaatgtcgcccctgggcacggtttgtcacccactgcccaagcacctcgagcacggactggatcagcgtcttgatctgcagagcaagcagggccgagcgctgttcggggttgccatgaagatcaccgatgaagaaggccgccagctgccgcgagacggcgtgactttcggtaacctgaaggtcaagggcccctggatcacacgcgcctatttcggcaaggagcacgaaatgattgtggatgccgaaggttggttcgacaccggcgacatcgcgaccatcgatgccgatgggtacatgcagatcaccgatcgagccaaggacgtcatcaagtcgggcggcgagtggatctcgtcgatcgatctggaaaacgccaccctgcaacaccccgccgtagccgaggcagccgtcatcggcgttgtccacgagaaatggcaggagcgcccgctgctgatcgttgtgctccgccaagggcaggacactacaggagaagcattgcttctgcacctcagtgagaaagtcgcgcgttggtggctaccggacgacgtggtcttcgtcgactcacttcctcatacctcgacaggcaaactgcaaaaaatggatctgcgtagcaaatatcgggatcacctagtgacgcgctga

SEQ ID NO: 358186 - DNA, 1488 bp, Pseudomonas aeruginosa
atgcgtttaaagcaacggatgttggcgatttcggggatagcggcggcactggctttttcaccggttgggcaggcggaagaccaggccccggcctcgccattgatcaagcagatcaacaacggtaattggcttgaccccaaggaagccgagagcctgcgcgatgagttgtattaccaacgcgccatccacacatacatgaccatgctgccggccctcaacaccattggcatgaaagacggctcggagaaagccttcggcgccggctacaacgtgttgccgatctggaagcaacgcatggacgctcggaccatggtgcccacaccaaacgccgacgtgatctactccatgagctacctagacctgaagcagaccggcccgttggtggtaaaggcgcctgccaatgtcatcggtatgttcaccgacttcttccagcgcaccctgaccgatgttggcaccgtcggccccgaccgcgcacgcggcggcctctatctgctgctgcctccggattacaatgggcctgtgccgggcggttactttgcagtcaagtcgcgcacttacaacgtgttcctcttcttccgcaccgtcatggccaaaggcgacggcaaacctgaccctgcgcccgctgtggccaacgccgaaaccacccgcgtctacccgctgttcacggtcgagaaagacgtcaagccgatgcagttcccggacgccagcggcaaggcactgaacatgatgtatccggtcgacaacacctactggatcaagctcaaggccttcgtcgactatgagccggtcgaagccatcgaccccgaactgcgcggcgtgctggcctcgatcggcatcattaagggtgagcctttcaagccgacggccaggcaggatgagctgctcaagaaggctgtggaaaccgcgccgaagatgatccttgccaaccgccaactgggccgtgaggacaagcgcaatctctattacacggaccgccagtacgagaacacctgggctggcggcaccaacgactggatgcaggacacttacctagacgtcagccagcgcgccaacttcttccagttcgcctactcgtcggcgccggctatggtaatgcacaccacgggggccggttccaagtatccgtttaccgggcgcgacaaggacggcaatttcctggacggcgccagcacctacaaactccgcctgccgccgaatccgcccgccgcgttgttctgggcagttaccgcgtacaacatcaccgacggcaccatgcccgaaacgaagcaactgttgccctccaccaatggctactacgacatacccaagcacgcggacggttcgctggaaatctggtttggtcctgagaagccgaccgacgtagcggatgccgcatttatccagaccataccgggccgcaacttcctcgtagcgctgcgtttgtatgggagcgaagacgccttctacgaccaaacttggaaaccggatgacgtggtgaaggtcaagtaa

SEQ ID NO: 358187 - DNA, 1470 bp, Pseudomonas aeruginosa
atgatgccgcactcgctgaaagtgctccccctggccctcctgagcttatctctcagtacaccatccctccaggccgccgaacagtcatccggcgccccggctcagctcgcccagcctgccaacggcgtgctgatgcaccccgaatacgccaagaccatcgcccgcatggcctacctgtggggctggccaatggtgaacatgctcaaccgcagcgacacgattaccaaggcaccacacccaggcctgatgggcggcatcctgccggtcgcgccgcgtggccagttaggtatgctgcacgactacattaccccggcggaaaccttcgtcacctgcccgaaccaagacgtggtctacgggctgggcttcttctcgctggacgacgagccggtgatcatccaggtgcctgacttcggcgaccgcttttgggtctatgcgatctacgaccagcgcacggatcaggtcggtgagctgggcaaaccctacggcagcaaaccgggcttctatctcctggtggggccgaactggaaaggcgataaaccgaccaacgtagaggcaatcatccgcagtcccacggtgctcaccaacgctattccgcgtattttcatggatgacaccgccgaggaccgcgcggacattcaggagaagctcaaccaggtcgtcttctatccactcaaggacttcgacggaaagatgaagaccatcgactggaagaacaccccgaacatccccaatccaaacgccgaccaggccagcggcggggaaaccaagtgggtggtcccggaaaagttcttcgaccagttcccgaaaatactggagatggtgccgccattgccgggcgaagaagccctctacggccagttccgcctgctgatggacgccgccagcaaggatccggaactcaagaagctgctggtgcaaacggcagtagaaagcgaggcgggtatcatcaagccgttcttcgagtggaagcataacggtcgtcccgcaggcaacggctggaaccgctccaccaacaacgcccagttcggaatcgactacttcaaccgtaccggcacgtccaagtcgaacatgttcgacaaccgccccaccgaaacccagtacttctacaccgacttcgaccagtccggcgccacactgaatggcaatcacagttacgaaatatccttcgccgccggccaggaaccgccggtgcaggggttctggtcattgacgctgtacaaccagaagcatctattcagcgccaacaagctcaatcgttattcgttgggcaccaagaacaaggacctgaagcgcaacgccgatggctcgctgagcctctatgtcggccccgtgtcgccaggaaaggataaggaaagcaactggctgccatcacctaaggagccgatctcgctctaccttcgtgcttactggggcaaggagccgatcctcgatggcagctggaagccgcccgtgatcaagaagaccaagtga

SEQ ID NO: 358188 - DNA, 207 bp, Pseudomonas aeruginosa
atgtccaaactgctcgagattttgccgcccgaccacccggcgtataccgaggcagttgaggcaatgcgccggtaccacgaagctcagcgtacaggtgcgcctgaaatcgaagtggaaagattgcgcttgattgctgagtcacttttccaggctgtaaccgactaccagatgaaggccttcggcaagggcggcagaacaccccattga

SEQ ID NO: 358189 - DNA, 837 bp, Pseudomonas aeruginosa
atgaagatcgaagtggtacagacgaaaacccgcgacggcgacaccgcccacaatctcaaaggcattctcaaggccatggcccggtatgagtcggacaccgatattctgatgtttcccgaatcgcatctgaccggattccttaccgcagatgatgtggattcgctgtccgaaaccattgacggtgacgcggtgcaggccgtagtcgttgaggcacgccagcgcaatttagcggtagtgttggggctgtatgagaatgccaatggcaccttctacaacacgactcttttcattgcccctgaaggcatcctgcttacctaccgtaagactcacctgtgggtgccggaacacggcatcgtggtaccgggcgaccgctttgccacggttgaatggcgcggtgtgcgtctgggactgttgatctgttatgacagcgagttccccgaaaccgcgcgcgcattgaaggccctcggggcacagttgatgttgatcaccgacggcctggcagagcctgaggatcatgtgcatcgcgtgtcggtaatggcccgggcgatggagaaccaggtattcgcagtggcagccaaccgggtcggtgacgggctggatggcagtgtgttcgtggggggtagtctagcggtagatccgtatggccgaacgctgttcgaggctggtcgcggcgagtcgcggcacggcgtgaccttggacttgtcattgatcgacaaggcgagggcgtttcatgactatggcgtcaatcagcgcatggttatgttgggggagcagatcgagcatgccaatggcgtgcgtgagatgatcattggcaatacagtcaatcggtggccttga

SEQ ID NO: 358190 - DNA, 813 bp, Pseudomonas aeruginosa
atgagcttcaacttgcaggatctttcgtggcaccaaggcgtgggccaatgcatcgagcaccttgaccggccgagcttctggcacaccttggccacagtgctcggcgacttcgtggaagtggacacctgggtggcgctgctattcagccacgacaagccgctgatctttgcccaaagcccctacaagcatgagggtatcgacccactggtgagtgaatacgccaatcgcctgtacctacttgaccctttctatatcaacagccgtgagcaagcattgactggcctcgtgcgcctcgccgacgttgcgccggagcagtttcagcagaccgactattaccgcttgtacttcactcacaacgtggtcgccgacgaagtccagttcaacctggcactcggagatggacgcacgctgtgcctgtcactgggtgggcgctcacgcttcgacacccaggccatcgctcaactggagttggtgcgcccctggcttatcggcctgcttcgccagcgcctgcacttcgagcagccaccagaacgcacactggcaaagcccgggcctcgcctcgcccaaaggcaggacgatgcgtgccgcaagctagagtcggccctcacggcccgggaactggatgtggtaaggctgattctttcggggcactccaacaaggagacggcgaacaagctcaagttgtccgccgagacggtgaaagtccatcggcgcaatgtctatcgcaagctgaatgtgaactcccaaagcgagctgttctcgctgctgttcctcgccggcgatgacttggccaacctgaagcctgctccctag

SEQ ID NO: 358191 - DNA, 1317 bp, Pseudomonas aeruginosa
atgcctgatgctacgcccactaaactttctctgacatccctgacggccttcggcctggcctacatgtgcccaagcctggccatggtcatcttcggcgtcatctccgatcgcagcggcggtatcgccccgagcgccttcttgctggccaccggagccatgctgctgtcggccctgagttacgccaagctgtcacgcctgttcccagtgtccggttcagcttactactatgcaaaacgcttgctcggcccaggctgcggcttcgtggtgggctgggcagtgctgctggcttatctgttcatgcccatggtcgcgtggctgttacagtcagtgttcctgaatgcccagtttccacagatccccacctgggcttggctgctgatcaacattggcctgactacggcagtgaccgtcagcggcatggccttgaccgaccgcctgaacaagctgctgacattccttagcgtggccttggtactgctgtttatcggttactgcctgcgctatgtagccggccagcctcaaatcggcttcaccgacgctgcctggaacgatcacagcacactgaccggcctcaccgccgctgccgcgatcgcggcttattcatttctcggcttcgacgccgtgaccaccttggccgaggaggcagagcagcccaagcgcgatattcctcgggcggtgctgctagtgatctgcctgggcgggctgttgttcacggcggtggcttacctgatgcaactgagccaccccggcgggcagttcgccgaccctgagacagcgacttatgcactgtcgcttgaggtcggaggccaattttttgctgacttcatcaaccttggcggcattgtcggcgggttcgcctcctgcctggcggtgcaagtcagcgccagccggttgctgtacttcatgggccgcgagggtgtgctacctgcacgctacttcgctcgactgcaaggcaaggcgcgcacaccagtgttcaacctgctgttgatcgccgggctagggctgataggaatctgcgcggatgtgagttcaggcgcatcattgattaatttcggtgcttttctcgcgttcgcagcggtgaatgcctgtgtgatcacctattacctgcgtgaacggcacaggcagcgactgagcggtgtagggtttgtggtgcttccggtgctggctattggggttaacctctatctgctgtcactgttgagcacaatggtgatattggccggggtggcctggttggtgtgcggagggttgtacctcacgtggttgacagcgggtttttgcaaaccaacaccgggattggtggaggttgagccttga

SEQ ID NO: 358192 - DNA, 1101 bp, Pseudomonas aeruginosa
atgctaatttcacgcctcatcaaatttggcacagtctcattactgagtatccaggctcttgtcgcctgggcagagcctgccatcgtgcacctgtacaactggtcggatttccttgcgcctgaaacggccactgaactcgaagcaaccaccggtacccgcctggttcaagatgtcttcgacaatgcagaggtgatggaaagcaagctgatggccgggcgcagcggctatgacgtggtcatggtgccggacgacctcctgccaaacttcgtcaaggcaggtgtgctacaaccgctggaccgctcgcaattacccaactggtcacacctggcacccgaagttctgcaaaagctgcaagtgaacgaccctggcaatcgttatgccgtcacctatatgtggggtaccacaggtatcggttacaacgtggacaaggtgtccaaggccctgggcgtgaatgcccccgtggactcctgggatctgctcttcaaaaaggaaaatatcagtaagctcagccaatgtggcgtggcaatgctcgatgcccccgtggaaatcatccccattgccttgcactacctgggcctttcgcccaacagcaagaacccggccgattacgacaaggccgaagcgttgctacgtgaagtccggccctatgttcgctacttcgattcttcgaagttccccaccgacctggccaacggcgaaatctgcgcggtgattggatggagtggttcagtttacagcgcagtacagacggccgagcggtcaggcaatggtgtcaagatcgcctacaacataccgcgggaaggcgcaccgatctggatgaacaatatggtgttgctcaaggacgcgccacatccgcaacaaggatacgtgctgatgaactatattctggagccgaagatcaccgctcagaattccaactatgtcggctacccgaatggcagcaaagactccaatactctgatcgatgccaaattgcgtgataatccggcgttgtacccaacccaggcggtcatggataccttgtaccctttggagaccttgcctctgcggctcgaacgcgtgcggacccgtctctggaccaagatcaagtcaggcacctga

SEQ ID NO: 358193 - DNA, 762 bp, Pseudomonas aeruginosa
atgagcgaagcaggcgagcgctttctcgagcgcgcccggcaaatcatgctgctcaccgaagaggccacggacgaggcccgtggtgctcatctgacgcctcggggcaggctgcgctttcattgcacccacggcctggggttgctgatcatgccgctggttacgcgctacaacgcctcttgcccggaggtggtaatggaattgaccctgtcgcaacgcaaccccggccctcttgccgatgggcaggatgtggtaatcactatcggtcagggcctgccggattcgcaacagatcgccattcccctggggcatatctacagtatcctctgtgcctctcccgaatacctggcccgcaacggggtgcctgagcaccctgaagacctgcgcgggcatacctgcctgcgcacggtcgacccgctgttcgaggaggactggtcgtttgagggccatcccggcagctgtgtgatcgtgccccaagacaccttcctgaccaacgttgccgatgccatgctcaaggccaccgagctgggtgtgggagtgggcttgctgcctactactcagccagtgaggccattgaacaatggccgattgtgccggctgctggctccgcatcggctccgtctacgcgagatctatgcgctatatccgtcacgccattacttggatgccaaggtgcgcacctggctggatttcctcaaggagcaactaccgttgttgtttgccgagcaccagcgggtggtggatgatcaccggtattggcgttga

SEQ ID NO: 358194 - DNA, 1506 bp, Pseudomonas aeruginosa
atgtttccattgcacaaagtgagtcctctcgcgttgctcgcgccgatcaaggtgggcttgctcaccttggccatggccggttgcgcggttggcccggacttcgaaaagcccgagccgtctgcgccagcggactgggccagctggcgcggtgccgatgagcagctgaaactgcctggcgacaggggtcgaacgctccctgcacaatggtggctggcgctcggtgacccggtgctcgaccagttgcagcgcatggccttcgacaccagcccggatttgcgcactgccgcgttgcactatgcccaggctcgcgcgcaacggagcaccgtcgccgcccagcgtggcccgcaggtcaacgcgagtggaggtgtcacccgtcagcgtcagagcgaatccggttcgggcactcgcctgatcgcctcccttgccgagaacccggatccattggtcaaggagttgagcgagcctttcgacctgtaccaggccggcatcgatgtctcctgggagttggacctgtgggggcgcatcggccggtccatcgaagcggccgatgccgatatccataaccagcaagcgctgctcgatcttgcgcgcctgagcttgacctgcgacatcgcccggaactacttcgagttgcgcactgcgcagcgacagatcgccctcacccgcgaagacctcgcggcgctggaggaccgcctgggtttgcttgaggccagggtcgagggtggaatggtggaccatttcgatctcgagcgtcagcgtgccgagctcgatgcgctcaaggcacagctaccgccgttgttggcccaggcaggtgcgaacagtaaccagctcacgctgctgctgggccaacggccaggcagcttgcagcccttgctcgccagtccgaagcccgcgataagcgcatcgctgcctgacatgcaactggggctaccctctgcagtcgcgctgcgccgcccggatatccgtgctgccgaggcgcgtttgcatcgcgcaaccgccaatatcggtatcgccgaagctgagatgtaccccagtatcagcctgggcgctcggttcggttatgaatcatatttaagcggtgagttttccgattggggcagccgcacctggtctgttggccccagcctgaacttgccgctattcgatcgcggccgtcgcaagagcgtggtgcaattacgtgggttggagcaacaagaggcggcagtgaactatcagcagacagtactcaaagcctggcaggaaatcgacgacgcgctgagcgcctatacggcagagcgccaacgcaatgaagcgctcactgccagggctcgcagtacggaacaagcctataccttggcccaggcgcgttacgaaggcgggaacacggattttctcgccgtgctggatagccagcgtggctacctacaggcacgccgggatttggccagcagcgatgggaatttgtacgtgcgttacgtgatggtcaacaaggcgattggcaacgtaccggtgggcgactctaggtga

SEQ ID NO: 358195 - DNA, 1113 bp, Pseudomonas aeruginosa
atgcatgaactctggaacacgctctgggcgattggctttctgatccgcaaggagttgctcgccttgttcaaggagccctccagccgcatcatcctgatcgccccggcgctgatccaggcgctgctgtttggctacggcgccacgtacgacctgacctacgcgccttatgcggtgctcgatcaaagcaagggcgccgctcccaccgaattgttggcccgcatcgacggtactggtgtgttcaagcgcgagagggtgttgcattcatcccggcagattgccggtgccatcgatgatgatggtgttctgctggtattgagttttcctgccgatttcgagtcgcgtctggcggccgggcaaattgcacctttgcaggtgattctcgatggccgcaactcctccaccgccggcgctgccgcagggcaggtcggcgccatcgttgcggctttcaatcagtccaggggtggtgcggcgatggtgaatatcgaacgccgtgcatggtacaaccctaacctggagtcgcgctggaacttgatgccagcactgatcgcctcgctcagtatgctgcagacattgctgttggccgccttgtcggtcgcgcgcgaacgcgaacagggcaccttcgaccaattgttggtgacaccgctgacaccgatgcaaatcctggtgggcaaggcggtccccgccattctggtgggtttggctcaatccaccatcatcttgttggtgatccgtttctggttccagattcccatggcgggctcgcccgcattgttgtacctggggcttttggtgtttaccggtgcggcagtggggatcgggctatcgatctcggcgatgtcgctgaacatgcaacaggcgatgctctacacctttttgctgatcatgccgatgatgctgctttctggtctgctgacctctgttgacaacatgcccgcagcgctccagatcggtacctatgtaaacccgctgcgattcgccaccgatctggtgcgccgagtgtatctggagggggctggattccagcagatcgccttcgacttcgtgcccatgctgctggtggctgccgtgaccttgccgctggcggcctggttgttccgcaatcgactttcctga

SEQ ID NO: 358196 - DNA, 1128 bp, Pseudomonas aeruginosa
atgatggggacaggtttcgctcgtcgtctggtggcgttggcgcgcaaggagacccggcagatgctgcgcgaccgcagcaacctggcagtgggcctgctgctgccggtggtgctgatcctgctgttcggctatggcttgtcgttcgacgttgagcacgcgcctgtcgccgtagtgctggaagattcttcaccgcaagcgcgggaactgctcgccggactgcaggattcgcgctacctggcgccgcagtgggtcaccaacatgcctgaagcagagcggcgcatgcgcctgggcgaggtcaatgccatcgtccgcgtcccgcaggattttccgcggcaactggcggcaggggaagggcgtgtgcagttgttgctcaatggtgtcgactccaacaccgccaatgtggtcgaaagctatgtcaccggcgcgatcggcacgtgggcgcaacatcagcttgaccgtcagggcaacaaggctgcaggcggcagcgtgcaggtcgaacagcgcatgtggttcaacgaagcgtcgaccagtacctggttcctggtccctgggctgatcgtcctggtaatgacgttgatcggtgctttcctcacgtcgctgttgatcgcccgggagtgggagcgtggcacgttggagtcgctgtttgtcaccccggtcaggccgctggagctggtcctggccaaactggcgccctacatggtggtaggggcaatcgacctggtgttctgcctgctggctgccaagttcctcttcgaggtgccggtgcggggttcgctgtgggtgatcctgttggcctcgatgctgtatctgaccgtttcattattgctaggcctgttcatctccggcaagacccgtaaccagttcgaggccagccagatggcgctgttggtcagtttcatgccggcgatgatgctgtcgggcttcgtcttcgatctgcgcaacgttccggtcgtcatccaggtaatcagccagctgttacctgcgacccatttcatgggcttgatcaagacgctgttcatggccggcgataactggcagatggccttgcgcgattgttcgattctctgcctctacatcgtcgtgctgatcgccgcagtaaaccgtacgctgaagaaaaccctggactga

SEQ ID NO: 358197 - DNA, 1695 bp, Pseudomonas aeruginosa
atggccgtcaatgaggtgaccttgacggttcgtgccggtgagctcaccgcgctggtcggcccggatggcgccggtaaatcgaccttgctgcgcatgattgcgggcttgctcaagccggacgccggaggcctctcggtgctgggtatcgatgtcatcgccaagccccaagcggttcaagaccgtatcagctatatgccgcagcgctttggcctgtatgaagacctcagcgtccaggaaaacctcgatctctacgccgaccttcacggcgtggcccaggccgagcgccgtgagcgtttcgcccgcttgctggcaatcaccgacctggcccgtttcaccgatcggcccgcgggaaagctttccggtggcatgaaacagaaacttgggctggcttgcaccttggtgcgttctcccgacctgttgttgctggatgaaccgagcgtcggggtagacccactttcgcggcgggacctgtggaaaatcgtccagcaactgatcgatgacgaacaattgagtgtgatcgtcagcaccgcctacatggacgaagccgagcgctgcgcgcaggtttatgtcatgaaccagggcaggctgttggcgcagggcaccccggcgtcattgcgcgccaaggcgcggggcttgaccttcacggccaagccacctgcggggatgccggcgcgtgacttgcaagcgcgcttgatcgatgccgtgcaactgatcgtcgacgcggtacccaagggcggcgaggtgcgcttcatcctgcagtcgcaggaaagtatcgcatcggtgggcgatctgcttggcactatcgagcacaagccacggcctgaagaattagaagacgcgttcatgatgctgctgcgcaagcatcaggcgcatgacagccctgcgccggcggttgccacggatgctgcagcacccgtggcaaccaggaatgctcaggagcccgccatcgtggtgcatgatcttgttagaaaatttggcgatttcacggctgtcgccaacacctcgttcgaggtcgccaggggcgagatcttcggcctgctgggccccaatggcgcgggcaagaccactacttttcgtatgctctgcgggttgcttccggccaccagcggccagctgcaggtagccggcttgaacctgcgccatgcccgtgcccaggcccgcgcgcgcattggctacgtgtcgcagaagttcgccttgtacggcaacctgagcgtgcgggaaaaccttgagttcttcgggggtgcctatggtttgcgcggtgcggcgctgaggcagcgcgtggatacggtgctagcgcagttcgagctgcagcctgctgcgcgcagtggcgagctgcctgccggttacaagcagcgcctggccatggctgccagtttgttgcaccagccggaaatcctcttcctggatgagcccaccagcggtatcgacccgctggcgcgacgcgccttctggcgcaccatcacggcgttggcccagggcggtgtgaccatcatcgtcaccacgcatttcatggaggaagccgaatactgtgatcggatcgccattcaggacgccggccagatgttggcgttgggtacgccgctgcaagtgcgtgaacaggccggcgacgatcatgccggagatatgaacacggcgttcatcgccattgtcgagcagggccgggccgcccgctcgggcgcaggagccgcatcatga

SEQ ID NO: 358198 - DNA, 1002 bp, Pseudomonas aeruginosa
atgaagaagcctgtcatcatcgccgtactggttgtgggggtaatcatcgctgcgctgtgggtggggggcagccttcggcacgatgatccgaataggctcaagctgcatggcaacgtcgatatccgtcaggtgtcgctggcgttcgatggcaatggccgcatcgaacagctgcgggtcgaggaaggcgacgccgtgaaagccggtgaggtgctcgcgctgctcgatacgcgcaccctcagcctgcaggccgagcaagcccgggcgcagattgccgtgcaggaaagtaacttgttgcggttgcgtaatggctcgcgccctgaggaaattgcccaggcgcgcagtcgcgtggccgccgccaacgccgacatcgcactggccaggcaagacctgctgcgcttgcagggtatcggcgagaagaccaatggccgaggggtcagccagcaggatctggaccgggcgaaaagctcgctgcaggtcgctcgggccaagggcgaggagcagcaaaaagccttgcgccttgtcgagctgggcccccgggccgaggacgtggccagcgcacaggcacagctgcaagcctcgcaagcgcaactggcgttgcttgagcatcaagtcgaccttggaacattgatcgcgcctgccgatgctgtggtgcgctcgcgtctgctggagcccggcgacatggcatcgccgcagcgcccggtattcgccttggcgttgaccaagcccaaatgggtacgggtgtacgtaggcgaagcagaccttggccggatcagaccagggatgagcgcgcgggtgtttaccgacagttacccggaccaacctgtcgccggtaaggtcggctacatctcctccgttgcggaattcacgcccaaagcggtacagaccgaagagctgcgcaccaaacttgtctacgaggtgcgggtatgggtggaggatgacaacgacgtgttgcgcctggggcagccggccaccgtcgatctttccgttggtaatgcgcagtga

SEQ ID NO: 358199 - DNA, 639 bp, Pseudomonas aeruginosa
atgaccgaatcgagtcgcagcagtcgaaccgatggcgaagcaacccgctcgcgcattcttgagacggcgggcaaattattctcccggaccggcttcgcggaaacgaccagcaaggcgattgccgtcgaggccgaggtagacttggcctcgatcaattatcactttggcagccgcgtcggcctttatcaggctgtactcgccgaagcgcatcggcgcatcatcaacgtcgatgacctgctgagaatttccgagcgcgacgttccggctgaagaaaaactgcgcgacttcttcgcgattctggtagacgccgcacaatcggggggaggatggcattcgggtgttctggcccgcgaactgctgtcgccgacatccaacttgcaggtgctcttcaccgaggagttgcagccaaagctcgttatcctcctggggatcctgagcgagataaccggcatcgccacccaggatcctgctctgctgcgttgcttgatcagcacagcggcgccatgcttgatgctagtggtcgccagcaacggtatacccggcccggcgcagacggtattgcaactcccgaaggaggaactggtcactcacctttatacctttacgctggcaggtttgaaggccatcagccgtcaatag

SEQ ID NO: 358200 - DNA, 1035 bp, Pseudomonas aeruginosa
  misc_feature (1007)..(1016): n is a, c, g, or t
atgacaaatgatctgaaagcgggtgaacttgtagtcgctaaaggcaaacttgccaaaattcagcaagtatttagtgagaaaaatataagagtgcaactcgtttccacgggtgtcgcaataatggtgtcgcggcatgacattgagcgaattggaaatgcaactgatgatagtgacataagtcgcgatgccaatgattatacagctgagcagttgttggttttttctgaacgttacgatgtgctgaggaagtggcggaggggagagttgaccgccgttgagggtagcaaaaaactaaacttgtcgaaaagctattttttccggttggctaagctttatgatgaagatttgggtccattaagcatggctcttaggaaaagaggtaggaaaaaaggggtaacacgtctaactgaagagatggagacgattatctccaaagctaccaaaaaaatattcaaaaagggagtagcgagcttcagcaaggtgtggcttgaggttgataccacttgccaagaaaaaaaattaacctcgccatgcaaagatacagtgcttcggcgtgtgaaaattttagtatcagaagaggatcagtttaagttcaagaagggtaaagatgccgcatcgcaaaaatactcaagccgtcctgggaaaaagtcgatttcgagaccgctacaatgggtacagatggaccatacgctggtagatatcatattgttggcggacgaccgagtacacataatagggcgtccctggttgacggtcgttatcgatataaaaaccagagttatccttggctactatctaagtcttcacgtcccttccgctgtttctgttgcgtgtgcattgagtcacagcattttgccaaaaaaagagtttgcaacaaaattgggcctggacccagtggattacctcttctatggcgtgcctgaggtattgcatatggacaacgcttcagagttcacttctcctaaattgaaggcggggtgtacatcgttcggtatcgatcctgagtnnnnnnnnnncctgagtataggccaatag

SEQ ID NO: 358201 - DNA, 744 bp, Pseudomonas aeruginosa
atgacgggtaaagtccagctgctgaaaggctccaccatgtctaatactgttgctcgccggggagtcgatagtgaaaagtccgcaactatgactttctccgaatttactcggtggtttgcgcgcgaggttgttgtttatcactcgacggttcactctcaattgggtgagagtcctaggcaagcatggaataattactttgcaccaagtgggggtgtgccgtatccacctaagattgctcagccagataagctaaggctttattttatgcctgaggagactagaaaaattagtccgcagggtataagtctacatgggcagcaatattgggatcctattcttgctcctttcgttgggacgcagcatgtagtggttaaatacgatccatttaatctaaatgcagtatgggttaagctcaacagtgaattttgcccagtgcggttgtcggatttgacggctcaagcagcaacctacgaagagtatagagctagtagattctatcgtaagcctattcgggcaggtgctattgacagcgaggcaggcagaaaagcttacagagaaaagcaaggcattgagaaagagagtgcaagactgacaagaaaggaacgccgccgcttggcctccgagcaaatttatcgtgaggcatattcgcctgcggatgcagctacgcaggttggaggagtcggtgatagaaaagctccgcctgattattcagtgcgacccaaaagattcacctcggagaattag

SEQ ID NO: 358202 - DNA, 1032 bp, Pseudomonas aeruginosa
atgttcactcgcaagtaccgacagatgaacgccgacttgcaacagcaactcgccgccgagcgcctgcacatggcggccctggaccgctccatggcgcgcgtggagttcgatccggacggcaatatcaccgatgccaatgagaatttcctgaccctgctgggctaccgccgcgacgagatcctcggcaaaccgcatcgccagctttgcgacggcgcctacgcgcaatcggaagactaccggcgcttctgggaacgcctgcggcgcggcgaacacttttccggccgctgcaagcgcattacccgcgagggccggccactctggctggaagccacctacaaccccgtacgcgacgggcagggtcgactgctgaaggtggtcaagtacgccagcgacatcgatgccatcgtccaccaggaacacgagatgcagagcaagctggatgccctgtcccgctcgatggcgatgatcgagttcgacctcgacggcaatgtcctcgcggccaacgacaacttcctcgccaccatgggctatggccgagccgagctggccagcgccaaccaccgtcagttctgcgaaccgggctaccgcgacggcccgcagtacgccgacctctggcgccgcctgaaccgcggcgagtacgtcaccgggcagttccgccgggtccaccgcaacggccagccggtctggctggaagccagctacaacccggtctacgacgccgacggcaagctctacaaggtggtcaagttcgccagcgatgtcagcgaccgcatgcgccgctaccaggccgaggcggacaacgcccaccaggcccataccctgtccaccgagacccgcacggtcgccgaacacggcgcgctgatcatccagagcgcggtggaggaaatgctcaagatcgcgaataccctggatgcttcctcgctgaacatcggcgaactgtcacagcactcgcaacagatcacctcgatcgtcaacaccatccgcgagatcgccgagcagaccaacctgctcgccctcaatgccgccatctag

SEQ ID NO: 358203 - DNA, 333 bp, Pseudomonas aeruginosa
atggctgaagaactgaaaccgtgcccgtgctgtggaggagaggccgtcttcgtcgagctggacgacggcggaatggttgctgtgtgcgcatccagaggatgcgtcgcgagcggtgttgcacgctacgcatgtggagacgagccgagaccgcttattgccgagacctggaacaccagaacagtccccgcaggccatgtggtggttccgcgggagttgctggaggaacttcttgaggccgcgaaggacggtgcggcgcacaagggagaatacctgtccaagaagtatggcgagccagaactgttcgcgaagttcgataccctcctccaatcctaa

SEQ ID NO: 358204 - DNA, 999 bp, Pseudomonas aeruginosa
atgaacaaagcgaatgaatgcacctgcccttctggcgacggctccctcgtccatccgtgcccggcacatccggcatcggtaaagcagacaggcggggatgagcgcgacttgcaggcagagggcgcgcagggggagttgctgccatgcccgttctgtggcggccaagcacacctgacttacgatgactacgtgcacgacgatcttcggccaatgccggtcgtggaatgcaacgcatgccacacctgggtgcgcgccgagtcgtggaacaagcgcgccgccctggcgcaaccctccccggcgcaggcagagggtgctccagtggtcgggtgtctttgcggcatgcccatgaccgaaggtcatcactcgcaggacggttgctgcaatcttgaagagttcgcaccacaggcgcaggccgagcaggcagaggcggagcggccggaagtggtggcgtggcgttacggctccagcggcggaatcgtcagcgacaaggcatgtctcgatgaatggaaatccggcggcgaatatcaatcgctgatgaccgtcgcccagcacgaccgcatcgtcggggagctgcgcactgaaatcgcaatgctccgcagctacgagtcggagtgggagctactgctgaatgagcatgagcagctccgcgacgccgcccaggccagggtcgcggagctgactgcaacccgcaatcgctacgggttagacgcccactacttcaacaagaacctccagcgcatcctgcgcgacttcgagagcttcacgcccgacgaactcgctcgctccctgatcatcctggctaaggtcgccgacgaaaaggtcgtagcccaggctcagcacagcgtgccggaggggtggaagctggttccgattgagccaactcaagcccagttgagcgcaggtcaaaccgcgtggcttgccgatccgatgcgcagatcgacaaccttgtaccgtgcaatgctcgccgccgcgccgcagccagtagcggagggagagtga

SEQ ID NO: 358205 - DNA, 306 bp, Pseudomonas aeruginosa
atgacaacccctatcagtgatgagcagttggcggagttggaagggtattcgcagcatcccgctttcctcggcgacgaagattcagcaatcaccatgggagaactgcgcggtctgatcgcccgcctgcgcgctgctgaggctgatgctaagcggtatcggtggctgcgtgacagcgggcgtctgctcggcgatagcatggactctcacgcggactacttcttcgtagtcacggctgacggcgaggacgtcatgtggtttgagcaactggattcagccatcgacgccgccatggagcgcacgccatga

SEQ ID NO: 358206 - DNA, 186 bp, Pseudomonas aeruginosa
atgagcaagaagatgaccgtgcgcgagtacatcaagctgcgtttcgcagagcttgaacggttcgcggacgattgggagcagaaccaagacgaccacggcgaagacgattggccgctttatctcgacgctgctgattggattcagcaggaagacgcctacaacgagtgcgccagagagaagccctga

SEQ ID NO: 358207 - DNA, 186 bp, Pseudomonas aeruginosa
atgcccatttccaccgagcaggcagcagtgctccagcagctgcgggatcaaggctatgtagtcttgctcgttgaaccgagtgaaactgaacacatcagtcgagaaaggttggagagccgtttgcgggccgatgcagcggatcacattgaggacctgttgtcccttgaggctgtccgaattcgttga

SEQ ID NO: 358208 - DNA, 1074 bp, Pseudomonas aeruginosa
atggggcacattcacgcctatgccaactggctagaaagtcagtccatcgattggtggcactttccggctagggagtcggaacgatgtctcgtgcgttttcggggtttcctgattgaggaaagagaccaggggaaattagctccctcaacggcaaagcaacgaatggctggtgtgatccgattttaccggtggctggcggcagcgaatctgatatccccggattggccgatgtggcaagacaagaccattggtgtgcagctggttgatgcgttcggattccaacgtaccatgaaggtatcaagcactgacttggctattccaaaccgaaagatcccgggcctcactctagaagacggattgcttcctgttgccgctatcgatgtagcgaacattctgtcattcgcagatgaacatgccagtgaggagctagcgataatgctgcgcattggttttggaaccggcatgcgcattggtacgatttgcgacctccaatggcaaacacttgagcgcgctgttcccgatccaaacttccctggtttttacctcattgctgtaggtcctggtgcacaccctcctgttaaaacaaagttcggcgtgactggccaaatctggatcagctcgaatgacctggaccttttgaggtcatatatgttttccactcgcaggctcaaacgacagttagcagctgcgaacgaagataagaatcatattttcttaacacgttacggaaagcggtacgaggctaaaggcgattcttcaatcaggggaattaccgtggaaatggcccgcttgcgggtagcagcacggaaaaatcaaataagagctttatatgacttcaagttccatcaatcacgttgcaccttcgcaaccgagctggctaaagctgctctgaaacatggaaatccaggctttgctatacagttggtaaaacaggcacttctacatcgccatgaggctacgaccttaaagtacattaaattcatcgagcgcacccgagcgatggcaaccgcagccgatgaatttaccaaggcttttttagggctagccagtatcgaggtaaatacttgtgcctga

SEQ ID NO: 358209 - DNA, 696 bp, Pseudomonas aeruginosa
atgccaccaccctcaacgtctcaacgcgtaattcaaatgaacgaaaacatcggaaactgctcgatcaaaaaagcgaccgagagaaatttgctaattctcctagagaacgtctttgaaccactgtttaaacgcggcgactttttaaaactattagaggatgcccgtattgcaaccaatgatccaactctacaagcggcactagagcaacaatgggaaagcgaagctaacgagcacgaagaggaaatgggaggtcttctcaaaagcgcaagatacgcgtgcttatatattaaactagcaaacgctgccgaggagaaaaacgaatacaatagagcatgggccttcaccaatcacgccagcctaatcgtcggcgaaacattagaaagatcaaataatatcttaaataaaatagaaacagagactcgatcaaagcaaaatataaaaaatgctttgggaaggaacaaagccacacaagtggtaagagaagaagcggcaaggctgctaacgaaattaaaaccagacggaggctggccatccaagagtaatgcagccgcaatactttcagggcctttatctgactttatcagaaataatagagtcagcggccttagctggtcaaatactgaaagccgcataaaaatctggatgactgaggcgggggttgttcgtgatgcatggaatcagagcagacagcaataa

SEQ ID NO: 358210 - DNA, 297 bp, Pseudomonas aeruginosa
atggaaacgatgcacgcgcggcgcgagtcctgggccaggcatgtccaggcctggcgcgacagtgggttgactcaggtcgcttactgtcagcagcatgagctcaagcccaaggctctcgcttactggatcaggcggagcaagcagacggctacgccgctgaccctggtgccgctggcggtgcaggggccatctgtcagcggggagttgctgctgcaacatgccagcggctggcaggtggcattgccggctggcgtcgatgcggcctggctggccgggttgctgcgggggatggcctga

SEQ ID NO: 358211 - DNA, 1542 bp, Pseudomonas aeruginosa
atgctcttaaccgccgaactcgccgccctgaacctcgctcctgcccagcaggaaggcgtcgttgccgccgtcctgccgctacacaccgaggccgaaaagctgcgcgcccaggtcaagcgcgatgcgttgaaaatccaggcactgacccttgaactggcgcacctgcggcgcattcgtttcggcgtcaaaaacgaagccctgtcgccggagcagtgcgatctgttccgtgagacggctgacgccgactgcgccgccatcgaggccgaagtcgagcaacaggtgccgcagctgcgcacccagcgcccgcgcgccggtcgccagcccttgccggaacacctgccgcgcatcgaacaccgtcacgaacccgagacctgcagctgcggccagtgtggcggcgagctggtcaagatcggcgaagacatcagcgagcagctcgacgttacaccggccaagttcttcgtgcaccgccacattcgcccgcaatacgcctgccgcccgtgcgcaagcatcaccgccgcgccggttccgccggcggtgatcgacggcggcatggctgccccgggcctgattagctgggtgctgatcggcaagtacgtcgatcacctgccgctctaccgcctcgaacagatcgccgcccgtgacggcgtcaccctggcccgctcgaccctggccgagtgggccgggcgctacggcgcggccttgcagcctctggcggatcggctgagcgagttgctgcgacgacgacccgtgctgcacgccgatgaaacacccgtacagcaactcgatccaggccgcggcaaaaccaaacgcgcttacctctgggcctaccgcagcaacgacctggacgagggatcgccgatcgccgtgttcgactatcagaccgggcgcagcggtgcgtacgcacgggcgtttctggcggactggagcggtcatctggtggtcgacgattacggcggctacaaggcgctattccgggccggtatcaccgacgtgggctgcatggcccatgcgcggcgcaagttcttcgagctgcacgcggccaaccagagcccggtggccaccgaggccttgcggcgcatcgccgagctctacgcgatcgaagcgcgcggccgcgacctcgacggcagcgcacggcagatgctgcgcggacaagaagccctgcccaaactgcaggccctgcacgactggctgcagctgacgcggcaaggcgtggccaacgggggtggcctggccaaggccatggactacagcctgaaacgctggccggcgctgtcgcgctacgcgcacagcgccagcctgccgatcgacaacaacccggtggagaacgtcatccggccgatcgcggtgggcaagaagaattggctgtttaccggttcggagcgcgccggccgtcgcgccgccgccatccagagcctgctggccaccgccaaactgaacggcatcgaacccgccgcttggctcaaggatacgctggaaaaactacccagctggcccaacagccggatcgatgagctattacccctcgcgcctcaacctgagtaa

SEQ ID NO: 358212 - DNA, 732 bp, Pseudomonas aeruginosa; identical to SEQ ID NO: 318303

SEQ ID NO: 358213 - DNA, 825 bp, Pseudomonas aeruginosa
gtgccgacggcctggtgggtcaatttcggcagctatgtgcgtggcgcggagggagatgctccctatctggtcggcttcaccggtttcggcactctgggaggcggcaatctcagcatgcgaaccggaggtgatgccggcaatatcgcgccacgcggagatggttcgataccttcgtccggtaaccttaatccgcgcagccagggactggtcttggcggttgccggcactggccggctcacctccgacggcgcgctgcaacttggcggcggcggtgacctgaatgtgagaattggcggggaggtgaacccgagccgggaggcgcgggctacccagacctactcgagttcggggtttgacggtctttacagcggcggcaccattcacgatctgcagggggccctcatcaatctgcgcggttccgcgagcttgtacagtggtgcgctgggaggcatcgatcctcgctacgacactctactgcgggaccccgccgaagtgcgcagcagggatgcgttcagcccgacgctggctagctccacgggcggcctcaccctggtggccggagatactggcatgcgtctggaaacccgtggcgacctggtcctgggcggggtgactgatcccggtagggtgggggtgccgaataccgttggcttcacggctcccgatggcagcgtctaccaaggggggcgggatcgcttggttcagtctctggactgcacacacctcgatcgatctgtttgcggcgggcggcaacctgacgcccagcacccaattggtcgaggcaaccaacgctattcccatggcaggccgaaacctgtcgcctag

SEQ ID NO: 358214 - DNA, 1542 bp, Pseudomonas aeruginosa
atgacgcaagccaacaacgccgtgtacaccgatatcagcgccgcccaactggtagaagaagccattcgccgcggtgagggcgaactggccgccaacggctcgctggtcgtacgtaccggccatcgcaccggccgttcgccggtcgaccgtttcatcgtcgaagagccgagcaccaaggacgcgatcgcctggggcaacatcaaccgtccgttcccggccgacaagttcgatgcgctgtgggcccgcgtggaagcgttcaacaacgcccaggaccatttcgtttcccatgttcatgtaggttccgccgaggcttactacctgccggtgaagatgaccaccgctaccgcctggcagaatctgttcggccgttgcctgttcatcgagccggagcagtacaacccggccggcaaggacgagtggcaggtcctcaatgtcgccaacttcgaatgcgtgcccgagcgcgacggcaccaactccgacggttgcgtgatcctcaatttcgcccagaagaaagtgctgatcgcaggcatgcgctatgccggcgagatgaagaaagccatgttctccgtgcagaacttcctgctgcccgagcgcgacgtgctgccgatgcactgcgctgccaacatcggcgaagcgggcgatgtgaccctgttcttcggcctgtccggcaccggcaagaccaccctgtccgccgatgaaagccgttacctgatcggtgacgacgagcacggctggggcgagggcgtggtgttcaacgtcgaaggcggttgctatgccaagtgcatcgacctgtccgagaagaacgagccggtcatctggaaagccatcaagttcggcgccgtgctggagaacgtggttctcgacgaagagcgcgtgcccaactacgccgatgacagcctgacccagaacagccgcgccgcctacccgctggagcacgtcgagaagcgttcggagaagaacctcggcggcgagcccaacgcggtgatcttcctgacctgcgacctgaccggcgtactgccgccggtatcgatcctgaacaatgagcaggcggcctaccacttcctgtccggctacaccgcgctggtcggctccaccgagatgggttccggcggcggtatcaagtcgaccttctccacctgcttcggtgctcctttcttcccgcgtccggccggcgtctatgccgagctgctgatcaagcgcatcaaggccttcggctccaaggtctacctggtcaacactggctggaccggcggtggctacggcgtcggcaagcgcttcaacatcccgaccacccgtggcgtgatcgcggcgatccagagcggcgcgctgatcggcgcggaaaccgagcacctggacatcatcaacctggacgtgccgaaggccgttccgggcgtcgagaccaatctgctcaacccgcgcaacacctgggccgacaaggctgcctacgacgaggcggcgaagggcctggccaagcagttcatcgaaaacttcaagaaattcgaggtttccgatgcgatcaaggccgccggcccgcagctgtaa

SEQ ID NO: 358215 - DNA, 978 bp, Pseudomonas aeruginosa
atggttgaagtaggaaccttgtcaacgatccttgacatcaacctagagggcgtaggcgctacgtattcaggtaagggtttcagggtcacgtctggattcagccagaccctaactcgctgtcgtgctgtgaatatgggcggagagcctctgtatttcgatgctaacgccgggggcggcactaacgtaacggtattcgaaggatatcctgtcgacacggatacctatgccggatgcgccatagccggagatactgctcctcatcctcggtttttccgtggtatgtggctcagtggcgcgaattttgcgcttggcccaggggctggtaacggcggctcgatgagcgaattctatattcgtgacttgagatatgatgccacttccacactgttccatatttctaatgggcggtgcgccactcttggggctacgacgacccttaagggctttgaccacacaattgacggggttgccttcgcagggcctgttgcgcttgattctgctcagggtatcaacatcggtccttcgtgttccgtaccaacgttcacggaaaacccagctaactgccagtacaactctgtgtatgtccagcgcaggacgtacactccgacctggacccagacctctgccacaccatccgtgggaaacggtacgctaaccggaaactacatccggcacggctatcagtgcatggttgagatcgagcttatcgcgggatctactacggccttcggagatggaacgacagcctataggttctcactcccgttccctgggcacctgtctttcaaccagcgtggcttccctgttcgtatcttcgatacgagcgcgggggctgatttcactgggtgggcgtccattggcgcgggtcaggattacatcaccatctctgtgggaccccagcaggcccgggccacttcgcctatgacgtgggcaagtggcgatatgctgcaatgcagtttctcgtatatggtccgatag

SEQ ID NO: 358216 - DNA, 615 bp, Pseudomonas aeruginosa
atgggcatgatcgccaatacccaactgaaagccgcacagggaccgctgctgctcgactggcgccccgaggaccccgagttctgggcgcgcaacggcaagcgcatcgccagccgcaacctgtggatctcgatccccgcgctgctgctcgccttcgccgtgtggatgatctggagcacggtgactgtgcgcctgaacagcgccggcttcgccttcagcaacgaccagctgttcctgctcgcggcgctgccgtcgatctccggcgccaccctgcgggtgttctattcgttcatggtgccgatcttcggcggtcgtcgctggaccgccctgagcaccgcctcgatgctgatcccgtgcatctggctgggcttcgccgtgcaggacccgagtaccccgtactgggtgttcgccctgatcgcgctgctctgcggcttcggcggcggcaacttcgcctcgagcatgtccaatatcagcttcttctatccgaagagccagcagggcaccgccctcggcctgaatgccggactcggcaacctcggcgtctcggtgatgcagttcgccgtgccgctggcggtggccggcggcctgttcggcgccttcggcggcgagccgcagtag

SEQ ID NO: 358217 - DNA, 882 bp, Pseudomonas aeruginosa
atgagcaatatccttccatccgcccggatgctcgacggcatgctgcacttcaaggaagaagacggtttcagtcgcgcgcgcaagctaggtgccttccacctcgagcacccacggggctgggacttttcggccggcatcgccctggcccagagctattatctggaatccgaggtagacgccgacaacgccttccgggggttccatcgcaaggatctcggcaagtccctgctgggctattcccgcacaggtgccgaccaggacgaactgctgcagatcgaatgcggcctgtggcgggaatatcttcccgcccccgccgccgacctgctttgggcaatgaacgacctgaaccgcagtgttctctcgcaactgttcgcgctggtcggcatcgaggaaagacatttcgacctgatagccggcggcatgtcttccaaccaggcgctgcagtactgcatcttcaatcatttccgcgctgacagcgcccacccggtgggtctcaccgcccacaaggacagcggttttaccaccctgctctacaccacggagcctgggctggagtcgctggaaaatggctcctggattcctttcgatcccatgcccggccatttcaccctggtacttggacactccttcgaactcctaaccgagaagtccgccacccctgtccaggccagctatcaccgcgtccgcagaatggaaccgcaagagcgaaaagcggacaggttcaccttcggttcctacatcggtccgcgctgggaccaggacctgtaccagatcagcggcgagaccgttaagccggtgcaatccttcctcgagtttcagaaacgcaaagccgcggaaatgggttacgaattccatcccaaggtggagacggctcatcgctga

SEQ ID NO: 358218 - DNA, 1620 bp, Pseudomonas aeruginosa
atgagcaagcaaaaagaccaattcatcgccctgctgggcgaactgttccagctcaaccaacccgagctcgactttggcctgtaccgcatccttcacgcccgtagtgcccagataaaagcctttatcgataccgaactgggcagcgagatcgatgcccactttgccgagcaatcgcaaagcaacgcccacgactcgctcgaagccgctcgggtcagggtcgccgaaacactcggcgaagatgccttcctgcccacgggtgaactgaaacccgagtatcggggcaccaaggtaggcaaggaattcgagctcgctcagcagcaagctcgcgacggcggcggcgtgctggcggacgatgcccaggtatacgagcacctgtaccgcttcttcagtcgctactacgacaaaggcgacttcatgtccaagcgctacttcgtcgccgagaacgacagtcgcgccgcaccctatgccgtgccttatgacggccgtgaagtcatgctgcactgggccaacaaagaccagtactacatcaagtcgagcgaagcgctcagcaacttcaccttcgacctaagcacggcacaggccaaggaacaaggccagcaaagcggcttcgacttccaacccgcacaggccagcccgctgaaggtgcacttccgcctggctgccgccgcggaaggcgagcacaacaatgtcaaagaaggccaggagcgcttcttcataatccacgcctcacaagccttgaagctggaagtcaacgaccagggccaaacggaacttgtcgtccagttcgactaccgccccgatagcgaaaaaaccggccaggcgggcacctggcagcaaaagcgcctagcagaagccgaacaggtagtcgccgagcaactggaaaatctactgttttctcatccagagcttcgcccattccaggaactgctgttcgcccccgcgccgaccgataaacagcccaaccgtacgctgctgggtaaatacctggggcagttcaccgcacgcaacaccatggactacttcatccataagaacttgggcggtttcctgcgccgtgaactggatttctatattaagaacgagattatccgcctcgacgacatcgaagctgccgatgctccgcgcgtggatgaatacctaaagaagctgcgtgtactgcgcaagattgcccgccgcattatcgactttctcgcccaacttgaagactttcagaagaagctttggctcaagaaaaaattcgttgtcgaaactcagtactgcatcactcttgatcgtatcccggagatcttttatcccgagattgcagccaatgaacagcaacgggaagagtgggtgaaactatttgctattgatgacatcaaggcagatatggcacagctaggttacagcgaacccctcactgtagattttctgaaagccaatccatttttgttggtagacaccaaaaatttcccagagagattcaccgagtcattgctttctcacattgaaaatctagacaaaaattgcagcggccatcttttacatacggaaaacatgaatggaatctccattctggcaaaaaaatatgaaaaatctataaagtccatctacatcgacccccccctacaacactggtga

SEQ ID NO: 358219 - DNA, 1398 bp, Pseudomonas aeruginosa
gtgcccgaggcccaaggcctgccggcctacggcacggtgttcagtacgcccaacgggcggatcaagcgcagcaccttcatcggcgagccggggctgaactcctacgaccgcgaccagttcgtgttcggctatgagttcagccacgaactcaacgatgtctggaccttcaagcagaacacccgctacgcctatctcgacgaccaatacgtggcgccactgcacggttacagattcgtacccaacccgaacaccggtgccgatgaccgacgctatgccacgcgctatggcgtggactggtcgcagaccaacaaggccttcggcatggacaacatggcccaggccaaattcaagaccggcgcgatcgatcacaccgcgctgatcggtattgactactaccacttcaaatccaagttcttcggtctctactcgaaccaggaacccaccacgatcatcgatctgtacaagccggtgtacggcagcaagttcaccttcagcaatccctatcgctggaaccgcaccaccgaccaaaccggaatctacttgcaggaccagatgaaatggaaccagtggttcctgaccttcggcggacgctatgactgggccaagaccgacaccaaggaaaccggcggcaaggtcgacgcgaaggacgagaagttcagcggccgcgccggcttcggctacgagttcagcaacggcatcgtgccctatgtcagctactccgagtcgttccagccggtcggcgggttgaacatggacgaaggcaacaaggccttcaagccgaccaccggcaagcagtacgaggccggcatcaagtaccagccgccggggcagaacagtttcatccagatgtcggtctaccagatcgacaagaagaacgtgctcaccaccgatctgctgaaccccaacttcagcaagcagtccggcgccatgcgctccaagggcttcgagctggaaggcaaggccagcctgaccaacaatctcgatgtcatcgcctcgttctcgcgcaacgacatcaaatacaccaaggacaacgacgggcgcaaaggccgccatccggccggcacgccgccgatgaccgccgcggtctggctggactacaccctcggcgcggataccgcgttcgccggcctcggcgcggggatcggcgcgcgctacacccgcggcagcgacggcaccgaaaccgccgacggccacttcaccatcccgtcctacacgctgtacgacggcaagctgtcctacgacttcgagaaatccccgctgcaggtgaaaggcctgaaggtgcaggtcaacctggagaacctcgaggacaagaagtatgtcagccgttgctcctctgatctcgactgctactacggccagggccgtaccatcaccaccgacctgacctacaactggtaa

SEQ ID NO: 358220 - DNA, 1509 bp, Pseudomonas aeruginosa
atgcctgccacacacaagacacttcacctcattccagacactaatgtgttcatgcaatgcaggcaccttcacgagttgcattggagtacggcatttccagaatgggatgccattgtcgtggtgcttgttgcgcccgtaataagggaaattgataggcaaaaaggaggacagggccgtttggctaaacgtgcgcgaaccgccaatagcctaattggccgactcattgactcatctgccgttgaactttcaggcgatggagagcagccgatagtaaccttagttgctatgcctgagctcaggccaaatccctctcttcaagacgacttagattacacccaggctgatgattccatcgtgggtatcgtttcagcgtttctaaatgctcaagaagggcggcaagttgccctgctatcaaatgacaatgggccattgatgagtgcgcgccgtgtaagcgttccgtttcatcgggtgccgtcagattggctgcttcctgcggagggtgacgaggatcaaaagcgcctacgagcgctggagggggaagtcaagcgcttgaaaagtgctgagccgatgtgcgttatccagccacatggggaaccatgggagttcggtgcggagcgcttccagcctttgacggaagaacaaatacaatcattgatggcgatggttaaggaacgatttccagcggcaactgatttcggttcacgagaaaaagctgagcaccgtccaggactcggactaagcggaatttatgcactttatggacgggaggagttcgtccccgcgtccgatgacgaaatagctctctaccagaaagagcaatatccagattggctgtcacgctgtgagacgtgtttccgcgagctgcattaccaactccaaaatgctcaagaactgccgagaatcgaagtggatttgctcaacgaaggttcacgccctgccgaaggagtgagggtggtattttatcttcgtggtggcgggttattgctgaaactgcctcaagaagacgatgtgtcggagagttctgatggcgacggaaaactaagtggagaaattgaaataggtagtcctcgcattgcactgccgcgtccgccctccgcaccaactggccattggaagagaactagtgtcagtagtttgatgggggcaatggagcaagcagcgaggctgtcctcattggcacgccctctaacgcctcttatcaatccccccgtgtttcctactccccgcgaacccgatgccttctattggaaaacggggtcacgtccggaatacccaaggcctgggactgagctcacctgtgaacaatggcggcaccgtgcagagcccgaatcgtttgaattcgagattatttcagcacttgatagggatgactgtataggggcgttgcatgtggaaattcatgcatccaatcttacagaccccatcaaaaaggcaatcccgattagagtgtctgtcaggatagggagcacttgggaaaaggcgaccgaactgatcgagcagctcggataa

SEQ ID NO: 358221 - DNA, 222 bp, Pseudomonas aeruginosa
atgatgagcacgaccaagaagctgcggctcgggccactgccgaagaccgagaccgtcaaggtcacattctcatgcccggctgacctgaaagccgacttggaacgctacgccgcgctgcacgctcaggcgtatggcgaggcagtagatgccgtgacgctgatcccgcacatgctggaggcgttcgttgccggagatcgcggattcaagaggaaaacctcctga

SEQ ID NO: 358222 - DNA, 147 bp, Pseudomonas aeruginosa
atgcagcgctgcccggccgcgcccaccgaggcaccgaccaggttgctgatgacctgtgccttgtccgcgtcgggcatgatcaccatgtggttcttcgccccggcgaagctctgcacgcgcttattgtgcgcggtgccggtgtggtag

SEQ ID NO: 358223 - DNA, 258 bp, Pseudomonas aeruginosa
atgagcggcattcccgaaatcaccgcctatcccttgccgactgctcagcagttgccggccaacctggcgcgctggagcctggagccgcggcgcgcggtgctgctggtgcacgacatgcagcgctacttcctgcgcccgctgcccgagagcctgcgcgccggactggtggccaacgccgcgcggctgcgccgctggtgcgtcgagcagggcgtgcagatcgcctacaccgcccagccgggcagcatgaccgaggagtag

SEQ ID NO: 358224 - DNA, 492 bp, Pseudomonas aeruginosa
atggctcgcaaatgtttcttcagtttccactacgcccctgacaactggcgggcaagcaccattcgtgggatcggggcaattgaggggaaccagccagcgctggataacgattgggaaaaggtgactaaaggtggtgatgctcagatccagaaatggattgactctcagatggagggacgcacctgcgctgttatcctaattggcgagaacactgccaaacgaaaatggatagattatgaaataaaaaaagcatgggccaataaaatcggcgtgctcggcatatatatccatggcatcaaggattcatcaggaaacatttccaaaaaaggcctcaacccttttgcccactttgaattaggcggcaaaaatttctcgtcgatcgtacagacatacgacccaataggcgccgatagcaaagcaagatataactacattgcagacaatattgattcttggatcgagaaggccatcggaattcgcaaaaacaactaa

SEQ ID NO: 358225 - DNA, 996 bp, Pseudomonas aeruginosa
atgtctactcgtaccgaaaaaatgttggaagaaatacgctctaggctctcacgcattgcgacagatattcgtatggataacatagccggtctttatgatcgaaatggccatatggaaagatttttcaagcaaatcttgaacgcgctttatggccttaatcttgtttctacaaatgttaaatttagcaattatccagcgattgatctgaaagacgcgacccgaagaattgcataccaagtcacatcaacaaatacaagccaaaaaatcactcacacaattgatacttttcttaaaaacggcctagataaggaatttgacagcttgaatttccttattctcagggacattgaaggtccaaagatgaggtcgggttccaatacgactgtggattacgatatctttacaatttatgacttaagcaggatgatttccgaccttgatgatgaagcgaagatcgctgaaattcgcgatatcgtaatgatcgagtatttgatcagcgatggtagtgtaataaatgtcaaggcgggagccaaatataatctcacatcgattcaacgtttaattgaccaggctcagcttgatccaaaaagcgaattcaaggagatagagatatatggcaatgaagtcgaggagtttgtaaaggagctatccaatttaacgattgagcaaaggacggccctgtatgagctgattgttaagtgtcaattaaaaaataatgaccacaagacaatttacctttcatccgcgcgcgctcaggtagaatttactgcgcgcgaaaatttagtcattaactctcttattgacaatggactggtggaggtggatcgagagttttctgtaagccacttcgaccccgaatttgtagcgctagtcatgcgataccctagcgaactagagttgaatatttttgctgagctgaaaaagtttgcagccgatgacgttgatcttctgcagaaaatgttaattagtttgaactttgactgcctcagaatctaa

SEQ ID NO: 358226 - DNA, 4101 bp, Pseudomonas aeruginosa
gtggtcaagacccgtggcgatctcgacaaccgtggcggccaggtcgtcggtctgaacgaactgcaggtccaggctgccgcactggacaatcgcagtgccggtctcctttccagcaagggagacatggacatcgaggtcgctcgtctggacaacagtgcgggcggcaagctggtcagcgagcgccgtacgctcttgaaggtggatcggctcgataatcgcagcggtcgcattgtcgccggccaggatctcgacttgagctctcggttgatcgacaaccgagcgggcgatatctccagcacgtcgagggtggtggcgagcgctcgcgaacagttggacaaccgcggtggcaagatcgtcggtgacagtggcctggacatcacaacgccacgcatgctcaaccaggacaagggggtactcgccagccgcgatgggctgcgcctgagcgctacggagttgttcaacggcgggggaggcctgctgtccagccagaagggtatcgacgtctccctggccggtgcgttcgataaccaggccggcagcctggacagccggggcttcctgacggtgaagtcagcctggctcgacaaccagggcggtacgctatccagcgcaggggcattggcagtgaccagccagggcgccctgaacaatcagggcggcagactggcgagcgacgctggacttagcttgagcagcgccagcctcgacaacagccaggccggtgcgatcagtggcaagggggccgtggagattcgtaccggcaacctgaacaacagccggaaagccagtatcggcagcgatgcgggactcaccctggtcgccgctcgggtagacaacagccaggcgggccggatcgccgccaagggtgcgatcgatgcggatctccaagggctggaccagcatgacaggggcaacctggtcagcgataccggcatcacgctcgatctgaacaagggaagcctggtcaatcgcgctcaaggcctgatcgccacgcctggcactttgctcctgcgccaactcggcgtggtggacaacagcggtggggaaatctccagcgaccgcgcgttcactcttgccacctccgcgttgaacaaccaggggggacgcctgctcagcggcggagccctgaccttgcgtatcgcgcaggccctggacaacagcctcgaggggattgtctccggtgctggaggtctggatatccaggcattcgtcctggacaaccgtagtggctccatcggcagcaagggcgccatcgatatcggtgtgacccgcctggaaaacgacgctggcacgctgatcgccgaacgcggcctgaagctggcggccgatgaggcgaacaattccaaggggcgtatcgtcgccaaggatgaactgcgtgccaaactcggtgcgctggtgcagaacgggggagagctgacgactcagggcgcgctggccctcgacgccgacaaagtcgacaacggcgctggtcgcatcgccggcaaccgaggggtggtcatcgatgcccggcaggtggacaaccgtgccggcgagattgccagccagggcgtggcgacgctgaatctcactgagcaactggacaaccgtggcggcaaagtcgttgctgacagtggtctgggcatcaccgcgccacgcgtgctcaaccaggacaagggagtaatcgccagccgcgatgggctgcgcctgagtggtaccgaattgttcaatggcaatgccggactgctcagcagtcagagacatatagaggtcactctggacggcgtgctggacaatcagggcaagggcgcgctgctcagcgacggtaccctgacggtgagcgccgggcgcatacacaaccaggacgccactctgtccagcgccggtgcgctgagactgagcagccaggaggcggtggacaaccgtggcggcaagttggtgacggactccagcctgcgcctgaccagcgccagcctggacaacagccgatcagggatcatcagtgccaacgctgcggcggagatccataccggggttctgaacaacagccagaaaggcaatcttggcagtaatgacgggctcggcctgattgctactgaggtggataacagccaggaaggtcggatcactgccaaaggcatgatcgacgcaaatatcaagggactcgatcagcagggcaaagggcggctggtcagtaatgccggcatcatactcgacctgaacgagggaaccctggccaatggcgctcagggcctgatcgccacgcctggaaccttgctcctgcgccaactcggcatggtggacaacagcggcggggaaatttccagcgaccgagccttcacactcaccacctccgcgctgaccaaccagggtggccgcctgcgcagcggcggtgtactgacgttgcgcatcgcccaggctctggacaacagcctcgaaggtgttctctccggcaccggaggcctggatatccgggcgcttgccctggacaaccgcagtggctccatcggcagcaagggcgccgtcgatatcgacgtgtcccgtttggaaaacgatgacggcgacctgcttagcgaaggtcgtctgaaactgactgccgagcgagcgaacagtgtcaggggacggatcgcggccaggggtgacttgcacgccagcgtgacagcctttaaccaggcgggtggcgaattgagcagcgagggtgcgctgatgctcgaggccgatagcctcgacaaccgcagcggcggtctggtcagtgctgatggcaacctgaccgtttccgcccggaggatcgacaaccgtgcgggcgaaatcgccggcccgggccaggtgacactggacgtcgccgagcagttggacaaccgaggcggcaaggccatcggcgatagcggacttcgcctcgccgcgccacgggtactcaaccaggacggcggggtactcgccagtcgtgatgggctgcgcctgaatggcgccgaactgttcaatggcaacggcggcctgctcagcagccagcaaagcatcgacgtcattctggacggcgtattgggcaatcaggcgggcagcttgagcagccagggacgcctgagcgtgaagagcggtcggctggacaaccagggcggtgcagtctccagcgccgggaccttgtcgctttccagccagggtgcgttgaacaaccaggggggcagggtggtcaccgacgccggtgccgtcctgcgcagcgccagcctcgacaacagccagggcggcatcgtcagcgccaagggggccgcggagatccgtactggcagcctcaacaatagccagaagggcagcataggcagcggtgccgggctcgcgctggtcgcggacctggtggacaacagccagaacggccggatcactgccaagggtgcgatcgatgccaacctgaaggggctggatcagcagggcagcggcaggctggtcagcgatacggccatcgcgctcgatctgcgcgggggagaactggtcaaccgtgctcagggcctgatcgccacgcctggagccttgccgctgcggcaactgggtgtcgtggacaacagtggcggtggcgagatctccagcgatcgaagctttaccctcgccgcgaccgcgctgagcaaccggggtggccgcgtgatcagcggcgactccctgaccctgcgcatcgcccaggcactggacaacagcctccaaggcgttctttccgcaagcggagggctggatgtcgctgcactcgtcttcgacaaccatagcggcatcgttggtagcaagggcgatacacgcatcggggtgaatcgcctggagaacgaggcaggccgcgtggtcagcgaaggcgccctggatctgaccgccaagcaggtgagcagcgccaaggggcgcattgccgcgaagggcgatctgcaggtcacggttggcaccctggagcagcagggtggagaactggccagtcaggggacgctgactctcgacgccgatagcctggataaccgcaatggcggcctggtgagcgccgatggcggggtcaccgccgaggcacgccagatcgataaccgcggtggggaaatatccagcgtggccaaggtggctctggctgtccgggaacaactggacaaccggggggcaaggtga

SEQ ID NO: 358227 - DNA, 1023 bp, Pseudomonas aeruginosa
atgagtcgttatgaagagctaagaaaggaattgccggcgcagccgaaagtctggctgattacaggtgtggcgggctttattggctctaatcttcttgagactttgctaaagcttgatcagaaggttgtcggtctggataattttgctactggtcatcagcggaacctggacgaagtgcggtccttggttagcgagaagcaatggtcaaattttaaatttattcaaggtgatattcgcaatctggatgattgcaataacgcctgtgcaggtgttgattacgttttacatcaagctgccttgggttcggtaccgcgttctattaacgatccgatcacctccaatgcaacgaacatcgatggtttcttgaatatgctgattgcagccagagatgccaaggtgcagagtttcacttatgcggcaagtagctctacctatggagatcatcctggtttaccgaaggtggaggatactataggtaagcctctttccccttatgcggttaccaaatatgtgaatgagctttatgccgatgtgttttcacgctgctacggcttttcgaccattgggcttcgttatttcaatgtgttcggtcgtcgacaggatcccaatggtgcctatgcggcagtcataccaaaatggacctcttcgatgatccagggtgatgacgtctatattaacggtgatggcgagaccagtcgggatttttgttatattgaaaacaccgttcaggccaatctgcttgctgcaaccgcggggcttgatgctcgtaatcaagtttacaatattgctgttggcgggcggacgagtttgaatcagttgttctttgcgcttcgcgacggccttgccgaaaacggtgtgtcctatcaccgggaacctgtttatcgtgattttagggagggggatgtacgtcactctctcgctgatatcagcaaggctgccaaactgctggggtatgcgccgaaatatgatgtgtctgcaggtgtggcgttggccatgccttggtacatcatgtttttgaaatga

SEQ ID NO: 358228 - DNA, 1269 bp, Pseudomonas aeruginosa
atgaaggatctgaaggttgcagttgttgggctaggctatgttggtcttccgcttgctgttgaatttggtaaaaaacgaaccgttgtcggtttcgatatcaatcaggggcgaatcgctgaactgcggcaaggcattgactctactcttgaagtagatgcggctgagttgaaagaagcgtccgaactgagctttactttcaatcttcaggacttgcaaaagtgcaatgttttcattgtgacggttcctacacctattgatgaacataagcaacccgacctcacccctcttgtaaaggcctcggagagcatcggaaaggttctgaagaagggcgatattgtaatttatgagtctaccgtttacccgggagcgacggaagaagactgcgtacctgttctggaaaaattttccgggctgaggtttaacgaggacttcttcgccggttatagccccgagcgcatcaatcccggcgataaggaacatcgggtctcttcgatcaagaaggtcacttccggctctacgccggagatcgcggagttggttgactccctgtatagagaaatcatcactgccggtactcacaaggcgagcagcattaaagtcgctgaggctgccaaggtgatcgaaaatacgcagcgagatctcaatattgctctgatcaacgaactcgccatcattttcaatcgaatgggtatcgataccgaggcggtcctcaaggctgccggcacgaaatggaatttcatgccgttccgcccgggcctagtcggcggtcattgcatcggagtcgatccatattatctgactcataaagcccagagtattggctatcatccagagatcatcctggctggccgccgtttgaatgacggtatgggtgcctatgtcgtttcgcaactggtcaaggctatgctcaagcgtcgtatccacgtggacggtgctcgcgttctgcttatggggcttacattcaaggaaaattgtccagacctccgcaataccaaagtcgtcgatattgtccgtgagttggcggaatacaacatacaggttgatgtttttgatccttgggtgagcgccgaagatgccatgcatgagtatgggattactccagtcggtacgccatcccatggcgcttatgatggaattatccttgcggtcgcgcacagtgaattcaaaaatatgggcgcagaaaatatacgaaagttagggaaggctgagcatgttctctatgatctgaaatatctactcgatgaagataagtctgatctacgcctgtaa

SEQ ID NO: 358229 - DNA, 726 bp, Pseudomonas aeruginosa
atgacgcaatacaaacgacgcaagcaagacttccgaatcgaagatttgcgccggtacggcatccaaccaattctggttgaaaattactccgacatcaccgaaatcctgttggaaattgaacggcggttcttaaagaaaaccaccttcatctccggcagtgcagagcagtatggcgaatggggaaaagagcagtctttaaaatttattcatactttatcttctgagcttattctgaaagagcgtcggattgttaacggatttggctggggagtcggaagcgctgttataaacggcgccctagatgcgatatataaaaaccctgagaagtactcagaggaccagttagtaatgcgccccttcccacagtttgcaagctcgggagaggatttaaggctgctatgggaagagtaccgacaacgtatgatcgggttggcgggcgtatgtatatttatatttggcaataaggtcgatgacggcaaactcgtgatcgcgaacggagtaatccgtgaagcggaaatcgcaatagagcaaggtcggattgttatccctatagccgcgacggggttcgccgcggcagagatctacaaactggtcaaggttaagccggagttatacgacgctcataaatggctaattgcagtcattgatgagctcgcagatcctgcccttgcatggacagacattgtgaaaaaagtctctgacgcgattataaaattggacaagtaa

SEQ ID NO: 358230 - DNA, 342 bp, Pseudomonas aeruginosa
gtgccaggccaacgccgctcctatcccaaatccttcaaggcccagatcgtcgaggagtgtacccagcccggcgcctcggttgccggcgtggccttgagccacggcctcaacgccaatctcgtgcacaagtggattcgccgccagcaggcacagctgcccgcggtaccctcaagttttattccgattcctctcgtcccgagcctgccggctacctcgagtgcggccgcagccgacatggccatccagatcgccattccccatcgggccggcaagctgtcggtgcagtggccgggcaacgaccctgaaggctgcgcccgcttcctgcgcgagctgctgaagtga

SEQ ID NO: 358231 - DNA, 279 bp, Pseudomonas aeruginosa
atgaagcatccattccgccgagcctacatcccaaatttcggttactgcgactattcgccttcgacaaattggaccttcggcgggccgctgataaccaagttcctcatcgagttcagagtcgagcacgaacggacgatatgctcctacctttgcgacgctaacggaatgtacatcagtgatggatcatatggagatacgtacctgatagccgcatgccgagccatcgttacagacaagctaggcgaaaccgtcagcgtacccgcagaactcatcaagtaa

SEQ ID NO: 358232 - DNA, 876 bp, Pseudomonas aeruginosa
gtggatcaaccaagccctcggaaaaccaggaaaatcctccgatttatcaaggatttccaaggcaattcccgggcgttggctggcgcgtggcttgcaacgacctcgtcgtccccacacgaggaaaatcgtcatgttcaagcacatcatcgctcgcacgcccgcccgcagcctggtcgacggcctgacctccagccacctcggcaagccggactacgccaaggccctggagcagcacaacgcctacatccgcgccttgcagacctgcgacgtggacatcaccctgctgccgccggacgaacgcttccccgactcggtgttcgtcgaggacccggtgctctgcacctcgcgctgcgccatcatcacccgccccggcgccgaatcgcggcgcggcgagaccgagatcatcgaggaaaccgtgcagcgcttctatccgggcaaggtcgagcgcatcgaggcacccggcacggtggaagccggcgacatcatgatggtcggcgaccacttctacatcggcgaatcggcccgcaccaacgccgagggcgcccggcagatgatcgcgatcctggagaaacatggcctcagcggctcggtggtgcgcctggaaaaggtcctgcacctgaagaccgggctcgcctacctggaacacaacaacctgctggccgccggcgagttcgtcagcaagccggagttccaggacttcaacatcatcgagatccccgaagaggagtcctacgccgccaactgcatctgggtcaacgaaagggtgatcatgcccgccggcggcggagcctgcgccgggcgcgacataccggatgcagtttcggaggtgccacatggccgattcggacaagggaaaactggggctgccggcgctga

SEQ ID NO: 358233 - DNA, 702 bp, Pseudomonas aeruginosa
atgcgattcaagcgaccgcaggtgcgctacgccgatacaccgcagcctgccaccccgtatcaagccgccgcgcaggtgtgggacgagcgtatcggctcgggccgcgtgcaggcgaagaactggcggctgatggccttcggctgccttgcgctcgcgctgctactcgcgggcgaccgaattcggctttccacgcaatcgctggtgacgccctacgtggtcgaggtggaaaaggatcatgtgcgcgctgttggcgaggcaattacgccgtacaaacccacggacgcgcagatcgcgttccacctcgcgcacttcgtcacgctggttcgctcgctgtccatcgaccccatcgtggtgcggcagaactggctcgatgcctatgactacaccaccgaccgcggcgcggctgtgctcaacgattacgccagcaagaacgacccgttcgctcgcgtcggcaaagaatccgtgacggtgcagatcaccagcgtcacgcgcgctagcgattcgtcgttcaacgtgcgctggacagaacagcgattcatcaatggcgcaccggccggaaccgaacgctggaacgccgtgatttccaccgtcctgcaaaccccgcgcaccgagcagcgcctgcgcaagaacccgctgggcatctacgtcaacgggctgtcgtggagccgcgaactggatgcgtccgaaggagccaaaccatga

SEQ ID NO: 358234 - DNA, 744 bp, Pseudomonas aeruginosa
atgaacgacaaatcgcacgcttccctcgaacaacacgtttgcctggtctgcggcgctcgcttcgacaccggcgcgatcctgctggacaagcgcctgcgcgcgagcatggagcgccacacggcgacagattggggcttgtgccccgaacaccagaagctgtccgacgatggctttgtcgccttggtcgaatgcgacccgcagcgtagcagctcgccgtccggcgctgatcgcatgaagccccgaacaggcgtaccggacggggcgtttggcgcacctgaaacgcgaggtgttcactcgcgtgttcaacgtgccgatcgcggacaagcagccgtgcgtgttcgtcgaactcggcgtgatcgagcagttgcaggcgatgactgcgcactgatcgcacgaccaccatccggcgcgttgtccttcgggacgacgcgcctttttttctgctgcgcccggtgccgatgccttcgcgcctgcggcgctgcgcgcttcgcttgcgctccaggggaaggccatgcggccatccccgccgcgctacgcttggcgcccctcaataccgccgccccggctgtgccggcgcgcccccccccacgcaccagcggcatttcatccagggcatccacccccatgctgtccatcgttgattgcatgggcgtccccggccaagaaacatggccggtcgcgctgtcgtgctgcgcatcgagcctcgctgcgcgagtctcgcccccttcgggcttccatcgctga

SEQ ID NO: 358235 - DNA, 1104 bp, Pseudomonas aeruginosa
atgtcgtcatctctcgattctgccgcccgcgcatccgctaatcggatcagtcatttcattgaggtacatcggggccatccccaggtatctctctacgatcacattaaaaggcaacgcagcgaaagagccgcccgcgcgagtttgctcaaactggtttatctcgacacgaacgcatggaagtgcgtgtcggactttcggcggaacaaaacgagtctcacgcccgcaatgaaggcgtttggggcaaccattgaacgggctgttcaaacggggcaaatcgcgtttcccatcggtgtcccgacgtacttcgagctggactcgatgactgacccggcgacacgagaaacgcttacccgactggttgatgagctatcccaagggttctgcatcacccctttttccgatcgcgttggttctgagttgcgcaagctgcgcatgggtaagctggacgagccggaagggttagaagatttcttgtgtagccccatcgagctaatgggaataccgacgatttctacgctcgggtttctcgaatcgcatgtggataaagaaactttcaacaaggcattctttgatgccttgtcagaattgccattttccttccagttggaagttgccggtacatttcctggggcgaagtgggataactcgcgcggcattacagacatcaacgacggaaaggtcgagcatcagtcggaaataacgaacctcaacaccggcatatttgttgaattgacgggctgcatcgcagcatggttcagagaggaagggacaaccctttcccaaccagaaattaagcgatacgcacttgaggcgcaataccactggcatgagacgccagcctcacgagcaatgccaacactgagggtattgagttcactgtatgggttgatgcgattcgatccgcaacgccgataccagaacggagatccaagcgacttcatggtggcggcatccgcacttcctgtggcggatgctctttatacggacagaaaactcgctaatcttctgtccgataaaagaatcgggctgaacaggttttcggactgcacggtagtcagtgggttcgaggacatggcggcgcatctcgaagaacaactaaagtga

SEQ ID NO: 358236 - DNA, 1767 bp, Pseudomonas aeruginosa
atggactcaaccttgcctccgcgcgaggatgaacaagtaaaaaccgcagttcggaacgtcttgctaggttctgcgccggaacgcgaaagcgagttggcctccttatggagcttgcttgagcctcgttttcaactgactgccgatacgcatgacggtgagcgattggtcatggaagcgggaatgtatcgtttcgtccgatttaaccatcgcgtagtgcgtgcattctggatcgcaggctttgcagcttgggaagcgtatcgcgttgtagcggaaacgcctgaactagagccacttgacctcaagcgcctgatggagctgattgatgcgtttgagcgcgtcttggaaagcgatgccccagagctggaagcgctgcccaaagatgttcccgagccgggccactacgacgacaacccacaacttcgcgcaccgggggagcttgcaacgttgggcgttggttgggcgcttctgcacgaggttcggcatctgaagcatcagcaggatggagatgcggctgaccccgatgaggcagacccaacccagcgcaggaacgaggagctgtcatgcgacgccttcgccacgaaattcctgcttgaccagcttgatgcttatgcccaacgggaaaatgcaagcccgaaccttgttcgcagaaagagagagctcggaatctatttcgcgctattttcgatgaccttgatggcccgcgataagtggggtgcgtcccaaagccatccgtccattcaggccagaatcgacgcagtacgcgccttgatgggaagtcaacgcgatgaggtggcagaggcaatcgcaagtgtggcatttgcaacgcttcatacgctgatgcccggttctcctggcattgttcctgcccctgatgattcagactactcccccaacaaaaaagaatttgcgggtgaactaatcctcaaggaaatgtcgcgcgttcttgaatggctcaagggaaaggggcttaacgcactaaactcacggtactcaagatacgagaaagacatagatcagtttttctcgtgcgacgatcctacttccactgacggccgggccaagtttgaaaagctgaccaattcgtatatcgagtgcttgaacattgttctgattcaccgggcatttcgagacgaagctagccaaggctttgtcgatagactaagcaaggtcgcagacgggcaagatcatcctgatgctagttcggcaggatcatcaagagactatttgttcgagctgctgattgcggcaagaatgtcgttgtccggctacaagatcgacttcaacaaggtcacggatgttgtcgccgagaacgacgagttccttgtgttcggcgagtgcaagcgactgtcttccgagaagaagtttgaggaaaacttcaagaaggcgggcaagcaaattaccgcccaagccgaagggatgtctcaacgggtctatggcttggtcttcttggatgtgtccagttgtctcggcggcattcccaagatggagcttcccaatgtcgaagcagcccagtgggcaattcacgaaagccttgaggcattcgtggcaagaaacgcatcaaaaatagagcagttagccgaacgcttttccgaggcttcgcttggagtctgcctaattgggcaggctccgatttggacacgagacggcactctctacatggcggccagaacaagagtagtcgcaccacagagtttgtcggatgaggatttaaactctctcgaaaaaatcttgagcggattttcaggttctatgctttccctcgtttga

SEQ ID NO: 358237 - DNA, 564 bp, Pseudomonas aeruginosa; identical to SEQ ID NO: 320834

SEQ ID NO: 358238 - DNA, 348 bp, Pseudomonas aeruginosa
atgaataaacggatgttgcccgggctgcgcgcccatgttgatcagctcttgcgcgatggctggtggatctccgcacgcgatccgctcaccttgaaacgcgggtccgaccgcctgcagtgcctggacggcatgctggtcggctcggctcagtcaaacctcgatatcgaactgggggagctgcggcgccggcccggtcaccagaccatcgctgatgaacgccatctgcccggccggcaccgccgtgccccgggccgcgatcacgacgttgtttcgcaggcggacgcggcaggtgccggcgccctcgtcgacgtcgatcacctcccccaccgtgcgcgcgccgcccggtaa

SEQ ID NO: 358239 - DNA, 294 bp, Pseudomonas aeruginosa
atgagcaagcaatcgcacacgccggggccatggtatcgagacggcacgaccgtttacgccttgaatcctcagaacttcaaccggttttctgctcagattcatggcgctcacacgccaaagtctgaacttgaagctgttgcacaactgatgcaggcggcgcccgagttgcttgaggccctggagtacgcggcaaatcgactgaactcttgtctgatcctgctggaatgcgacgacgatttcattgcgaaggaaaccgcacaagcccgggccgcaatcgccaaggcaaccgcctaa

SEQ ID NO: 358240 - DNA, 297 bp, Pseudomonas aeruginosa
atgaagaattcgatttattgggctttcaaccttccgctccaagtctggcccatccacaaggacgaagacgacgaatctagtgcaatcactgacttcagaatcctgaactacatgccgcgcaaggaacgtatatgcgaggtatatctttctgaagttatcggcgagcagagccgagaggaatttctcgaaacagcagctcttcacctcgaaaacttggctcgactcttccgatcatcgaagtcagatccgggaaagcatatctattaccacgatgatgggatggagaatcagtcatga

SEQ ID NO: 358241 - DNA, 207 bp, Pseudomonas aeruginosa
atgtatggccgaatctgggttcctggaacttgtcgccccatccgcacccccgagcagatcgccgccgaggagcgtgccgccgctatcgccgaaatgatgaaggacgccggaatcactgagagcgcctttgctcatgatccggaagctgaggtttgggctgccgctctgcacgactccggctaccgccgccaggaggaagggaaatga

SEQ ID NO: 358242 - DNA, 216 bp, Pseudomonas aeruginosa
atgaacacgcatgaattcatcacgaaacagatagatcagcagcttcagcgggacgggtttagcggtcgagtaagccacgcagtggctggcgagtctctcgattactacctgcggactgctcagttcaagaagggcgccatgcaagaccttctcgcattcgccaagaagcgcgcgaaggagcttgcgaagctttacggggagaagaaagcgtcatga

SEQ ID NO: 358243 - DNA, 339 bp, Pseudomonas aeruginosa
atgaacgaccgcgaactactcgaactggcggcgcgggcggctggttttaccgggtacggattcttcctgggcgatgatgggatcgatgtcagtgacgaaactggtactcgcttcgcctggaacccgctcacagacgacggcgacgcgctgaggctggctgtgaaacgcggactggtagtcaccccggaccgagaaaaccagcggaccctggtatcgaaccaagcaggccacgaatactgcgcgatctattgggacaatctaggcgagatggcagcgacaaggctggcaatcaccgaagtcgcagccgagatcggcaagtctatgggaggtggggagtga

SEQ ID NO: 358244 - DNA, 321 bp, Pseudomonas aeruginosa
atgaagagtcacccgatccctgcaggagtcgaggtcaaccccaatcggccctggacgcctgatgacattgctgggtacagcggcgaggtagtcagtgccatgaaggttctcgagcctctgctgcgcaccgtccagttgtctgggcagccgctattgggtatctccttctacctggtggctggtggtgcattcggaatcctgtacggaatcatgaagggcgcaccggttaatccattttcggtgatcctccatgctgggctcgtactttatgcctggtcccggcgccggcagatattcggaagcgactggtcgtggaactga

SEQ ID NO: 358245 - DNA, 696 bp, Pseudomonas aeruginosa
atgggttgccctggtactgggggacagggccgacatgtgcatcagcttcgactggacgccgtaatcggcctcagcagcgtctttctcgtcccagcgagcccttcggagagcggtagtgatctcggtgcgggcgatgcgatggcctcgacgcgcctcgatgccggtctgggcggtcaggtcccgtgcaatctcccggggattcttcccgcgccccatgccttcggcgaggatgcgcgccatgtcggccttgacctggcccgacagccccttcatttcctcgaactcccgagcgcgaagcagcgccatgcgcgcgcggtaggcgtcggatcggaggagcacatccagcgactcccggccagcgcgatacgccggcgactgctgcgccaggttggcgtgggtctgcgcagtcccgcggatgtaggcaaccccgacataggattcgaagaaccagaggtcccgctccccgccctcctgcagtatctcgtcgaccatcaggttggtgtcggcgaagatcgcggagagaagggcctggtcgagacggtaggtgtactgctcgttcaccaccggctgggctgggattcgatccagggcggccacgtagccatccctgatcttccgcatgcgcctgtcgaactcgtgcattgcgcctctttccaggcgatctaccccggtcgggtcactgctgctcgccggtag

SEQ ID NO: 358246 - DNA, 195 bp, Pseudomonas aeruginosa
atgccgcactatcaatgtttgttgacagcaacctgcatcgttgtcgttgaagcagacagcgaagaggacgcgctagatatcgctgtgagcgaggcaagctcaggtgattacgagttctgcgaaggcgaaagcgaaggccttattcctcctgaggagcttggggcgcgtcgtttctatgctgatctggaactctaa

SEQ ID NO: 358247 - DNA, 903 bp, Pseudomonas aeruginosa
atggaccaactgcccaccacgggacggcagatacctctggcgatttccactcaaaaggagattgatggaattggcatgggcgtgcttacagacggcacaccatttctcaccactcgtggtttaggcaggctgtgcggtgttagccacacggtgattctcgacattgccaatgactggaatgccggaaaacctacggccactaagatccacaacattcttcagactcacggatactcgtacccaagtccatacacggtaatcactgataagactggtacctatcacgcatggccagatgcggtctgcttggccatccttgagtactacgcgtttgacgccgggataaacaagaaagacgaagcgctgatgaacttccgcctcctcgctgggaaggcgcttcgagatttcatctacgcccaggtcgggtacgatccggacaaccaggtccctctacagtggaagcagttccacgataggatgtccttggtgtacaacgcagcaccagccgggtatttcggggttttcaaggagattgccgacatgatcgttcacctcggtcagaacggcatccatatcgacagtacttttgttccagatggcagtgttgggattcactgggctaggcactggaaggacaacaacttggaagcgacctttgggcctcgccagaagtacgaccacaactatcccgactacttccctcaagccctatccaatcctcaggagtcgaactgctacccggaatccgcccttggtgagttccgtaggtggttcagggaggtctacatcggagcaggcaagttcgagacttatttaaccggcaaggtaaaagacaaatctctacctgtatcctttgcccagcttgctgtggcttcctacaaggatccgcaaaagcttcagtaa

SEQ ID NO: 358248 - DNA, 204 bp, Pseudomonas aeruginosa
atgacccgcatgattaaaggcaaagaagctgtagcgctggtgcaaggtgacgtgatcattgctagcaatggggaacagcggaccgtagatgttacttgccacctgaaagaaggctttttcgtcagctacgtaggtggcggaagcgaccgcttcggtgctttagacctgatcgacttcccgtttgcacaacctgagcgttgctga

SEQ ID NO: 358249 - DNA, 444 bp, Pseudomonas aeruginosa
atgcatgacttccgcccggtgatgttcaccgtacccggcgagccggtggggaaggggaggccgcgtatcggtcgcgtcggcgcccacgtcaggatgttcactccggcgaagacggcgaactacgaggggctgatcgcacacagcggacagcaagccatggcaggtcgcgcgctgttcgagggcccagtgctggtcgaactcgacatcgcgctgagcatccctcaatcgatgtcgaaaaagcggaaggccctggccttgtccgggcaactgcacccgaccaagaaaccggacctggataacgtccagaaggccatctacgacggcctgaacggcgttgtctggaaggacgacgtccaggtcgtgaaggcggtggtggggaagcgctacggcgaaacgccaggcgtgcgagtgaaagtcgtccctctcctcgagggcgagcagtga

SEQ ID NO: 358250 - DNA, 321 bp, Pseudomonas aeruginosa
atgagcacgacagcgaattggagttacaccaacacggcgacggttcggccgttcctgcacttcgacctttcgacacaggaggccgtttacggccccgagtacgagatcgcctgcacctgggtagcgaagggtgagcaggtccgcgataacaacggcgccgagttcgtgtcgcgccaccagatctacaccgaggaccgccggccgaagtacctggacctgatccagttcgacggctccaacggctgggaagagattcgctcggtgacgaactgggacatgtccttcttcggcgagcagccggactttctactggtgacctga

SEQ ID NO: 358251 - DNA, 201 bp, Pseudomonas aeruginosa
atgcgggaggagggcgggcaatctggagcgcggggggctgagttcgtatcgcggcaccagatattcaccgaggaccgccggccgaagtacctggacctgatccagttcgacggatccaacggctgggaggagattcgctcggtgacgaactgggacatgtccttcttcggtgaacagccggactttctgctggtgacctga

SEQ ID NO: 358252 - DNA, 438 bp, Pseudomonas aeruginosa
atgcgctatgacctgctgctgcagattcacctgttcgccgtggcgttctggctgggcgtggtcgccgtggagtacctgctggaacagagccgcgcgcagagccgcaaccaaggcttcacggtggcgcgcctgcatcgcaagatcgacctgttcttcgagatgccggcgtttctcgtggtgctgatcactggcatcctgctcttcgagcccgcgcgcttcgagggcctgtatgccgtgaaagtcgtggcaggcgccgcggcggtcctcggcaatatgctgtgcctggtgccggtactgcggcgccgcgctgcggccgacaaagaagatttgggcgacgtcatctcccagtccaggctgatcgaccggatctccctgaccgcaataccggctggtttagtggctctcgcctgtggcgtgtacctgatagtcctccgatga

SEQ ID NO: 358253 - DNA, 735 bp, Pseudomonas aeruginosa
atgacggcgctgacgccctgcgtggataacctcgacgcggcgaccgcgttccgcacgctggtcgaagcacgccgcgcgatacgccgcttcaccgccgaaacggtgcccgatgcggtgatccaggcctgcctggagaccgccgtactggcgcccagttcatgcaacctgcagccctggtcgttccaggtggtgcgtgaccccgaactgctgcagcaactgcacggcgtctgcctgggacagagcgccgccaaggcaccgctgatcatcgcggtgctggcgcgccccgacacctggaaagcggcctgtgcggacgtgctgaagttctggcccgagccgctggttccgcaaagcatcgagaacttctaccgcagcatcgcgccgtttcaatacaaccaaggggcgctgggctggctagggctgttcaagcgactgctgataggctggaccggtatcaggcggcccgtcatgcgcgggccgaacagccaccagcaaatgcgcctgtgggcggtgaagtcgacggcactggcagcacaaaacctgatgctggcgttccacagtcatggctatggaacctgcccaatggaaggcttcgacgaaaagcgcctgcgcaggatcctgccgatgccgaagcaggccatgcccatcatgctgctagccgttggagtgccgggagagcgggcgatctacaaccctcgtctgcgttttccgctggagcaatccgtcagctggcactga

SEQ ID NO: 358254 - DNA, 909 bp, Pseudomonas aeruginosa
atgagccgaacatccaacatcagcgcagaatccatcgccctgcaggcgggcgacggctatcgcctcgccgctacccgctatggcgcgataggcccgctcaagggcagcctgatcatggccggtgccactggggtgcagcagcgcttttatcggcgtttcgccgagcatgcctgcgctcagggtttcaatgtgctgaccctggattaccgcggaatcggccagtccagccccaaatcgctcaagggcttcgagatgtcctacctggactggggctttcaggacctggccgcggcggtggacttcatggccgacaacctgccgctgtactgggtcgggcactccttcggcggccatgcgctcggcctgctgcccaaccaccacaagatcaccgcagcctactgcttcggctccggcgcaggctgggccggctggatgcccaaggccgaggcgctgaaggtgcgcgtgctgtggtccaccattctgccgctgatcgtcgcttgcaagggctacatggcgtggagcctgctgggtatgggcgacgacctgccgctgggggtgtacaaggactggaagcgctggtgcgcccatccgcactacttcttcgacgaccccagcatggagccggtgacccgcaagtacgccgacgtgcgcatgccgtgcgtcttctccaatgccgtcgacgatccctgggcgccgccagcctcgcgtgatgccttcatcaagggctatcgcaatgcgccgctgctgacccgcaatctgcagccactcgcgggtgaggggccgataggccacatgggctatttccgtgcgtcggccactcaggtctgggacgagatgctcaactggtttcaagtcgtcaccccggacaccgcgtcgcggctgcgctgcgccacgagtgccgggcaatga

SEQ ID NO: 358255 - DNA, 1686 bp, Pseudomonas aeruginosa
atgagccgtcagaacaacaacgaaaatgccaggctgaaaatcgtaagtcgtcaggatgatcgcgacctgccggaccttggcgtgacgaccctcgacgagttgttgcaccacagcgctgcgcgcaaccccggagccgttgcactctctgcaatgggagcggatgtcagctatgcagacctgcaggagctgagtgccgcggtagcgagctggctgctggcgcaggggctgaaagccaatgagcgagtggccgtggcgctgcccaacctgctcgcgcacccgattgcctgcctgggcatcatccgtgcggggctcacagccgtgtgcatcaacccgctgtatacggcgcaggagatggtggagatattcaaggacagcgatgtccgcgcggtgttcttcttcgaccctaccagcgacgccgtgcaacaggcgttgcaggcagccggggtcagtgtcgccgtgcgcatcaccccaggcgacatgctgggctggaaacgcccgctggtgaactgggtagcgcggcggcgtctgggacgaaaatcggcaaccatcaagggcgcggccacttggcgacaagtgatatcgacgcgcccgacccatgctcgcccgctcaatacccaggccgagcagacggcgttgatgatctacagcggtggcaccacggggcagcccaagggggtgccgatcagccatggcgccatgctctacaacgtggcacagcaatattccgccctgcgtcagcacctggcaggcaaggccgagtatgactatgtcctgctcctcgccgtgccgctttatcacatccttggtctcggcaatctgctgttcgccctggccagaggcggcaaggcggtactggtgatgaacccgcgcgacacggcggcgttcgtcaaggagtgggctcgccaccgggtcaacagcttccccggggtgaacacgctgtacagcacgctactcgacagcgacgaattccgggccctggacttcagctcgctggccatctgcctgggcgccggcatgccggttgccgaagccacggccgagcgctggcaccaggtcacccactgccacatcaccgaagcctacggcatgaccgaaacgggactgatttcctgcaacccggtggggcgctcccggccgggctcggtcggcctgccggtgacgggcatcgagatatcgctgcgtgatgagagtgatcgggaagtcaccatcggcgacggcgagatatgcgtacgcagccctgcggtcatggccggttactggcagcgcgacaaagaaaacgcctcggccttcaccgccgatggtttcttccgcaccggtgacatagggctgttcgatgccgatggctatctgcgcatcgtcgaccgcaagaaggagatgatcatctcctccggcttcaaggtttttccttcggaaatcgagcgcatcctcaatacccatcctggtgtacgcgagtcggccgtcgtgccggcaagtgacgaaaaggccggtgaggttcccatcgcctatgtggtgcgccgacagatttacctagatgagcaacatgtgatgaagcattgcgagaaacacctggtcagctacaagcgaccgcggcgcatcgtcttctgcgatgagttacccaagagcaatgtcggcaagatcctgcgcaagacgctggtcgagcgacagcagcaggagcacgcccgatga

SEQ ID NO: 358256 - DNA, 564 bp, Pseudomonas aeruginosa
gtgcgcccatcaaagatttctcgcgaagagctgctgcaacgctgtgccaataccttcaagcgcctgggctaccacggcaccacgatggacgaactgtccactgcctgtggtctgaccaaggcctcgttctatcaccactaccccaacaaggacgccctgctgaaggacgtgctgggctggacccatcaacgtctgaaagaggtgctgttttcacttgcctatgagcaagcggttgcgcctgagcaacgactcgaaaacatggggcgcaaagcaaagaagatgtttcaggacgactccatcggttgcctgatgggcgtcgttgccgtcgatgcgtcctatgggcgcaaagagctgatggagccgatccgggcatttctggacgactggattgccgccttcagccagctgttcgaggccagggacttcagtgatgccgagcagcaggccaagcagctcgtcgccgacttcgaaggcgccatcctgctggcccgtatctacaacgacccgagctatatcgaccgtgtcaccctgcgtgcggtcgagcggctcaaacccgcaagctag

SEQ ID NO: 358257 - DNA, 480 bp, Pseudomonas aeruginosa
atgatgcagaaatcgacctccctgatcgacgagatcgccgcagacctgaatggcctggaacagatgaaagccttgctgcgttcaccgaagaaggtcgggatattcgagtcgttgaagcttgagtttgccgaggtcgccaagggccgcgtggtggttgccggcattcccgatgcacatgtctacaacccgataggtaccgtgcatggtgggtacgccgccacgatgctcgactcggtctgtggctgcgcgacccacaccatgctgcaggccaaccagggctataccaccctggaactgaaggtggcttatcaccgccccatcacccgcgagaccggccaggtgcgggcgattggcgaagtgatgagcgcgggcaggcgagtggcgtttaccgaggcgcgcatcgtcgatagccaggaccgactgctggcttcggccacctccacgctactgatcatggaaaagcccaccaccagcaagtaa

SEQ ID NO: 358258 - DNA, 585 bp, Pseudomonas aeruginosa
atgatcttgggcacagcggatttgctccgccggcgcggtgtatccgccacgagtattcgcgaggtggttcgctactccggaacgccgagagggtcggttgcccaccacttccccggcggcaaacgacaactgctggaagccgcagtcgagcacgcagggcgcgaggtcagcgttccgctggccgagctactcgcccagcacggccccgtaccggggctggagcactttgtcgcgcgctggcggcagatgctggaggaaacccgctaccaggccggctgcgccgttctcgccgtggcggtcgagcagtatgtgtctgatcaacgtggcgaggcgaacccagacctggacagccaggttcaggagcaactgctggatcatgcccacgcgatattccgcgattggcagcgcatcatcgctgaggcgctgctgcgcacgggcgcatccgaggcgcgggcggcgagtatggcgctgatggtaattgccgcaatcgagggctcggtcgcgctgtgccgcgctgctcgcagtgcagaaccgctggatgctatctggcaggagctcaggcaatcgctgggggctatcgcctga

SEQ ID NO: 358259 - DNA, 396 bp, Pseudomonas aeruginosa
atgaatacccgcccaacgcttccccacccgatcacttcaatatcctgcgcgtcgctcaatactgcggatggctggctaccttacccgcttggcgaggatgtcatcgccggtcagccagacacacggatgaagctgctgcgcaccgtaggcgtcaagacaccccacaagtccgtagcctttttcacctcgcagccggcgaagttccattggcgcttcgacaacgacgaagccttcgtcctgatcgaggggcgcatcgcgatcactatggacgacggcgagcgccacgaaatggggccgggtgatgccatctcgattccggcagggcgcacaggcgtctgcgaagtgtttgagttcagccgcaaattcacggtcgtcaccagcggcaccgcggactag

SEQ ID NO: 358260 - DNA, 237 bp, Pseudomonas aeruginosa
atgaaaaccttctatgtacttacgcgtcacaacgccgacggcagcagatcagtggccgagatctactattacaacgaaaacggcgaaatgcagattgaccgcaaggccacagaggcgtgcgacgggctggctgttcgggatgactgcagtgtggatgcctggattcagatcgagaagggaattgcagatcgcttgtcgagaaccggaatacttttcgacgagattcagtttgattag

SEQ ID NO: 358261 - DNA, 1101 bp, Pseudomonas aeruginosa
atgagaatcggctctcgaaaacctacaggtgagcgactcgaacggatgcgggcatcaccgctttgggatggtaagggtttccgcaatcagcatccgatactgcccggattgcgcgaccataagagaatgatgccttcgatgagcgagtttctcagtggccgtaagctaagtgttcctggtaagcctcttccagccatgaatccgcttgtgcattggaccaagccggccgtttcaggattacgcgcaacctggcttgggcattcgactgttctgctagagatggatggcatccgtatattgacggatccggtgtgggggttgagagcttcaccgtcaagtttcattggaccaaaacgatttcagcctgttcccgctgcccttgatgctctgcccagaatcgatctagtagtgatttcccatgatcactatgaccatctcgacttcccaaccatccgccagttggctaagcgtgacgtcgcgtttgtcacgcctcttggcgtgggtgcgcatcttgaggcctggggcattcagcctcagcgcatcgtggagttggactggtggcagtcacatgctgtccccaatactgatctagtggtgactgcgaccccctcgcaacatttctctggacgaggactgactgatcgtaatgccacgctttggtcatccttcgttctgcgttcgcccagcgccagtgtgttcttcagtggcgacacgggactcaccaccgagtaccaatccattggtgagctattcggtcctttcgacctagtaatgctggaagtcggagcctttcatcctgcgtggggccacacgcatcttgggccggagaacgcactcaaggctcttcagcttttgggtggtggcgcgttacttcccattcattggggtaccttcagcctagcgccgcatgcatgggaccagcctatcgaattcttgctaaatgccattgcccccttgaattcccgcctgcttttacctcgattgggggagccggttgagcccgcactttggtacttctctgatgcatggtggcggggcattcacgatgctgagacggactcagtagctataaagcgtcgcttgggcgggagtcacgaatga

SEQ ID NO: 358262 - DNA, 591 bp, Pseudomonas aeruginosa
atgacagcaaagatcgcaggcttgcgagagcagcagaaagcagcaacgcgcgcagagctctaccaattcggattcgaactgtttctgaaacagggttttgccgaaacaacgatcgaacagatcgtcgagcccttaggaatcgctaagcgcacgttcttccgttatttcgccaccaaggaagacttggtgttcgcctggtacgagggaaaaaccgcagaactggttgcagaactgaaaggccgacccaagaaggaaaagccgctgagtgccgtctgcgagaccctagcgtcgttgctcaaacgctatgacgcggccccggacatggcctttgctttggtccggctgctgaagacgaacccctcactagagggaaaaagctttgagaagcaaaccggacgagagaaggcgctagcaaatgcgcttatcgagcgtgaaggagcagacaagctgcccatgctcaaagcacgaattgtcgtcggcgtagtgatggccgctttttctgcggcgctcgatgagtggtatgcgagcgaaggcaaagcggatcttcgccccatagttgaaacagcattttccatggctagagcgccatag

SEQ ID NO: 358263 - DNA, 1542 bp, Pseudomonas aeruginosa
atgagcagacactggtttacccgatacgcgctgacatcgatgctcttagtgggaggctgctcacttcagcccccctaccaggcaccgaaactagacgtccaggcgcgctggtcaaatacaccaagcgattctcaggccttccagtcaccccgagtagcagactggtggctgcagctggatgaccctgccatcaatgagctgatcgcgtcagcgatcctcgatagtcccaatcttgctcaagcggctgcccgcgtcgatgaagccagggccgctctgtctctcagccgcgcacagcgttttccccttcttacggccgatggctctattactcggggtaattcacagagtcagtccgcgggaggtgcttcaggtagcagtgacccggtaaacattaccgccgcatcgttggggccatcgctcagttgggagctggatctatggggcagagcccgatccgtagcagaggcatcacggctccgcttagacgctcgcaacgcagacgctgaagatgccctgctctcactgtccgctcagattgcggatggcgtcctgaatctgcgtgcgtgccactactccctggccattcgtgaccaggacatagtctccaggcaaaccgaactcaccttgatgcgacagcgcctggcactcggcaacgttgctccagtggatgaagccaatgcgataagcagtctggccagcgcccacacaagtcggctgagtcagcaagaaagctgcacacagatggaaaacgccttggtggcgctgagcggtcgtgataccggaacgattcgacatctgatgaaggctgcggatgcagccagagaaacctccagcacgactggaaatccccaccaataccgctcggccacagtgatacctgtagctccgctagtacaaccgcgcctccctgccatcgttctcacgcagcaccctactgttcgcagcgctgagcgggaggttgcggcagcctacgccgaaattggtgcttaccgagccgaacgtctgccccaggtcgacctgtcgttgctccttgccggccaatggatccacgttctgggctcaaccacgtacaacgacacctggtcagtaggatccgcgctctccatgccaatctttgatgccggtgccggtgcggccaatgtccgcggtgcagaggctcggtaccggggagcgctggccaacctgcaagccgcattaagaacggcgacccaggaagttgaagacgccctggcaatgcagctatccgccaggcagcgactggtgacatctcagcaatcagtgacagccgcccgacaagttatgcgcagtgatgaagcgcgttatcgactgggggctatcagcctgtttgaactcgagggcgctcgccggcagctcaataccacccaggaaagtgccatcgccgctcagcgggatagcgccagcgcctgggtggcactggtacgggcttcgggcaactcgctctcaaacgtaccagtggagcagacaaccgctccacagttgaacactcctcataccgataaaaacggcagcagcgcccaatga

SEQ ID NO: 358264 - DNA, 1116 bp, Pseudomonas aeruginosa
atgacttccacgaccccgagttcgaacactcccactcttcgatcgcgaaaacgcttcatatacgtattggtggcggcagccgtcataactgtgacagtgctttttgccccgggtattaagcaggacgcgcccgacgagacagcacaacaaggcaccgcagcgttgactgtcaccagcactcgcccacgtgcagtcatatggccagaaacactgcaggcatctggagaaatctccgcctgggaagaggctagcatcggcgctcagatcggtggttatcagttggtcgaggtccgggtgaacgtcggcgacaccgtgaaaaaagggcaggtgcttgcccgctttgaccgagcattgctattggcggacaaagcgcagttacaagcgaacgctgaccaggccgcagccaaccgacaacgtgcgcttggcctcaagagcagcggaggcatcagcgatcaggatgtgctgcagtttgttactcaatccaaagcggctgatgcacaactcgcctacaagcagttggaactgcgttatgccgatgtactggctcccgatgaaggggtgataagcgcccgttcagccacgctcggttcggtcgtgccggtcggacaagagctgtttcgcatgattcgccaggggcgcctggagtggcgcggcgaacttaccgcagctcaactcgcgaaaatccagatcggccaggaggtggtgcttactctgcctgatggcagttcggcgaccgcactgattcgccaaacatcgccatcactcgacgaagatacgcgtcttgccatcgcctacgccgatatccaaccaggaagccatgcgcgtgcgggtatgtatgcgaacggtagcgtgcaacttggtgatagcccggccctggtcgtacctgccgaaagcatggtcattcgcgacgggcgtagccatgcgctcacgctggctaacagcgacagcatcacttccgtatcgctccgtgaagtcgtcgtcgggcggcgagttggtagagaagttgaattaaccactgggctcgattccgaggagcaggtggtggtaaagggggcaggatttctcaaggatcgtgatctggtgcgcgtcgtgcccagcggagcggccgagcaatga

SEQ ID NO: 358265 - DNA, 3075 bp, Pseudomonas aeruginosa
atgaatttcgctacctggtcgatccgcaaccctatcccttcgatcctactgttcgtcctccttgctctggcaggactatggggcttccggcagctgccaactcaggatttgcctgacttcgacctgccaatggtgaccgttacgctgacgcagccaggcgcagcaccggcccagctggaaacagaggtcgcacgccgggttgaagactctctcgctaccctgaacggtctcaaccatctgcgtacctcgatcactgatggtctggtctctattcaggttgagtttgtcctggagaagaaactttcggatgcgctgatcgaaaccaaaaatgcagtcgacagtatccgtaccgaactgcctgccgatctgttgcaaccgacggtaagtgcctcgaccagtgttggtcagccggtgctgacctacgccatatcgtccgctcgcctagacgaggagcaattgtcctggctcgtcgacgacagggttgccaaggcggttctggcagtttctggggtcggccgctttgagcggctaggcggagtcgagcgcgaggtacgaatagaggtagacccgcagcgcatgcaagcgcttggcgtcacagccgccgacgtgtcgaatgccttgcgccagatacagctggaatcatccggagggcgcggacaatggagcggtgaagagcagtcagttcgaaccattgccacggtgcggcaggcctctgagctcaaagagctacgtataacgctgccaagtggaaagagttttcgcctcgaccagatcgcaaggatagaagatggcccggcagatcccactcaagcggccctgctagatggcaatcaagttgtcgggtttaacgtctatcgggctaggggctttgacgaagttcgcttggccgaaggcgttagagaggctctacaggatctccagcagaatgaacctgacctcaaattcagtgagatatccggctctgtaagtcagacggtcgagcagtacgaaggctcgatgacaatgctgtacgaaggcgcattgctggccatgctggtggtctggatctttctgcgcgactggcgagcaactctgatcgcctctgctgccttgcccttatccattctgcctgccttcgccgccatggcttggctcgacttcacgctcaacaccgtcacgctgctggccctagcggtggtagtgggcattctcgtcgatgatgcgattgtcgagatcgagaacatcgagagacatcgacacatgggcaagtccatccgcgaggctgcggaggatgccgtcaacgagattgcactagcggtgatggccaccaccatgagtcttgtcgcagtctttctgccgaccgcgctgatgagcggcattggtggcttggtgttcaagcagttcggatggacctccgtaatcgcggtgctggcatccctgctggtagcccgtctgctaacgccgatgatggcggcctacatgctcaagtccgagccgatgccgccgcatcaggatggccgcatcatgcagtggtacatgtcagccgtgcattggtgtctggcacaccgcaagaccacggtgggcggcgcacttgccttcctgattgcctcacttgctctagtgccccacatcgagactggcttcataccgccagccgatggcagcagcaccatggtgaccatagagctgcctcctgccagctcgctggatgacaccctggccgtggccgaagacgcacgccatgcattgcaggatgtcgcggggatagagcacgttttcacgacggtgggcgctgcgcaaagcgccggccaaggtgcctccgcccccggagaggttcgtcgagcgtctattacgctaacgtttcttccccgaggcgaacggaactctcaacaagccattgaagacagggttcgcgaacgacttcagatggtgccaggagctcgcttttcgctaggtagcggcgcgccaagcgagaaactccagatcattcttgccagtgacaacgccgacgctcttaaggccagcgcagaaaaggtcgaatcggagctccgggacgtcaggggactgtttaacatcacctccacggctagccttgaacgccccgaaatcattatccgccctgacgggcagcgagcggctgaactaggggtcaccagtgctgcgatcggcgaagtggtacgcgtggcaaccagcggtgatttcgaccagcaggtcgctcgactgaacctcgacaatcgccagctgtacattcgtacgcgcctgcccgacgaggctcgtaccgataccgccacactggcaaacatgaaggttccgggccgaaatggctcagtgcccttggccagtgttgcgactatttcactggaaagcggccccgtacagatcgaccgttttgaccgactgcgcaatatcaccatctctgccgacctaggcggtacggccttgggcactgctcaagcagctgccgccaagctgccttcgattcgagcactgccatccactgtgaaagtcatcgaagcaggtgatgccgagattgtcgcagagctgggtatgggcttcgccatggcgctcatagtcggcgtgttgtgcatctattgcgtcctcgtgctgctgttcggtgatttccttcagcccgtcaccattctctcggcaatacctctgtccataggcggggcgtttctcgcacttttgataggaaacagcctgctcagcgtgccctcaatgattggcctggtgatgctcatgggcatcgttaccaagaactcgattctgcttgtggattacgcggtcatggggcgcaagaaggatggtctttctctgcacgaggcattagtagacgcctgccacaaacgcgcgcgccccatcgtgatgacgaccatcgcgatggtcgcaggcatgctgcccatcgcgctggggttcggagctgattcgagttttcgtcaacccatggcagttgccgtgattggaggcctgattacctctaccgcgctcagcctactcgtcgttccagtggtgttcacctatgtggacggcttcgaacgtcgactagcaaaactctttcaccgtcgtcctccagaacctcggctagaaaggagataa

SEQ ID NO: 358266 - DNA, 810 bp, Pseudomonas aeruginosa
atgacccgagaactcgtgacccgaccattcgctctgcccgcattggcgtgcttgctcggcatcccagcgagtccattgctggcgcaagagcaatcggaaagtccatggcggatcggtttgggcgtcggtgcaatccatgcgccggagtatttgggcagcgatgaatccgaatcccatcccctgccactggtcaatatccgctaccagcgattcttctttggtggaacaccgggatcaggcctgccaggccccggactgggcatatacctgcacgaaagcgaagccttgaccttaggagcggtactaaccagggatttaggagccccgagggaggagtcggatgatcaccgtttgcaggggttaggtgatatcgacgcaacgacccgtacagggctgtttggtagctatcgcgccggatggttttcgctcaacgctaatgtactttccgacatcggcggcaacgaacaaggcactactgtcagcctggacgccaaagcgacatatcgcccttctcaaaagctccagctatcagctggccccggcatcacctggggaagtagcgactacatgcaaaccttcttcggcatcgatcagagccaggcagtccactcagcctattcaccatatgacgttggcagtggtgtttcactactgcgcttctccattggcgccaactaccaactggccagccgatgggcattgggagcaaatctcacagcggctcgccttcaaggcgatgcggcagatagcccaatcgttcaagacaagaaccagaacagctacgccgtttttctgatgtaccgcttctga

SEQ ID NO: 358267 - DNA, 918 bp, Pseudomonas aeruginosa
atgagccaagccaagcagcagcgtgtaatcgtaatgacgggcgcaacaggaggctttggggcgaaagcggcgcagttgatcgccgagcagccaaatactcgcgttatcgttggcgctcgtgacgtgagcagagtccccgggagcattgaggcgttgccgctggatctcgcctctctcgccagcgtacgagagtttgtcatccgactgactgaacaactcgctgagcgcccaatcgacatcctgatattgaatgcggggacccatttggccaagaacgacaagcgaagtgcagatggattcgagctgacgtttgccgtcaaccacctcgcgcattacctactggccagatcattgctaccccatttggccgatggtggccggctgttaattactaccagcgatacccacgaccccgcagtgaccggcatggctccgcggagtttggacccacagcagttggctcacccaacaaccagcggtttcggtaccggcgtaaaggcctatgcgtcgtccaaactgtgcaacctcatgaccgcgcaaaccctggcaaggcatcaggagattctgtcacgaggcatcagcgtgattgccttcagccccggcttgaccagtggcagcgccgggcgcgacagctctgtgcccttgcgcggttctatccaggtgctgatgcataccgtctttcgtgtcttgggcctgtttcgatcagcttacgtcgccaatccgcctgagcgatctggagcatcactggccgactttgcactgggcaacgccaacatgccgttaggtcacatttacgtggccctggttaaaggcaagccaacgtttcccgagccatctgaactggcgcgaagccagagcgcacaacagcaattgtggcgcgacagcgcagccatggtcggcatcgactacgaggcatga

SEQ ID NO: 358268 - DNA, 675 bp, Pseudomonas aeruginosa
gtggtaaaggatcagcgcacatcaccgacgaagcatcgaaccgcaaagggcgcacaacgccttcaggatctaatctccgttgcggctgagctattcctcgaacgcggtttcgacagcgtcgccgtggatgacttgatcgcccgcgtgggaggttcacgcagcaacatctatagccacttcggcggcaaggaaggactgttcaaggaggccatgatcagtctgtgcgcagacgtggcgaagccgctggagcagttgcgaatcgggaatggcgggccagaagaagtgcttccattgctcggcaagcggctactacagtccgcactgtccccacgcacgcttgccctgcaccgtctcttagtcaatgaaggcaggcgctttcccgatgttgcacaggcaatgtgggaagtgagttacggcaaggccatcgagatcctctccgactggatcgagacgcaacagcaatcgggaaaagacctgtctggcgcggttccagccaaagtgcttgccgaacatttcattggcctggtagccggccatgccaagctgctggcagcttcaggactccgttcgtcacctttgtccaacagcgagatcgaccgaattgtgggccacgccgtccagacctttcttcatggctcattgagccgtggagtggagcgtagagagaagaaataa

SEQ ID NO: 358269 - DNA, 1245 bp, Pseudomonas aeruginosa
atgatcgatcagaaagataaatttgacactaaacaagtacacggcgcaaaggccagcgcggcgacttcagcacaggtcggaaagcattgggcagaccctggttttttcaatgacaacgtactgcttgacgcactgatcaagcacatcctgagcctgatgccctacggcatgaccgatttcggcgaggtcatggacgtggtgcaccagctcaagggcagcgacgaagaggcttgggtcagtgcctgggccgcgctggcaggccggctgcaggacagggccgaagcggctgaccaaaaaggcaagcgcgtcaccgccgccagcgcctttcttcgggcctccacctactggcgctgcgcgctcctgtatttcagcgacttcgaggacaagcgcatgaaggagtacgcggtcgccagcgcctcgtgctacgagcgctacatcaagctgtcgggctaccccggcgagcgcatcgaaatcccctacgagggcgacttccttcccggctacttctaccggtcgccccatgcgggcgcaaaggcaccactgctcatcgtcacgcctggccgggatacctgggccgaagacacccgctgggtgtgcgaaggcgcgctgcaacggggtatccactgcctgacctacgatggtccgggccagggattcgcgctgcgactgaacaatctcaccttccgcccggattgggaaaaggtcgtcagcccgctgatcgacttcgcgctggaaaaattcccggaaatcgacgcctccaacatcgcgctgatgggactgagcttcggcggctatctggcgccgcgcgtggccgcgttcgacaagcgcatcaagctctgcatcaccgatcccggcaacatcagttggggccgccagatcatcgcgcaactggagcgcttcgctgaccacccgctggaccagattccggagcagatgcgcaacctggtgcgtgactacgcctggaagcacggcgtgccgaacacgatcaaggatgtggtgcaggccctccagccctacgacaactcggccgttctggacaaggtgacctgcgagacgctcgtgctggacggcaccggcgaggtcttccatggagccaagccgttctacgacgccttgcaaggtcccaaggaatacctgttgttcgacgagacctcgacggcgcagtcgcactgccagatcggcggttatgcgacggccaccgaatacatcttcgaccggatcgccgaacggttgggttgcgcgtga

SEQ ID NO: 358270 - DNA, 870 bp, Pseudomonas aeruginosa
atgaattcttcgcttcccagtaccaatgagttccgccttggcggagagctgcccatcaaccggctgggctttggcgccatgcgcctgccttgcaacggcttccgtggtccggcgcgagacccggaaaccgggcgtgccgtgctgcgccgcgcagtcgaactcggcgtcaaccacatcgatacggccgagttctaccagagcaccgatggttcggtacgcgccaatgcgctcatccgtgaggcgttgtatccctatcggtccaacctggtgatcgcgaccaaggtcggggtcgtgttcaacccggatggcagccatcgaccggccaccggtgccgacatgcgcaggctcgtcgaagagaacctgtcgagtcttggcctggaccgtctcgatctggtgtacctgcgcatcggcgagatgacggtgcctcacggcgagtcgctggccgaacgcttcgaggcgctggccgcactgcgtgcagaaggcctgattcggcatctgggcatcagcaacgtcgatatcgggcacttcaacgaggcccgcgccatcgccccgatcgcggccgtgcagaacaacttccatatcgccaagcgcgaggacctgagcctgctgaaggcctgcgaagaagccggcatcgcgttctgcccgttcttcccgctcggtgggggcatgggggagatcgacgacgggcggctggcccgggtcgccggaaggcatggtgccacgccgtcccagatcgcgctggcctggttgttggcatcctccccggtgatgctggcgatccccggcacgggctccgtcgagcaccttcaggagaacgtcgccgccggtggcatttccctcaccgaggaagaccatgccgaactggcatga

SEQ ID NO: 358271 - DNA, 1329 bp, Pseudomonas aeruginosa
atgccgaactggcatgaattcggcgtccgctcggtcatctcgcgcttagcgcgaggtgccgcgctgctcgccgtggttctcggagcagtcagcctgtcgtccgggtgcgcaacggtggatttcagcgagtctccggtcggctcggtgagctttgaaaagtatcgacgcgacacgatcgctcaaatccaggccggccgcagtttccagcttgccgaccgggatgccgagttggcgtggaatgccccacaggagtggcggcccgctgaatccgaggcgggagcgcgtccgcgaaaagggattctgttcgtgcatggcctcggcgattcgccctggtccttccacgacgtggggccgccactggcgagccaaggattactggtgcgaacggtgctcctccccggccacggcacgcggcccgacgacttgctgacgactacggcggagcaatggcgccaagtggtctgggaacaggccatggcgctgcagcgcgacgtcgatggcgaggtgtacctaggagggttctccacgggagcgaacctggtccttgactacgcgtattcgcatcccgagatcgcaggactggtgctgttctcgcccggcttcaagagcatgcccttcgattggcttgcgccgctggcggcccgtgtccggccctggctcatcaagcctgacgggacgattccgatgcagaacgccgtcaagtacttcaacgtcccgtccaacgggttcgcacagttctatcggaccagcgccaacgcacgccggctgctgcgcgaccgggcctatgagaagccggtcttcatggtcgttgccgagcacgattccgtgctggataccgactatctgttcgatgtcttccagcagcgcttcacgcacccggacagccgcttggtctggtacggaggcgagccggacggactgacggatcgccggcgcgttctggtccggcaggaccggctgcccgaatggcgcatcagccagttctcgcacatgagcgtcacgttctctcccgctaacactgtttatggggacggcggcagcctgcgcctgtgcctgaacggcttgcgtgaaggcgacacgcaggcctgcgaaaagggggagcccgtctggtactcggactggggctatcgagaggaagggaagatccacgcacggctcaccttcaacccgtatttcgagtggcagacctcggtgatgctggcgatgcttgacaccgcaaccacatccgtcatctcgcaggacgtcacgttgaagacctccacgagcgaacgctcccggccagcatcgccccctcgatccattgacattccaaaagcagccgaaaggtaa

SEQ ID NO: 358272 - DNA, 930 bp, Pseudomonas aeruginosa
  misc_feature (197)..(197): n is a, c, g, or t
atgaaaagagtgcagttcagcagctacggtggccccgagacgatggcattcgccgaatatacacttcccccactcgaagcccgacgggtgcgcgtgcgcgtgaaagccgctgcgatcaatccgctggattggaagctgcggcgcggtgtcatgaagttcgtcaccggacggaagtttccccagggtatgggttcggncttcgctggggtagtggaagaagtcggcaccgatgtcaccgacttccgtgtgggcgacgaagttttcggcacggtcgagattaagaggcaaggtgcgtttgccgaggtcgtcgatgccgacgccaagctcattgtccgcaagcccgcctcgctcacgttcagcgaagccgcgtgcctccccatcccggcggcaaccgcctgggcggccgtcgtcggcgtcgcgcgcgcgggtcacggttcgagaatcttcatccacggctgcagcggcgccgtaggcagcagcgcggtccaactcgcgcaggcgcatggcgctcaggtgtgcggcgcatgcggcgatgcttcgatcgctgcagcgaagactgcaggcgtcaatccggtgtttccttactcggagaaggcctcgtttgcatccgacggcctctacgacgcggtgttcgacacgctcggcacgctggccgtcgtcgatgggctggcgctacttaagcccaagggccgcttcatcgacatcaatccgacgccggctcggatgctgcgcggcctcatttccgggcgctaccggatgacgttctcgacgggtggtttcaagaatctggaggacatcgccaagttggccggcgacggaaagctccgttcgtccataggcctcgaagcgccgttcgccgacgcgctgtctgtgatcagggacgcggagttcggtcggcgcccgccaggccgaattgtgttgctcatgtaa

SEQ ID NO: 358273 - DNA, 711 bp, Pseudomonas aeruginosa
atgcgcctctttataaccgtacagtacggtcattttatgcacgtagtcttgcgaaggtcaatgcaaaaccatacagtactgtacgaaaaagtgaggtttccaatgagagtgaagacagatgatcgccgtaaggtgatcctcgacgtggcgatcgagatatttcgcgaggtcggttatgcccgtgcaagcatggcaatgatctcgactcgaatcggtggatcgaaaggcactctctatgggtatttcaaatccaaagacgaactattcgctgcggccatgatggcagtgatggaagagcaagctgatgagatcatgggcttgcttgatctgtccgaaccggatgtagcattggcacttagacgatttggtgaggcgttgcttgctttgctgacttctgcggacacgcttgcaatcatgcgagctgcgatcgccgaaggcgcaaattcaaagctgggagctacgctctatgagatgggggcggggcgagcgtggcatcagatgacaaactacattgctcgacagcaggaagtcggccttatccgtgcaatggatgccagcgttgccgcagcgcatttaaaggctttgctcgaaaccggatttatcgaaccattgctgtttggagctcggccttggttcacaccgaaagaagctgtcgcgagagcagtcgatgtgtttcttcgcgcttatggtagtaacgcagatgctccgtga

SEQ ID NO: 358274 - DNA, 1437 bp, Pseudomonas aeruginosa
atgcagccgtccgatgtgcgaaagccaagcaaggtattgaaagggggagtcgttcttgcgagcacgctcgtactatgcagctgcgcgcctcttccgcataagtccgacacagcaatggcgggcgcgcggactttcgcgagcgcgaccagcctatccgcgcccgagaaggcatggccatcggatcgctggtgggaaggctttggggatgctcagctcaattcgttgatcgctgaaggattggaaggggccatggatctgcgtgtagcctctgcgcgcttcgctcacgcagaggcccttgtccaacagacacggagccgcttgctcccagcgcttactacaagtgcagaagttggatcgaccaagcaaagctacaactatctttcgccagaaagcggcctcccgaaaggttggcgtggatatggccaaacgacgatcgatctcagttgggaacttgacttctggggccgcaaccgggccgcattagcagcagcgcgttctgaagctgaagcagcaggggccgaagccgcaagcgctcggctggctgtgtccgcaagcatcgccagcgcctacgcggatctggccggaaattacgccgaacatgatgccgccgagcatgcaattgaagtgcgtaaccacacgctggaactaatagaagggcgccaggagcaaggactggaaaatgaaggtgcggtggaacgcgctcgttccgcgctagctaccgctcaaggcgatcttgccgcactgaacgaatccctcgcgctcacccgcaaccgaatcgcagcgctaattggggccggccctgatcgcggacttgccatcaaacgccccgccgcgatcgtcaccggcagcttcggcctgcctgccaatttgccggctgaattgatcggacggcggccggacatcattgctgcgcgactacgggcagaagcctcggcgagccggattaaggaagcccatgcggctttctatcccaacgtcaatctggcggggctgattggcctgcaggctctcggcattggcaacgtttttaagtctggatccgactttggaacagtcggcccggccattagtctgccggtattcgacggtgggcgtttgcgtgggcagtaccgtgccgctgaaaccgattaccaggcagccgtagcccaatatgacggcgcgctaacgcaagcgttgcgagacgtggccgatgcagccgcaagctcacgagctcttgacctaaggctcgaccacgcacaagaggctgaacgcgctgccaatgccgcgtggattgtcgctaacaatcgctatcgcggtggtcttgcaacctatctcgacgtgctcgccgccgaggacgcgctcatcagtgcccgccgctctgtcgcttccctgaagacccgtgctctcgccctcgatatcgccctcatccgtgcgctcgggggcggctatcgctcatga

SEQ ID NO: 358275 - DNA, 1182 bp, Pseudomonas aeruginosa
atgaaggaaatcctagtcatgtctgaatcatccaccgccgctgcccaagacgcttctgctgttggggtgaaagaagctaccgatcgcagcacgcaaaagatcaagcgaattcgactatttctcggcttattggccagcgtcatcctgatcggcggcggctactatggctatgacttcttcatcgcatcccgccatgtcgaaaccgacaacgcctacgttggggccaatatcgcgcaagtgacgccactgatcggtggtcctgtacgcgaagtgctggtggatgacgctgtgcccgtgcggcagggcgacgttctcattcgactggatgatacggatgccagaatcgcgctggcacgcgccgaagcacaactggcgttaaccgagcgccgcgtgcgcggacttattgccaccgatggaggccttgacgcgcaaatcgccgcacgagccgccgacgaagcacgcgcccaagcgcagctttccgctgcccaggcggacctgggcagggcgaagatcgatcttaagcgccgcatcgccctggcggcctcgggttccgtatccggcgaggagttgaccacggcgcgcaatgcctacagcacggcgctcgccaatatgaaggttgccgaagcagcccgcacacaggccgcggccaaccgcgtgacggccatcggaagccgcgacgctaaccgtgcactgatcgacaagagcacacctgacaccaatcccgaggtgctggcggctcgtgccgaacgggaccaggcacgggtcgatctcgagcgtaccattcttcgtgcgcccgttgacgggatcgtatcccgtcgccaagtgcagattgggcagcgtgtgcagcccggcgcaatgctgatggtggtggttccgatccacgcgagctatgtggacgccaacttcaaggaagggcagctcaggaaagtcaaacccggccagccggtcaagctcacctccgacctctatggcaatagcgttgtatatgacggcaaggttgtaggcttctccggcggcactggttcagcttttgcggtggtacccgcgcagaacgccaccggcaactggatcaaggtcgtccaacgcctgccggtgcggattgcgctcgaccctgaacagctttccaaacatccgctgcgcgtcggcctatccatgaccgcagatattgaagtttccaactga

SEQ ID NO: 358276 - DNA, 1548 bp, Pseudomonas aeruginosa
atggttgaagccacctctcatcgtgaaagtcccattgcccagcccttaacgggagggaaactcatcctctccgctattctgatcggactgggaaattttttggtagtgctggacaccacgatcgccaacgtttcaattccccatatcgccggcgggctcggtgtctcggccagtcaggcaagctgggtcatcacatcctatgcggtggccgaagcgatcaccgtgccgcttaccgggtggctcatgcgccgctttggcggtcatcgagtgttcgtcatatcctatctggcttttggggtgctctcactactttgcggcctctctagctcgcttgggatgctgatcgccgggcgcatattccttgggttggccggtggcacgatcatccccctgtcgcaaacgctgctgctgcgtatttttccgccggaaagggcgaccactgcgacaattatttgggcgatgacaaccaccgtcgcccctatcgctggccctattctcggcggcacgatctccgataacgtcggctgggaatggatattcttcatcaatgtgccgattgctgccgccggcggtcttgggcttctgtatctgatgcgcggccaaaaagaagcgatcaccaagtctccaattgatgtggtcggtcttggcctgctcattgtgtgggtcggtgctcttcagatcatgcttgatgaaggccgcaaccatgattggtttgcagcgacagaaatccgcgtgcttgccgtgattgccgcaatcggctttgtcgccttcttgatatgggaactaactgagaaaaaccccatcgttaatctgcaggtgtttcgccatcgcggcttcgtcactgcttccatgacctattccgttgccttcggtgcattcttcgcgggcattgttctgatcccgctttggctgcagcaaaacatgggctacaccgccacgtgggcaggttacgccactggaatcatgggtatcttcgcggtacttagttcacccgttatcggtcaggtcgccggaaagcttgaccctcggttaatcgtatcgatcggagtgttggggctaggcggcatatccgcatggcgcgtgggattcacgcccgacatcaccttcctccaaatggcgtggcccatgctgttgacgggaccattcctaatgatgttcttcattcccgtcaccggcctgtgcatggccagcgtcaaggcagaggaacaggccgacgccgccgggatctcgaacttcatgcgcacgcttgccggcgcattcgcgacctcgatagttcagaccggctgggctagcgcgacacgcgaaaaccaaaccgaattggccagcgcgatgacgcaagggcagattaccctcgacggcatgatggcaagcggcatgtcgagggaagccgccacggctatgttgaccagcatcgtcgagggccaaagtgtcatgctcgctacgctcaacatgttcgccgcgattgccatctgtttcgccttcgcagccgcattgatctggttctccccgagaccaaaggggcccattgacataagcggtggccactag

SEQ ID NO: 358277 - DNA, 624 bp, Pseudomonas aeruginosa
gtgtttccggacctcgttgtctgcgagcactgcgatagcgtgtaccggcgcatcgctctggcctcggacgaggtggcacgctgcgaccaatgcgccgccattctctaccgtgccaaccgtctcgatgtcgatcgctggctggcgctgaccctcgccgcggccatcttggccgtgatcgccaacgtgtgcccagtcgtgcgcgtcagtctgcagggattgcacaacgaggccacgctctggcagtcggcggcggcgctcgcgcacgggccagcctctcccatcgcagtgccgacggcaatatcgatcattgtggcgccactcatccagatcggtctgctggcctgggtactgacttatgctcgcatgggacgtcgcgcaccaggtttcgcgcaggcaatgaggatactgatcatgctacgcccctggagcatgatcgaggtcggtctactcggcattttggtggcagtcatcaaactgtctagtttcctccaggtggctcctggaccgggtatctgggctacagccgggttgatgctgctaatcacgttgatcgccaaccgcgacgtccattggctatgggacctgaccgaacacaaccagccgcgcgaggcggcacttgcatga

SEQ ID NO: 358278 - DNA, 624 bp, Pseudomonas aeruginosa
atgacccccccgcctcgcgcaggccagctgggcctcctcggctgccatacctgcgggctggtctgcaaggacacacccattgatgccaggcgtgcgcgttgtccgcgctgcggggtagcactgcatcgcagacaccccgacagcattgcacgcgcctgggctttgttgatcgctggtgtgattttctacatcccggccaacgtgttgccggttatgtataccagattactcggcagcggtaccgacagcaccatcatggacggtgtcatcgaattttggaaatcaggatcttacggcatagccgtggttattttcatcgctagcgtggcagtaccttgcaccaagtttcttatcctcggactgctactgacgacttcacaagcacacagcaactgggccaggcgcgagcgcgccaagctctatcgcatcgtggagttgattggttattggtcgatgctcgacgtattggtggtggctgtagtggccgcactggtccagttccagggcctaagtgatatcgaaccacgctttggcattctcttctttggcgtggtggtgatcctgaccatgctttcggcgatgaacttcgatccccgcctgatatgggatggtgataaggaatga

SEQ ID NO: 358279 - DNA, 1662 bp, Pseudomonas aeruginosa
atgaacgacgtgcgcacacagacgcaagaaccacgctatcccactgtggaccaacgccgctggcgcatttcgctagtttggctggtgccagccttggccgcactgattggcctgtccatgctggcgcatgcttggctatcggcgggtcccgaaatcaccatcaccttccgcacggcggcgggactggaggctggcaaaacaccggtcaaatataaggacgtcactgtgggcgcggtcacggcaattacgctgagcgacgatggctcgcacatagtcgccagggtgtccttggccagcagcgcggtaagcttgacgcgcaaggacacgcggttctgggtcgtgcgcccgcgcattggcaccggtggggtatcaggcatcgatacactgctctctggcgcatacatcgcagttgatgctggatcggagcaggcgtccagcaaagtctttaccggccttgaaataccgcctacggtgattggtggaatgccagggaagtcatttatcctgcataccgaggatctgggatcgttggacgttgggtcgccggtttactaccggcgcattcaggtgggccgtgtggcttcatacaagcttgatgatgatggcaatcacgtcagcttgcaggtcttcgtcgacgaaccctatgacagcttcgtcactaccgacacccggttttggaacgccagtggggtagatgtctcgttgggtgccgacgggctcaagctcaaaacacaatccgtggccactattgtcgcgggtgggattgccttcgccgccctcccgagggcccaaaatcaggttgaaaaagcgcctgaatatgcgcagttcacactctctccagaccaagccagcgccatgacgccgccggatggtccggcgcagtacgtccagctacgcttcgatcagtcgttacgcggcttgtccatcggtgctcccgtgcaattctcgggggtagatctgggtaaggtcgtctccatagatctcgactacgatccaaatacgagtcgctttcccactactgttggcatcgtggtgtaccccgaacggctcggacgtctgctagataagttgccgggtacagataccgaacaacaagctgcacagttcctgcgtgatatggtcgaacatggtctccgagcacaagcgcgctcgggtaatctactgaccgggcagctctatgtttcgttggaatttgttccgaatgccccgaaaagaacgattgacgtatcggcacggccactgactgtccccacgatcagtggaagtttcgatcagttgcaagcgcaggtggccaatatcgtcgccaagatcgagaagatgccgctcgactcaattgggcgcaacctcgataccacactggcggaattggataagaccctgaagcaagtcaatgcccagacgttgccacaaaccactcgtaccttgctgcaggcccagcaaactttcggagctgcacaaggtgcactggctgaggatgcaccattgcagcaaaacctgggccagacgttacaggaggtacagcgggtgtcacgctcactgcgtgtgctgaccgacatgctcagcaggcatcctgaatccctgctgcgtggccgaccagccgatcagtcctcgccaccaacaggaactgacaggacaaccgcttcacaggaacaccctcgatga

SEQ ID NO: 358280 - DNA, 615 bp, Pseudomonas aeruginosa
atgaatcattaccgtcttcttgggcctgccgtgcttgctgtgcttctgaatgcttgcacctctgcgccgatccattactacacgcttctcacgccctctctaggaacaggaacggcggagccacctgctcctttcgtgattgacgtgctacctgttggcatcccgtcacagtatgaccagccgcaactagtggtgcgccagggcggcgcaggcgccgtcgtcctcgatggcgagcgttggactggctcattggatgacgaaattcgcagtgctttgtcgtcggcgctgacacatcagttggccactcaagatgctgcggggttgcccccgccctctgccaagcctgtaatgaggatcaagctccagcttcggcggctcgatgcctggcccggacagcgggttcagctcgatgccgactggagtttgagcttcgcgaatgagcagggaaaaccacgactaatttgccgtagccaattgggggagcctgcaccaggtagctatgctgaaatggttcaagcccaacaacgtatgatcgcagcccttgcgaaaagaattgcgaccaacgctcgtgcgtgggaacgttcacgccaaggactttgcacggatcggcagtag

SEQ ID NO: 358281 - DNA, 915 bp, Pseudomonas aeruginosa
atgaactcgaagtacgtcgtcgtgatgaccggagccacaagtggctttggccaatccactctgcaggatctggccgcttcccctgacacaagggtcatcataggcgctcgtggagaaaatcgcgccgtgccgaaaggcgttgatgtcctgccgcttgatcttgcctctctggccagcgtccgcgactttgccggcgccgtgatacggcagcttggggatgaacgtatcgacatccttgtcctcaatgcaggcctgcatggcacacccgccgatcagcgtagcgccgagggttatggcctcacgttcgccgtgaatcaccttgctcactatctgctggcgcgcctgctgctgccgcatatcgctgagcagggtcgagtagtgatcacgtcgagcaacatgcacaacccacccatcaaggcgatcggccccaagacgctcgaccttcaggagtgggcgcatccgtcaaaaggcggggcgggcgacggcatacgctcctacacggcctcgaaactgtgcaacctgatgacggcactgtccctggcccggcatgacacggtggtggcgcgccagatcgaggtcatcgccttcaacccgggcctaacgggtggcgctgccggccgcgaggcgtctgtgttgcagaaggcgctccttggcatcgtgatgcgcacgatcttccctctggtcggtctcttccgccccgagttcgtgatgaatgcgcccgagcactcgggtcgaatgctgtccgatgtggcgctcggaacgctttcccttccggagggacgcatctacatctccctggtcaagggaaatcccacttttcccgacccctcggagttggcccgcaaccgtgaggcccaggagcgcttgtggcgcgagagtgccctaatggtgggcttggaggagtcgtctccatga

SEQ ID NO: 358282 - DNA, 1023 bp, Pseudomonas aeruginosa
atggcgattggggcaatgctctggagtggctcggcgctggctgaggagcgctgcgaccgcacaggcattgcggccgaatccacggtgaatctgcgaatcgacaacgacatgttcggcggcctcgggcaggaccaggggtactccaatggcttcctgctcacgctggtttcgccgaatctaatccaccgtgcggatgacccgtgcctgcccgatatcgccagacggttgaaccacgcgttctccggcttgcagcctggcgggttcgatgagttgaacatgactattgggctcggtcagacgatgtacacgcccaccgaccgcgagccgcacgaactgattgcagacgaccggccttacgccggcgcattgatgttcagcgtgggctacaacgctcgaaaaggcgacgacctgcggacttcgcaactgcggttgggcatcgtggggcctgctgccaaagccggagaagttcaggactggtggcacggcgtcattggcgtggacaggttcaatggctgggacaaccaactgcacaacgaacccgtggtccagttcattcacgagcggcgcaagcgcttcgcgttgcagcagcctgctggtccatggcggtgggatgcgatagcccattggggcggcagtctgggcaacttcgccacctacgccaataccgggattgagtttcggttcggctacttgctgccggacgacttcggtacggcgccattgcggccggcgggtgaaaacacatcgccgatccgcacgagcccgacacagggctggcacggccacttcttcgtcgctgccgatgcgcgttgggtcctgcgcgacatcacgcttgacggaaataccttccgctccagccacagcgtggacaagcgcccactggttgcagacatcggcttcggtttcgcatttacccatggccactggcgtttcgccttcgcgcgctaccaccggacccgcgagttcgatggacagcgcgagcgaccggcctttgggagcttcaccattggcaggcggttctga

SEQ ID NO: 358283 - DNA, 843 bp, Pseudomonas aeruginosa
atgtccgaccagcctacaaatctgccatcccggaaccttgccgacagcgagccaaacgtcagccgtgcacggcgcttctaccgctctcgctggctgctctggcgacaacatttggcgttctgggtcggtgcactgctggtaggcctggtggcgctggccttcgcctggctgacggaccagtccttcgccctgttcaagcgcatgctcggcgtcgccccctggctgccgctgctggtcacccccgcgggtttcgccctgctggcctgggtcacccagcgctggttcgtcgaggccaagggcagcggcattccccaggtgatcgccgcgctggagtcgccttcgcggcgcttccccgcccgggtgctggcgctgccggtggccgccgtgcgcatgtttttcaccctgggcgcgctgctggtgggcggctcggtgggccgcgaagggcccacggtgcacgtcggcgccgcggtcatctacgccttcggccggcgcctggggctgcacggccggcgcaccatcgccgggctgatcctcgccggcggcgcggccggcatcgccgcggccttcaacacgccgctggccggcatcgtgttcgccatcgaggagctcagccgaaccttcgagcagcgcttcagcggcctggtgctgaccgcggtgctgatcggcggggggaggccaaggcactgcgcacgctttggcgagcactatggcggctggtgcgcgcgcctgaacctggacaaccggcaggtctatatccgtgcgcgcattcccgatgcagcacggcaggacattgacacgatcggcggcgaagtgctctgggcgcttgccgcatgtagcgagtga

SEQ ID NO: 358284 - DNA, 663 bp, Pseudomonas aeruginosa
gtgccgagaaaaaagacgcccatcgaagtccgcacggaggaagaggcagatccgcgcgagccgctgacacgcgagcgtatcgagctcgaatcgctgcagctgatcgagcgggatggactcgacgccttcagtacccgtcgcctgggtgccgccctgggctgcgaagccatgagcatctaccattactttcccagcaaggcccacatcctcgatgcgctggtcgatcgcgtgctctgcgcgatccccttgccggaccggcaaggcacgccagccaagcgcatccgagaaatggcgcagcactggcggcaaatggcccggcgccatgcgcgcctctattcctggctcgccctgcatcgctggaactcgcgtgaaggggtcgggtttcttgccgagatactcgattgcttcctggcggcagggctcagcgacgaagaagcggcacggggcttccgcgtgctgggctactacctgctcggcgctaccctggatgagatcgacggctatgccgaaggaacctcatccatgcagccattgagtgacgaggaattgcagcgggatttcccggcggtggcacgcgctggggcctacttctcgcccgagcatttcgatcagacgttcgagctgggcctgaaagtcgtcctggagggattgaaacttgaatga

SEQ ID NO: 358285 - DNA, 165 bp, Pseudomonas aeruginosa
atgttccagctaccggtgacctccactggtgcggccctgagcagcttcgcgctgatcctgctgtccctgaacgtctcgcggctgcgcatgcgccatcgcatcagcgtggggacgctggccacaagcctctgcaggctgcggtacgcacccaccgcaatgccctga

SEQ ID NO: 358286 - DNA, 429 bp, Pseudomonas aeruginosa
atgctgccgaaactgctcgtgactcttggaatcatcttctacgcggtggtcgttcccgtgctggagatcaacgactcccacgtcttcaacccggcctgggagccgcatgcgcgattgcatgaggtttggcaactgctcaccaataccacgctgggggcgttcagcctgtggctggtctgggtccgccacgacctgcggctgccgagttggctcacggtgttcgttactggcggctttttgctgagttacgggttacgcgcaagctacggcggttcgatggtgctcagcgacggtacggagaaaatgatcctgggcgtcaatctgggcttgttcgcctacacgctcgccatcttcatggctgctgtcgcggtgataatggacagtcgcagccggccggcgagagaggcggcccgccagggggcaagctga

SEQ ID NO: 358287 - DNA, 864 bp, Pseudomonas aeruginosa
gtgcctgatataccgactgcctacgccacacgcttcgacgccgtgctcgcctacatcgatggtcacctggaaggtgacctttcgctgaaggccttaagcgaagtggcgcatttctcgacgttccacttccacaggcaattcagcgcctacgtgggcgtgccggtcgcacgctatgtgcaactgatgcgcttgcggcgtgcggcgcatcgcctggcgtccgtcgcggaatattcggtgctgcacgctgcactcgacgccggcttcgacagccccgaggcattcggccgggtctttcgacgggacttcggcatgacgcccagtgcgttccggcagcagccgaactggcagacctggcatgcggttttcgccattccccatttttccaggagcatcaccatgcaggtacgtatcgtcgatttcgccgaggtccgggtcgccgccctcgaacacagcgggcatcccgcacagctcgacgagagcgtgcgccagttcatccagtggcgcatgggcagcgggcagtcgccagtcgacgtgagccggaccttcggcattccctacggcaaccccgacacaacaccaccggaagcgtttcgcttcgatatctgtggcgagatcggcgaagccgtggcgccgaacgattacggtgtccgtgaactggtcattcccggcggtcgctgtgtggtcgttcgacacgtcggctcgcccgatcacatcggcgagagcatctatccgatctatcgcgactggctgcctggcagcaacgaagaactccgtgaccacccgctgttcttccactacctgagcgtctttcccgagacgccgctggaggagaggcagacagatatctatatcccgctgcagtag

SEQ ID NO: 358288 - DNA, 2442 bp, Pseudomonas aeruginosa
atgaatccccctctaggcctccgagcactgacccttgccgtaacaggcttcctattgccatcaatcactggcgccggcctgtttttcagcagcgctgtccatgcagcggaagccagccgcacctatgacattccggcgggggcaatgagcgaggtactcaaccgcttcggtcatgaggccaacttgatgctctcgtacccggccgagcaggttgccggtctgcgcagccctgggctgcgtggcaactacagtgtcgacgccggtctcgccatgctgctttcaggtagcggcttgcaggcggtgcgattatccaacggcagctacacactgcagtctgccggtcaggacggactcaccctgccggcctcgacgatcagcggcagcgccgagactgtcagcggtcccaccagaggcatcgttgccacccgatccgcggtaggtaccaaaaccaacaccgccatcaacgaagtaccacagtcgatctcggtcatcacccgcgacgagatggacaagcgtggcgtgaaggacttcaacgccgccgtggcctatacccccggcattcgtgccgttgactacgcaggaggccaaggcgctcctgacatctatatgcgcggctttcgctcgttcaacctgttcggcatctacaaggacggcctgcgcagcggtttcaaccagtacgataccgacttcgagacttatggcctggagcgcctcgacgtgatcaagggcccggcctcggtactctatggccagatggccccaggcggcatggtcaatctgaccagcaagcgtcccaccgacgagcccatccgcgaaatccaggtccagggcggcagccatgatcacaagcaaggcgccatcgatatcggcgaccggctcgacgatgaaggcaggctcacctaccgcctggtggcgctcaagcgcgacagcggcacccaggtagatcattcgccggacgaccgcacctacgtcgccccggcgcttacctggaagcctgacgacgacacccgcttcaccgtccttgccagctacctgaaaacccgcaagggcggcgccgagcagagctttccggtaaacggcacgctgacaggtaccgcgtatggccatgtaccctcgagtacctatttgggcgacccagacgtgagtaagtacgaggtggagaacacatcgctgggctacatctttgaacgccagttgagcgacgactggacgttcacccagaacgcccgctatacgaaggccaatgtcgactacatcagcaacggcgcacgcaacggcggccagctcggcagcgacggccggacctacaccttcggctaccagaagcggccgaagaaaaccgataccttcctgctcgacaacaacctgggcggccaattcgagaccggggccatcggccatgatgtgctgttcggcctggactatggccattattcggggcgggaatcacgccgtggtgtcacctccaaccagaccgtcgacatcttcgaccccatctacaacgccagcccgacctggagcagcgcgctgcagaccgatggcaaaagcgtcgtctcgcagaaaggcgtgtatttccaggacatccttagcctcgacaactggcgcctgacgctgggcgggcgccaggactgggtagagggtcgcgactacagctacctgtacgatacccgcagtgtgcagaaggatgacaaattcaccggccgtgtgggcctggcctacctgtttgacaatggcatcactccctatgccagctacagcacctcgttccagccgacttcgggtgtggcccaggatggcagctacttcaaacccaccgaaggtgagcaatacgaactgggtatcaaatatgagccgcccggctacaacagcttcatcactttgtcggtttatgacctgactcagaagaacgtcacaactactgacccgaccaaccccagctaccaagtccagaccggcgagcagcgttcccgcggcgtcgagctcgagggcaaggccgagctgacccgcggcctggatctgattgcgtcctacgcctacaccgacgccgaggtgaccaaggccaacccggttggcaccggcgccaacgcatatagcctcgaaggcaacgtgccgatttcggtagccaaggacactgcctcgctgtggcttgactacaccgtgcagggtggtccgctggaaggcttgggcatgggcatcggccagcgttatgtcggctcctcatacaacgccaagaacacagtgaaggttccccactacaccctcaccgatgccagcgtgcggtacgacctgggccacctgacgcccgaccttaaaggcgtttcggtggatctgagtgcgagcaacctgttcgacaagcgctacttcaccccaggcttctacgagagcagcgtgttctatggcacgcggcgtacagtggtgggaagtttgacgtaccggtggtaa

SEQ ID NO: 358289 - DNA, 969 bp, Pseudomonas aeruginosa
atgaccgctccgataaatcccgccatcgccgagcaagccgttgaatggatgatggaactgcagagcccgccggtttcgcccgaaaagatcgagcaatggcaatgctggttgagccaggacgctcagcacgcgttggcctggcagcgtgttgaagcgttcggtgagcgactctccagccttggagcgcatgctcctgtcgtctatgccgccctgaccacaccacccgacagccaccttgaccgtcgtactgccctcaaagccttgatgctcgcagtatcagccggagctgtagcctggaacgggcgtgactctgcgctttggcagcacctgagtgccgactaccgaagtggcgtgggcgaacagagatcgcttgatctgctcgatggcagtcggctgctgctcaatacggatagcgccgttaacgttcacttcgatgccaccgtacggcagttgcaattgcttcatggagaaatgcaggtccaggtggccatagacagggcgttacggcctttccgggcgaatacagcccagggatcgatcgtaacagcgaacggcagcttcctcttgcgtcaggccccatccttcagccggcttgcggtaagggaaggtgtggtgacgctgtaccccgagcgtatggccggcctacgggtggaagccggacaacagatcctgttcaccggcgacgagatcggccccctgcgtgagctggaggccgtagatcatgcctggaccgatggcattctcatggccttcgacatgccacttgggcaattccttcaggagctcagtcgttatcgccatggtcatctgggatgtgcccgtagccttgcagacgtacgtgttgcgggtacctacccgctggacgataccgatcgcgttctacaaaccttgagcgtctccctcggagtcgaggtgcgccgtttcacccgatattgggtgtccctggaacctaaacgctccagcgcgtga

SEQ ID NO: 358290 - DNA, 456 bp, Pseudomonas aeruginosa
atggatcaccatggctggctacaaggatggctgcggcgaaagctaggctgttacgccagtgcggcggacttggctcaggacactttcgtacggctgctggccaaacaagagccgattcagatacgtgactcccgcgcagtcttggtaactgtcgcccggagcgtgttgagtaatcatttccgccgccagaagctcgaacgcgcctatctcgaagcgctcgcagcggtgccagaacaactgatgccgtcactggaggagcaagcgattctcctgcaaaccctgcaggaacttgatcgcctcatggatggactggaggttccggtgcgtcaggctttcctctggttccagcttgacggcatgcgccatagcgagatcgctgagcaactcggggtatcggtgacgacggtgaagcgctacatcattaaggcaggcctgcaatgttgcttcagtgaatga

SEQ ID NO: 358291 - DNA, 2442 bp, Pseudomonas aeruginosa
atgaagaccccgcataccccccagacaaactccctgcacactctgcacgctcgtgtgcggttgtcgatcctctgcgccgctttgctggcgccactgtcggcgctggcagatacggctgccacacagcgctatcagattgccgcgggtgaccttggccaggtgctgacgcgctttgccgccgagtcaggaatcgtgctgtcattcgattcgcgcttgacccgcggcctgaacagcacgggtctggagggcagcttcccggtggaaggggggctgcgcaccctgcttgccggaacgggccttcgcgccgtgcgggaaagtgatggccgctttaccctggtggcagcgtcgaccgaaggcgcgctggagatggatgccacttcggtgatcggccagggcctgggggaaaccaccgaacacaccggctcctacaccaccggtagcaccagtacgtccaccaagctgccgtcatccctgcgcgaaacaccgcagtcggtcacggtgatgactcgccagcgcatcgacgatcaggctctggccgatctcaatgacgttgtgcagaacactccgggcatggtcattcggcgcacggggccagagcgctccacttactacgcccgcggctttgcgctcgacaacatcatgtacgacggcctgcccaccagcctcgacagctcccagctctcccaggacctgctctccgcagacatggccatgtacgaccgggtcgaagtagtgcgcggtgccacgggtctgatgcagggggccggaaacccggccgcggccatcaacctgattcgcaagcgtccaacgccaaccttccaggcgagcatccagggcagcgccggcacctgggaccgctaccgcaccgacctcgacgtttccggaccgctgaccgacaacggtgccgtgcgcggccggctggtcaccgcctaccagacccagggcagcttccgcgattcattggataacgagcgcaacctgttctacgggatcgtggaagccgacctgaacgacagcaccaccctgacagtcagcgcttcgcgccaacaggacgactacaacggcaacggctggaccggcctgcccgtgggcttcgacggcagcgacctgaagctgtcgcgctccacctccctgagcaatgactgggagtactggaacaagaccagtacctccgcctatgccgccatcgaacacgccctggacaacggttggaaactcaacctgtcggctaccaggacctgggccgacctggacatgctgggcacctacatactcggacgcaccgccacccagacctatgaccaatacgtcggcgccggccattaccgggaaagccagaacagcttcgatgcttatgccagcggcccgttccgcctgatggaccgcgaccacgaactggtgttcggtgccagccatcgccgcgtggtgttcaatggtgatgtgccgccaaatgtgctgctgcacagcaatatcgatatctacaactgggccggcgacaccccgaaagttgccagccagaccaagtacggttggcagaacaccaacgccaagctcaacagcgtttacgccaccactcgcctgagcctggcagagccgttgaaactgattctgggcagccgcctggactggtacgaaaacgacaccagcgctccctacaagggcaccgagaccgaactcaaggtcaaccgtcacgtcaccaagtacgccggcctggtctatgacctggacgcgcatcactcggtgtacgtcagctacaccgacatcttcaagccgcagagctacttcgatacatcaggctcggtcatcgaacccattaccggcaagaactacgaattgggcatcaagggagagtatttcgagggtgcgctgaacgcctcggccgccatcttccagttggaccaggaaaaccgcgccaaggccatcaccgaccagagtatttgccccagctacccgaccacttcgtgctacgaggcggccggcgaggtgcgcagcaaaggcatcgaactggaactgcaagggcagctcacgcccaactggcagctgggcgccggttacaccttcaccgaggccaaatatcgcaaagatgcgaacaaggccaatgaagggcgtctgttcgatactgacataccgcggcatctgttcaagatgagcacgacctacaccttgcccggcgcattcgaccaatggcgcatcgggagctctctgtatcggcagaaccgcatctacaacaagggtgccacttacatggtggagcaggacgccttcacgctcgtggacttcatggtggggttcaagccgactgcccatatcgatgcacaactgaacctgaacaatgcgtttgacaagaagtactacaactcgctgagctcctctgtcacggtgccaagcaacgtgtatggggagccgcggaacatgatgctgtcggtgaagtacagtttctga

SEQ ID NO: 358292 - DNA, 960 bp, Pseudomonas aeruginosa
gtgagcggagccggcatcagcgctgcgcaactggactccatcgaacaggcagcagactggttcagcctgtttgccagcggcgacgccgtcgccgcagatcgtgaagcttggcagcgctggctggatgcatccccgcacaatggttgggcctggcagcaggctgagagattgcagcggcgcatgcaggggatgcccggtgatttcagtgggcgtgtcttcggcctggcgcgggaggatcggcgcagccgccgccgcactgtgctcaagggcatgctactggccattggaacgggcgcgctcgggctgggtggctaccgcgagttcgagcagggcgcgctgttcgccgattttcgcagtgccattggcgagcagctaccgatcaccctcgccgatggcagccagttgctgctcaacactcagagtgcgctggacgtcgcttatgccgacgggcaatgccggatgaccttgcgcagcggcgaagtgctggtgaacgccgcggccggcttgagcctcagcgtggcaacggagcagggcgacgtccgtgccgtgggcggacgtttttcggtgcgccagtttgaagttgtctcccaggtggaggtcttcagcggacaggtgcaggtgcagccgaagaacgcactgggcgttaccgcgctggatcaggggaagacctgtcgcttcgatgccgacgaggtgttcaccacccggaggctggattacgccgccgatgcctggtcccgtgggctgctgatcgccaacgaacagcgcctggccgactttctggccgacctgggtcgctaccgtcccggccttctgcgttgcgacccgcaggtggcggacttgcgcctgagcggcaccttcgagttggacgacaccgaacagactttccgtgccctggccagcgccttgccggtgcgcgtagagcgtcgcacacgcttctggatcacagtcgtgccggcctga

SEQ ID NO: 358293 - DNA, 531 bp, Pseudomonas aeruginosa
atgacgagccagggcccggttcggccgctggaggtcggcgacctctataaggaacagcaccgttggttgcgtggctggttgcgcagccgtgtggattgcagtcaactggcggctgacctggtgcaggacgtcttcgtccgcctgctcggcagtactgaccggcaggggcgcatcgaagcggtgcgtgagccacgcagctttctggcgacggttgcgcgccgcctgatgatcgatcactaccgtcgtcagcgcttggagcgcgcgtggctacaggcgctggcagaggtgccggaagctttggacatatctgccgaggatcggctgatcctgatggaaaccctggtccagctcgacgccatgctcgccgcgcttggtgacaaggtgcgccaggcctttctgttgtcgcagctcgacggcatgacctaccgcagcattgctcagacccttggggtgtcgctcgtcacggtgaaccgctacatcgcgaaggcctcgcgtcattgcatgctctacagcctggagcacggcgtgtga

SEQ ID NO: 358294 - DNA, 924 bp, Pseudomonas aeruginosa
atggcgtacttcacaggaacagcgaacaacccggcagacctgctgggcaagctccgcgctcacgctgaaacccttggatgggtgaccgaccgagccagcgcaaccgaatggtactgtcacaacgctgagggtttctggtcatttagcgccgctgccgcccaatggttcatcgtcggaaacaccgggtttgacaatgccttggcttggaatacgcagccaggaaacgcagtacaacacacgccgtactcgatgaactatccggttgacgcacagctgagcggtgggccgttcacgcgctaccacctgtttgccacggcggactatctgcatctgcacgtcgaaatcgctgcggggcagttccggccggtgatgattggcaccatcaacaagcggggcgtcacctacagcggtgggcagtatgtctgcggcgcgttcgtctacggtaacaatcagaagctgtcgaatgactggtcgtgttacccgttcgatggctaccacatccgctactctggcggctggaatgtgttgcggctcgatggccttgatggtggtccttcgccggagtggttgccgttcgactacgggacaaacgtacctcgccgtgtgatcggcctcggtcgggggcactacagatcgcagttccatcccgataccgggctggtagatgcaagcgcaaatgagctgaacagctcgacggtagtcgtgccgtgcgcaatctatgccgtcggcgcgcaacagcgttcccgatacatcggcgaggtgagggactttggtctgtgccgcatggacttccttgcgccgggtgacacgatcaccgtcggcgccgacacctggcgcgttttcccgctgttgcagagaggtgccgagggtgactggagcaataccagcgcactggtcggctacgcattccgggtgttcgagtaa

SEQ ID NO: 358295 - DNA, 447 bp, Pseudomonas aeruginosa
gtgaccgtcgatacctacgttttgtcggagggcgacctgggcaggatcgtcatgaagggcgacagcatcatgaccctgcgggaggtggtcgtcgagctgaaccgccaagcacgtgcagcgactgcggccgcgaccgaactggaagcatggcgggagcttcgtaaggccgtggcagacattgagggatgcggggacgactggccgtcgcatggcaacacccccctcgccatcgctgccggctatgcgctgctgaagcgtgacctcagcagcaccatgaccatgctcgccgaagtcgaaacgatggtccgcatgatcgaggaacgcgaatgggcagaccacgtcggccagagtgatatcggtcagcgtctggaagcggccatcaccaggctagtcaatgaagcccggccaccgcacagccaggaggtgccgccatgcgccgcgcactga

SEQ ID NO: 358296 - DNA, 633 bp, Pseudomonas aeruginosa
atgctccagcagactgatgattggttcgcccagcgactcggaaaagtcacggcgagcaaagtgaaggacataatggcaaagggacgcgggggcgccccttctgctacccgtcagaactacatgatgcagctgctgtgcgagcgtctgacaggcaagcgagaggaaggctacacgaatgcggccatgcagcgtggaaacgaccttgagcctatagcacgcgccgcctacgagatgtatgaggattgcgaggttgttgaggtaggacttatcttgcatcccagcatcgacggttttggagcaagtcctgacggagtgatcttgcttgacaacggtcgccgtggcctagagatcaaatgcccgaatacggctcagcatatcgcggttatccagtcagggaagcacgacacccaatacgagtggcagatgctcgcacagatggcctgcgctgatctggagtcggtagatttcgtttccttcgatgatcgcctgccggaagaactgcaatacgtctgcttccgctatcaccgcgacgagacacgcatccgcgagatggaggctgaggttatggcgttcctggaagagttggcagagcttgaacatcagatgcgagagcgcatgaggaaagcagcatga

SEQ ID NO: 358297 - DNA, 558 bp, Pseudomonas aeruginosa
atgagcattgactggaccaaggcaccagagggtgctacgcattgggagccaacaggacctcatttccatgaaggatggatgaagaaagaagggaataaatggttctattggggcaaaggaagtgaagcatggttccacaagcctcgatattgcaatgtatccgcagagcgtgaggcgacattcgaggctagaccgcaagatacctgggacggccagggactgccaccggttggcatcgagatcgaggccaacttcccggtgaccgatgtcacgggcacgcactaccactggcgtcgcgtgatcgtggccgtcgccgggattcccggtgccgagcgcgaatgcctggtctacgacgccgagaacacgaagcccgcctgggtcgacgagttccgcccgctcagcacccccgagcagatcgccgccgaggagcgggagaaggccatcagcgagatgctcgatctctacatctacaacggcgcctactggccgatgacgagtaaacagttctgcgaaatcctgtttgacgccggctaccgccgccaggagtcatccacatga

SEQ ID NO: 358298 - DNA, 492 bp, Pseudomonas aeruginosa
atgagcaacgccataaccgattctattcactggattgaccttcccgaaatcggccagcccctggctgatggaatcttctttgcccgacaatggctcaatggcaaggagtacgcctacatcgatcttggcaagagcgcagagttcactggcgaatggggcgaatacggccaggacgtgggcggcgccgtcagctaccgagacggagcttcgaatacggtcgccatggctgaagctggcagcccgattgccaagcaggctttggagatcggagccggcgtattcattccctctgctctggagctggctcttctgttatccgccaaacaagcaggcgagctgcccggtttttcggatcactggtactggtcgagttcgcagtactccgccgacagcgccttcggcacgtacttcttcgacggcgacacgtacagcatcgacaaggataacgccctccgtgtccgccccgtccgcaagattctcatccttcagtag

SEQ ID NO: 358299 - DNA, 333 bp, Pseudomonas aeruginosa
atgaccaactatctcggcgtcgataccgacgaagcaaaactcagcagcctgagcgtcgctggcgctactcccttgaccaagcttcgggtcgctgccgtctcgttcacccctgccgcgaccgctgcgacttctgctgttgagcaaaccgtcaccgttgccggcgcggtagtaggggacgccgtatcggtcaccccgcccgggactactgccggcgtggcggtagcgagtgcgcgcgtcagtgcagcaaacaccgttgcagtgatgttcgtaaaccccacggctggctctctgaccgcgccggctggcagttacgtgttcctgctcgcacgctaa

SEQ ID NO: 358300 - DNA, 405 bp, Pseudomonas aeruginosa
atgagtgaggtatgcgcaaagcacgtcaagacgcctgctttcatctacggcgcttgcatcggatgtgaactcgaaggtctgagagccgaggcacaggcgctcagggaggaagtcgcgaaacttcgcgccagggtggttgtgccagatggttatgctttggtgccgattgagccgactgttgccatgcgcatgccatggaaaactatgcgcggtcattcctggtattccaagtacaaggcgatgttagaagccgctccgcgcctcaacggcctgacggtcagcgaggggctgctgcggaggatcgcggcgccagtcaataaccaagatgaacttgatgctgtgcatgaggcgcggatcgaactccgcgccctgctcaaccaggacaaggagaacggcaatggctga

SEQ ID NO: 358301 - DNA, 489 bp, Pseudomonas aeruginosa
atggataacaacaataaccaacacgcaatcacacgcatcgaaaccttcggggtcgaacagattcccgaccacgaacgcaacgccacgccggtcgatctgttccgcatgatcttcggcggcgccaataccttcgccaccgccgtgctcggcagctttccggtgctcttcgggctgtccttccaggccgggctgtgggcgatcctgctgggcgtcacgctgggcgcgctgatcctcgccccgatgggcctgttcggcccgctcaacggcaccaacaacgcggtctcctccggcgcgcacttcggcgtgcacgggcgcatcgtcggctccttcctctcgctgctgaccgccatcgccttcttctcgctctcggtgtggagttccggcgatgccctggtcggcggcgcccggcgcctggtcggcctggaagagagcgaactgaacctgggcctggcctacggcctgttcgccgtgctggtgctgaccgtatga

SEQ ID NO: 358302 - DNA, 735 bp, Pseudomonas aeruginosa
ttggttgactccctgtatagagaaatcatcactgccggtactcacaaggcgagcagcattaaagtcgctgaggctgccaaggtgatcgaaaatacgcagcgagatctcaatattgctctgatcaacgaactcgccatcattttcaatcgaatgggtatcgataccgaggcggtcctcaaggctgccggcacgaaatggaatttcatgccgttccgcccgggcctagtcggcggtcattgcatcggagtcgatccatattatctgactcataaagcccagagtattggctatcatccagagatcatcctggctggccgccgtttgaatgacggtatgggtgcctatgtcgtttcgcaactggtcaaggctatgctcaagcgtcgtatccacgtggacggtgctcgcgttctgcttatggggcttacattcaaggaaaattgtccagacctccgcaataccaaagtcgtcgatattgtccgtgagttggcggaatacaacatacaggttgatgtttttgatccttgggtgagcgccgaagatgccatgcatgagtatgggattactccagtcggtacgccatcccatggcgcttatgatggaattatccttgcggtcgcgcacagtgaattcaaaaatatgggcgcagaaaatatacgaaagttagggaaggctgagcatgttctctatgatctgaaatatctactcgatgaagataagtctgatctacgcctgtaa

SEQ ID NO: 358303 - DNA, 180 bp, Pseudomonas aeruginosa
atgaccacaaataagcgaataaaggggacagatttatttttcggtgtttatgatctggtcaagagctggagggaaacctatgcagctctggagcagttggccacttcgccagagttccggcagcaatttggcgataactacctgaaggggctggaggagcgcgccgcattcttgacctag

SEQ ID NO: 358304 - DNA, 702 bp, Pseudomonas aeruginosa; identical to SEQ ID NO: 356882

SEQ ID NO: 358305 - DNA, 237 bp, Pseudomonas aeruginosa; identical to SEQ ID NO: 332089

SEQ ID NO: 358306 - DNA, 849 bp, Pseudomonas aeruginosa
atgccggaatactggtcgaccttgcggccttcgtcgggagcgccaggccatgagcgaattcgattccctgatgcagggcatgagcctggtcctcagcgcccatcacctcggcctgatggtgatcggcgtgctgctcggcatcctggtcggcgtgctgccgggcctcggtgcgccgaacggggtggcgctgctgctgccgctgaccttcagcatgtcgccggtgtcggcgatcatcctgctttcctgcatgtactggggcgcgttgttcggcggctcgatcacctcgatcctgttcaacatccccggcgagccgtcgtcggtggccaccaccttcgacggctacccgatggcgcgcaacggccaggctggcgaagcgctgaccgccgccttcacctcggcgctcctcggggcgctggtcggcgtgctgctgctgaccttcctgtccacccatatcgctcgcttcgccctggcgttcagctcgcccgagttcttcgccgtctacctgctggcgttctgcaccttcatcggcatgagccgcaacccgccattgaagaccctggtggcgatgaccatcggtttcgccatggccgccgtgggcatggataccgtgtccggcgacctgcgcctgaccttcgaccagccctggctgctttccgggctgagtttcgaggtggcggtgatcggcctgttcggcatcggcgagatcctctgcacggtggaggaaggcctggtgtttcgcggcgagcgcgcacgcatcacgccgatggtgatcctgcgtacctgggccaggctgccgcgctactggctgacctggctgcgcagcgcgctggtggggtcatgccgagataa

SEQ ID NO: 358307 - DNA, 453 bp, Pseudomonas aeruginosa
atggacctgcagatcgacgacttccacaaggacgccgctggcggcctcctgcttctctaccaggcgtttccgcgcaagaccgcgctctacgtcgaagacctgatcggccgcgaggcgccggacgagttcggcctgccgagcaaacgtcaccaaagttgtctgggcgcgttactctggctcgccgaggaaggctacctgcgcttcgccaacaccattcattacgaggctctcgaccaggcggtgctcagcgaaaaggccttcctaagacttacccgtatcgtcccccgggccgcgacggcgctggccgaggcgccggccagcgtgcgccgcgaacaggccagcctggccaaccagttgcgccaggcgctggcgcagggcgacggcgaacgcctggccgggctgacccgcctgctgttcgagggcaacctgggcgcgcaaggcgacacagtttga

SEQ ID NO: 358308 - DNA, 246 bp, Pseudomonas aeruginosa
atgtatgtgcgtcacttctcatcgttcaatgatgactcacctaccaaccctggtgggaaatttaagtccgccctcgacaaggtatcgaaatacttcgatgagaatcccggggtattcaccgtaactcaaggacttgaggagctgctcagcttgcgtgaaagcccgttccccgggttggggcaggtcaagaagtactcaatgaagcatcacattgagactacctgcgtctttgttcgaggtgcatga

SEQ ID NO: 358309 - DNA, 993 bp, Pseudomonas aeruginosa; identical to SEQ ID NO: 247975

SEQ ID NO: 358310 - DNA, 153 bp, Pseudomonas aeruginosa
atggttggcgtagcgccgtttccggaccagggccgggagtccaggacttggctgctagagcaagacgggccggtcactgatgtggaaaccctgctggcgcggtgcgcctacttctctccgctggccgaggtcgtcaccgcggtggcggcttga

SEQ ID NO: 358311 - DNA, 231 bp, Pseudomonas aeruginosa
atgaaagacgagcccggacagatattgaccctcgatgaagtggctgcctacctcaaagtgggcaagcgcacggtctatcgcttggcagcagccaagaagattccggcctttaaggtgggcgggatatggcgtttctcccgtgcggacatcgacggctggatcagacagcagtcgtcgggcgatcagcagcaaagcggggatgatctgttgaaaggggggcgccggtcatga

SEQ ID NO: 358312 - DNA, 3201 bp, Pseudomonas aeruginosa
atgaaactgatccacaacacgggcgcagaccgcgtcatcgacctaatgcgcccccacctgaagcatggcaaccagctcggctgcgtgaccccgtcgttctccctcttcgcgtttgcagagctgcgagatgcgctcacggcgctggaacgcgtccagctcgttctgcctcccggcgacgctgagttggggttcttgggtgtcgaaggcgatcgtgccgcacgcaaccgcctacaggtccggtggctagccaaccagtgtgcgaaatggatcggcgacaaggtcgacttgcggcgagccgcgggcccggtgccgcaaggggcggcagtcatacgaaatggtcaagagcagccggagcaggtggttctcggttcctttgctttcagcaccgatgggctcggcttgactccgggaaacccattgagcttgatccaggcttccgagtcggccgatgaggccgcgcagcttgccagatggttcgatcatcaatggtccgctctgcggagtcactctgcggacgccagcagtgggcgtgaagttttactcgaagctctccgcacgattggcgagcaccgcgaccccttctccttgtatgcactcatcctgcatcacctgtttcgcgacagcggcgacgaaatggacgaggagcgcatcgtcaagtccgccacgggtatccgcaatacggtggtgtggaagaagctcttcaaattccagcgtgatggtgtggtcggcgccatcgacaagctcaaccgcttcggcggctgcatcatcgccgacagcgtgggcctcggcaaaaccttcgaggccctggcgatcatcaagtaccacgagctgcgcaacgatcgcgtgctggtactggcacccaagcgcttgcgcgacaactggacgctctacaaggccaacgacaagcgcaacgtcctggcggccgaccgcttcaactacgatgtcctgaaccacaccgatctctcgcgcgacggcggcacgtctggcgacatcgatctgtcgcacgtgaactggggcaactacgacctggtggtgatcgatgagtcccacaacttccgcaataaggccacgcacaagggcaaggagtcccgctacgaccgtctgatgcgacggatcatcaaggaaggtgtcaagacgcgcgtcctgatgctgtcggccacgcccgtcaataaccgcctcgccgacctgcgcaaccagatcgccttcgtcacggagggcgacgacaccgccttgctggaacacggcatcgccagcatcgaggcgaccacccgcaaggcgcagacccagttcaaccgatggttgaacctcgacgagtccgaaaagacacccgcgaggctggtcgagatgctgggcttcgactacttcaccctactggatcacctcaccatcgctcgctcgcgcaagcacatcgagaagtactacggcaccagcgagacaggccgcttcccggatcgtctgccaccgatcaacatcaaggccgatgtggaccgtgccggcgagttccgcagcatccgggacatcaacctcgaaattcggcggctcaatctggccagctatgcgccattgcgctacgtcctgccccacaaacaagccgcctacgacgcaaagtacagcactcagatccgcgggggcgaaagcttcttccgccaggtggaccgcgaagagagcctgatccacctgctgcgagtcaacgtgctcaagcgcatggaaagcgcggtgtcctcgttcaccctgaccgtcgagcgccagcttcgcgacgtggagaccacgctcgcacgcatcgaggcttctgcttccgacatcgaggaaatcgacatcgccgacgtcgacatcgatgaccccgccttcgagaccttgctggtcgggcgcaaggtcaaggtactgctcagcgacgtcgacctcatccgttggaaacaagacctgatcgaagaccgtaaccgtctggccaccctgctcgccgcagccaagcaggtcgatgctgctcgggacgccaagctggccgccttgcgcaacatgatcgaggacaaatgccgcaacccgatcaatgccggcaaccgcaagttcatcgtcttcaccgccttcgcggacaccgccgaatacctctacgcgcaactggcgccgtgggcgaaggccacgctcggcgtcgagtcggcgctcgttaccggtgcgggccgaaatcagagcacgctgccacatctgcgcaaggacctggcgtccatccttacggcgttctcgccgcgctccaaggagcggccggcggatttggccgacgagggcgagctggacctgctcttcgccaccgactgcatttccgaaggccagaacctgcaggactgcgactggctgatcaactacgacatccactggaacccggtgcgcatcatccagcgcttcggccggatcgaccgcatcggctcccccaacgaacgcatccagctggttaacttctggcccaacatggagctggaggaatacatcaatctggaacagcgcgtcagcggccgcatggtgctgctcgacgtctccgccaccggtgaggaaaacctcatcgagcaacagtccggcaacccgatgaacgatctggagtaccggcgcaagcagctgctcaagctgcaggacacggtaatcgacctggaagacctgtccaccggcgtatcaattaccgacctgacgctcaccgacttccgcatcgatctggcccagcacctcaaggcgcatcccggcaagctggataaccagccattgggggcctacgcggtcaccaccagtatcgacgccgacattccgcctggtgtgatcttctgcctgcgcgccgagggcccggcggcacacaaagccaaggaatcggactaccccttggcaccccattacctcgtccacgtcggcgacgacggcgccgtgttgctgccctacacgcaggccaaacgcattctcgatcggctcaagcgcctggcgctgggtcgcgacctgcccgacgctggcgcctgcgcccgcttcgacaaggccaccaagcacggcgaagacatgcgccatgcgcaaaagctgctcgcagcaagcgtagcgtcggttgtcggcaagaacgaggaacgcgcagtggccagtctgttttcgccgggcggcacgcatgccatcaaaggcgagttcgccggaagcaatgactttgaagtgttggcattcatggtagtgctgtcccaagagtga

SEQ ID NO: 358313 - DNA, 987 bp, Pseudomonas aeruginosa
atggctagcggaaaattgctcaggcaactgatcaaatccggcgtacaaggggatctcgccagattccgttccgcctccgaagcggtcatcaaggaagagcgcgagaagaaccatcatctgctcgccaacgatctcgagcacctgctttacggcgatcaggccaaacccggtcctggctcccgcaggctgcatgccgtgaccaatctgcccacgaacaaggacaatggtctggcgctgctcgaagaacgtgccgtgattcgagaggaaaaggacatcattctctctgacgccacgaagtcggcgctcgatgagattctgatggagcacaaccgtgccgatgtgttgcgatcctttgggatgcatcccgcgcagaagctcttgttttgtgggccgccgggttgcggcaagacgctggctgcggaggtcatcgcgcacagcttgtcgatgcccctggttctggttcggctcgattcgcttatttcgtccttcctgggtgagacggcggccaatctgcgcaaagtgttcgactacgtggcgagtcagccggtggtggcgctcttcgacgaattcgatgcgctgaccaaggatcgtggcgacagcgccgatcacggcgagctgaagcgctccgtgaacgcagtcctgcagatgatggacggctcccgtggggagagcatcctcatcgccacgaccaactacgagtccctgctggacaaggcggtgtggcggcgtttcgacgagatcttgcgtttcgagctgcccagtctggagcagatcaaacgcctgctgtcattgaagctgtccggcattcgacgaaatttcgaggcggacgacggccaagttgcctcgcagttcaaaggaatgtcccatgccgacatcgagcgcgtactgcgtcgggcggtgaaggaaatgatcctgtccggacgggagttcctcgagaaggcccacatcgataccgcgctggctcgcgaataccgccataagggctga

SEQ ID NO: 358314 - DNA, 2223 bp, Pseudomonas aeruginosa
atgttggcacagaagctcgtcgtggcgcgagggcgaatcgacgccgaagatctaggtggtttcgacgaccgaaagctccttaagattcagctgcgtgctggcgacaagagcgttcctgcattcgacgctattcccggtgttgagatcgtcagccaggaagacgagtcgatcgtgctggccttcgccacagaaggaggtctcgccgagttcgagagtcgtctcagtacgctcgcccgcgacggcgtggtgacgcgcaaggagcttctgttcgtcatcgaggacttcgaccactggacgccccaggatcgtaccggcgcagcgctgcgcgagcaggggtttcccgccgaggaactcttcacgcttgatgtggaactgtggccccaggaacggcaggacagacgccaggcgcttatggaggcgttttcccgctggctgcaggaatacggcatagagcggctggatagcctcacgcagccttccctcctgatggtgcggatgcgctgtacgcgagagcaggcggatcgggtcctgcggcatcgcgacgtgcgcacggtcgaccttcctccgcgactcggcattgccgttcagttgctgctcactgacgtcaaccagtttcccgctgtcttgcctccagatggcggcgctccgtccatcgccgtactcgattcgggactgacgcctggacaccccttgctggggccggcagtgggcgatgcacaaggctacctttctccccatcggaccccgcatgacgatcaaccctggcacggaacttttgtcgccggcttggcgctgtatggggacgtgggggctgcgatccgggacgggcgcttcgtcccgcagctccggctgttctccgggaaggtcttcaatgacgacggcaacgaccagaccgagttcgtcgagaaggcggtggaggaggctgtgcgcgagttgcacggccagtacgggtgtcgtgtcttcaatctgagctatggcgatctcaacaaggtctatgacgggcgccacgttcgcggcctggcctacaccctggatcgcctgacgcgagagctcggtgtcctgttcgtggtgcccaccggcaacctgcaccttcccgagctgccagacgacgcgcgagaacgctatcccgactatctgcttgccgactccgcgcgcttgctcgatccggccactgccctgaacgcgctcacggtaggcggtattgcgcagaacgaagcgacgagggacgcgcagcggcatccgaacgcccttgaggatcaaccattggcgcgaactgaccagccgtttccgctcacgcgatgcggcttatcgatcaatggcgcgatcaaacccgatatcgtcgagcatgccggcaatgtcgcgctgatgcgggcggttgcacgtccgcggcatgcagggttgggcgtggtctcgctcaacggcggctttgccggcggaccagggttcagcgaagacattgggacgagctatgctgccccggtcgtcgcgcataaggcggcgagggtcctggccgaactgccgaatgccaccccgaacttgttgcgtgcgttgatcggcgcgcatgccagctggccacaagcctgcgagaccttgctcaaccccgacggcaacggtgaagggcgcgacaagctgctgcgtctgatcggctatgggtgtgtcgaggatgctgccctctttcgttcgctggaccacaccgtcaccttgctgaccgaagagcgcatcggcaacgaccagcaccattttttcgagctgccgctgcctgacagcttctgggcgggcggccgccgtactagggaggtaacggttgccctggcgcacagtccagccgtccgtaccacgcggctggactaccgcatgagcaagctgtggttctccgtggttacagcgagtggcctggacgaggtgacacaggctttccgtcggaatcgtgagcaaggcatgggagagcgcagcaacggtcgctggctgtccaacgacacacgtaagaatggcacgctgcaggtctctcgctggagcttcaggcaggcgcttgcgaacggcaacaaggtcttcgtggtggtgactcgccaggacagcgcatggtcgaacgggtgcgatggcgaagaaccctatgcgctcgctgcggtgctcgccgaccgcgagcaggcgaatgcccagctctacgcccatgtccgcgccgtgcttgaagcccgcgtccaggcgcgtgctcgtgcaagggtgtga

SEQ ID NO: 358315 - DNA, 792 bp, Pseudomonas aeruginosa
atgccgctggacgtaccaggattcatcgcctcgctcggtctgcccgacggctgccgagtcgatcagcgcgtgccgaagaagctgttgctggagaacggagcccccacggccgccgacaagcgactgatcgccgataccgtcgaggagatccagtgggtcgcggcgctcaagccgaacaccatcggcgtgcccgactaccgcgacgagtcgcgcgaatacctggaggtcgcggtgcttgccgtaacgctgcgccgccagtccgaaggtggcaaggcgaagccgacgaatcccgcccgtctcgccgagctggtgcatcgcgcggtgccttatccggtgctgttgctattgcactccgaggagcgcctgacgctgtcattggcgcataagcgctgggcacagaacgaagcgggcaaagtggtgctggacggcggcatggtgtccatgtcgttgcccgaggacgcgccgtctcttgatgcgctgaacgcattcgttcaggccatcgccttgactcaccagcctcgatcctcgcttttcgccctgtatcaggggtggatggacagcgcgcaggcgctgttggcggcaaagctgactggaacgttcaagaagaccgacggccccgagcaggccgcagctcgccgccatgccctgcaggaatgcgcgcggctggaggccgaggcggcctgcttgcgcacgcaggcgggcaaagaaaaacaactggcgcgacaggttgaactgaacctcgcgctcaagcgcgtgctggcacaactggctgcagcacgccaacagctttga

SEQ ID NO: 358316 - DNA, 1692 bp, Pseudomonas aeruginosa
atgcagataattgacgccgcgagccacctggctcagtccgcggatctagtgtccggcaacattgaacagctcaaggccttgttcccggaactcattaccgaaggaccgaacggcgtttcggtgaacgtggacgtcctcaaggcgctggtcggcgaccggagcatcaccgataccgacgagaaatatggcctgaactggcatggcaagcgccgcgcgcggcaactggcgctcaccccctcgactggcaccctacgcccctgccccgaggagagcgtggattgggacagcacccaaaacctgatgatcgagggcgacaacctcgaggtgctcaagctcctgcaaaagagctatgccggcaaggtcaagctgatctacatcgacccgccgtacaacaccggcaaggatttcgtgtacccggataacttccaggacaacatcaaaaattatctggagctgactgggcaggtcgaaggcgggcagaagatcagcagcaataccgaggccagcgggcggtttcacaccgactggttgaacatgatatatccgcggttgaagctggcaaggaatctgctcagagatgacggcgcgctgtttattagcatcgatgacggcgagatcgacaatctgaagaaagcctgctgcgaaatatttggcgaggagactttcgtcggcatcctctcggtgttggtcaatccacgaggccgtcatctcgataagttcattgcgcagacacatgacaacgtcgccgtcttcgtaaaggaccctgatgtagctggaagcatcgtcggcatggcgaaagaaggagccatgctggaggaatatgacaaagaggacgagcgtggcaagtatcgcgaactggggctccgcaaccgaaaccaagcattcaacccagtcacgcgcccgaatttgttcttcccgctttatgtcgagccttcaacgggccgggtgtccctaggtcaagatcatcggtttacggaaaaagttctcccagtaaccgctgacggggtagagacatgctggacttgggggcgggaaaagatcgaagcagagaacgagcttctcaccgcaagtcggatgagtgatggcacttggcgagtgtttcgaaaggactatctgaacggtgagaatggtgaaacggcatcgaccttggccaagtccatatggttggacaaggagttcaacaatgactacggtcgcaagtcgatcaaagagttgcttggcgcgccggttatggactttccgaagtccccgttcttaattcagcgcattgtttcgattgcatctcgatcaagcgacatcgttatggatttctttgctggatcgggcaccactggtcactcagtcatggctcagaacgccattgacggggccaggcggcgatacatcttggttcagttgcccgagcccctgagtgcggaagtcaaagaacagaaggttgcagccgagttttgcgatgcgctgcaaaagccacggacgatcgcggaaataaccaaggagcgattgcgccgcgcgggaaataaagttaaggaagacgacccgcttttctcaggcgacaccggcttccgtgtattcaagctggccacgtcgaatatccaggcctggaaccccaacccctccgatctggaacagaccctgtttgcccaccaggaccatctggtggaaggccgtactgaatcggactgttgccgctga

SEQ ID NO: 358317 - DNA, 231 bp, Pseudomonas aeruginosa
atgttcaaaccaacccgaaccattcttgcgatgacgctgcttgcattggctggcaccgcagtagcagcgagccctgcggacaagaacgcagacaaggtagtgatgcttcctgcgtctgcaatgctggcgatcgagaagaacggcaaattcgccatcatcagcgataccggccgattcatcatccagggaacggtttatgacgtgtgggtgttgccgctgaccgaaaactga

SEQ ID NO: 358318 - DNA, 7395 bp, Pseudomonas aeruginosa
atgggtacgacaaagacccgagggccatcgttcctcaataaagtgagtggtgcgcttctgggcgctatcgctttggcaattgtgccaatcaatggtgcgtatgccgatcttgttaaatacggctatacgaacagtgcaggggttcaaaccaatacggagccaggcacagggtttatcaacccatccactggcatatcgttcatggtaagcggtggtattgaccgaaaactgcgcatagcggtgactgctaacggtgccgccacacctgtcttcgtaaaggaaagcaccaaggtgcttggggctagcgacgttatttcttacaacggtgagaactactatgccgaggagtttgtcagtccgaagctaccggatggacgctacaccgtaaaaacagaaattctgtccagcgctggggctgttgttcaaactgaaaacgttcccctcgttattgataccgctggcccaatagctgggacatttgccccgcgcccatatacatggggcgatcccgttctcactggcgaagtttggaagctcggccttgcagcaatcgatgctttgacatattcgagcttcgtcttggacggtttctctgacccgtcgggaattagcaaggttaccgctaaagtctatagggagtctggtgctctgtataaagagcataatgttctgttttctgaggaaagcaaaacagcctcgattcagtacaggacagacttcttccctgactcagacttggatgaggttttcgggcttgagtttgttgtcaccgacaaggctggcaactctacggtaaccaagcgtcagaaggtaatgtttgacaacattgccaacgcaccaactgagccgtttggtgtgtatgacccaagtgtatcaactactctcgcgccaggcctaaaggggtttgttccctatgtcgccggatcttatgtcaaaactaatccgatacggcttgcatggagaatcccaaagagcaactggcacacctaccgacaagggggtatacgcttcacaaacagttttggagagaaccagattgttggcgaggattcggcctatgtttaccttgtcgggtcgcttccatatcgagcagaagacgttaactacatcaggttctataactttggcgagtggggcacgcgaggaactatccattacgatttagtattgcatccgtctgcccctaaaacgcccgtaataagccgtatcgaatattactttagcgacaaaggctggatgagatattcgcccagggtagtcacgcctcaggagttacctgtcaccgtctcgaaagttcggtataccgtcgaggcgcgaccttttgaccaagtggctactcacatgggcacttgtactattcctgccgggcagacccaatgcgaaatcgcagtcaacgtcccgctgagcaaaggcacatctggatatcttcacgatcaaggcgtgctgagaagtgcagacggcacgttgagtgcaaccggccaatgggcggacgtctggtggaacgacctgtatctgccagtcctgtcttatacctataactcttcggagatgatactgactctcaaagtcagacaaccgcagcaaggcgcgtatcaagacgctcttcgtcacaatacggcatggcttgaaaacactagcggaacagcactgagcgttaccaaaaaactcacatcgtcatctggtgaatattttgaatacgagttcgatctgaaaaccctgcctgaaggctcccatgatctggttggtgttgctagcgaaaatctaggcgcaataacaaagctaccacttttcaagtttcagagcgatcggacaaagccagttgttacggtaagcaagggtgtgagtgattctattgatacactcgacaaaatcacctttacggtaactgacaataaagaccccgcaccaaagattacatcgattagcttgactggggggccggctaacgaatctattgctctttcgttccgcaagctcaatgctactacctatggccttgagtacccgatcctattcccgtccttaacggctggagagagttatacgctcagagtcaatgcgcaggactcacaacagaacaagggtgttggctcaaccacgttcctctacagccctaagatggctgggatcgttggtcatgtaaatggtctcgttaatatccctgcggtgccaaaagagttcaatcgtaacgatggctctgtggtgataaacagcgaacagctaaagcttgcggacggtacgccagtttctggtgtttatgatctgctggcaacgctcaggtctgacgcagcaacacccctaaagattggcggtgttctcgtcaatccgggggcaacagtaacgattagccaactcaacttcactagtaccggcggtaagatatcgctacctgttgttccggtaactcagggagctaccggaagtaatggtgtgatcatttctacctccgcgccgaatgctcctgtggtgtacgccgatatcaatacctggatgcccaaggtcacgcttggcatcaacaataaaaatcctgtacaggcaatgactgacaccacggtaaagttgtccgcttcggctagcagcatttgccctctaacgacatcttccgcggtggcaaggtctgccgatcccatcaagtcgcccatctgcttgcttgagtggacgagcattccccgaggccttcagcaagtagaggtttctggtgcaccgcacccggtcactcagctgacagggcgagtcctcgacgcaggccagcagaaggtcgcttattccctctatgtattcaacaagggtacggaaaaggtactgctgagcagcggtgaggaaatactgagcgtcaaagctgcgaccggctcaacaaccttcatccaatcgctgcatgagaaaagtgttactcgtgcgattgagactgcatccgtcaccatgacgcagcgctcgggcccaacgtgttcgatcactggtgatgacgcagcggcaaagagtgctggcatgagcggcggtgccttgaagtgcttgattgagttctcggtcatcccgaaagacctgagcatcaaagcgctcgatcctcttgagttgaccggcgttttcactcgttccgggaagtatccgatccgctggacggctagcgtctacgacaccaccgggaaaaagatcaccctcgaagagggacaatcgctcattcaggtaatagagccgcctgtaacaacgaaactgacggtcagcgtcaacgaaagctcatcggtggacgcaactccggtagaggatttccctgcggcgtgggagaagaaaacctattcagttctgtcgagcccgtcccagggcgctgtagtcgcgacccctaccggcttcacctacaccccgaacactggatacgttggccccgatgagttcaggtaccgcgtgcaggacgtgtcagggatgagggctgaagcgaccgcggttgtgaatgtcgcgaagttcaattacgcccctacctggacgggagtaaccattcaggctcgcgaaggtcaagtgagtgaccaagttgatcctgaggtgcatgacatcaatctatgggacagccatacgttcaagatcctcacgaacccgacgcacgggactgtccgtgtgttctatggccgtatggagtacacccctaatccgggtttctatggggaagattcgttcactttcagcgccacggaccaggaagggctcagcgtggagggagaggggaaggtcactgttactcagttcaattttgcaccaacaggtatcaccccctcgacagtgaagatgtatgcaggaatcggtggaacggccgatctgaaagtgatcgatccgaacaactggggatcgcacaccttgcaagtcgtcaaacagccagcacatggccacgtgacggtggagggaatgagcatcacctataagaccgatggccaggctgaaacctcagtacagattcgtgccattgaccaggatggcctctatgtcgatcaagatgttgtgctgaagcttttgccggcgtgggagatgttcaaagaccgcgaagttcagcctacctcagtggccccgagcatcccggccgtgaagcaccaaatgacaacccgcttgggtggctatgcgctccgaattcccgaccaggaagtgattcaggctctcggcggcgagatcatcgccatcgtcacgcctgattcgaaggttggggtgacactggagcatcgtgagctttctcaaggcaccggtatgcgtctggtacctacgaaaatgactgccgatctgctggaggcccgtttaggtggcctggatgttggggtcgatggccaggcgctggtctatctaagtcgcgccgatatggccggccctgtctattccgtgccggtaaccgtatgggctccggagggcgtactgacggctgatacatgggagattctgcaagcgtccggccgggctcaaatcagcttcagcccgagcaatggggcatgcagcatcttgaccagcgaaactgtcgcgaagccgaaaaatgcacttcaggatcgtgcttgctacgtcacttggacgaaaacgcccgatgaatggcgcaacgctagtagcttggccaacctgatgatggatgccggcgggagttcgttgggtaaccaggctatcgaggctaccgcgtatgtgtttgaccctagcggcgtgaagcacaaggttgcgagcttcgctcgtgacctgaagatccttccggttgcagatcagatccgctttggcctgaagcctgcaccggcagaggcctatcagaaggtgcagcaactttccttgttgctccgtcacaccgatggccctgtgtgtgatgcaacggcgaatgaaggcgttgcgaaaaagacggctcagcaatggtcgagccgcccatcgtgccttatccgttggatgcagatgccagaaggcatggcccagcagcgcaacaccgtcacgccactcgcggaaggaacaatgaccctgcttggagcgaacaacatctcctggaaggcatccatgtttacgccgagtggtcaggaaatcgatattggctacggggagcacaccgtaaacgtgatcgagccgccggcgatcgaaatcgatatgccggcaagcaacctggtgaaagaggggctgtattcagtctcacaactcggcggctatgttgggagcgcatcagttactgcaatcgcagcctccttggacgtggcgatcaacagggcagatgcagtgatcgaacggtctacgattccgagttacggtcgtgcccagcggtttacgcgctacatcgagggagccgaggctcccctgtggagcgtaacgccttactccgttgacgttggatacaccgcgttgccagagatgaggacgaccaaaaccgcgtcactcctggcggtgcctcacgacaaaattctccctgtcattctcaacgacgaaagaactgtcctggatacggtcagccttccaatccgcgtggccatcaaagacacccgttacatggaggatgcatatcggctgagcagcatgggcgactgggatattcgcctgctttcgacaaccgccggagtgaactatgagccgatgacaaattgggagcccatcgacgagaacggtgaagttgagtttgagatcgatctgcaatcgctgacgaacaaggcggttcgcattattgctgaagcgcgtgttcgctctcctgtgccggaatacgagctgattcgggagtcgggctcgccaatggtgctttccgttctcaacggcgaatctctcgatggttcaatccaggcattgcgggttatcggcccagctcctcttcgcagcagcttctacgccgtcaccaacgatcgctaccagtcaggagaccttggtggcgtgcgctgggaaatgagcaaggacggcggtgtgacgtgggaggacgttgaggccaatgcgaagctgccgcaacggctcagcatggtctttcagcggggtacatatcttctgagggcagagttgacgaaccgccatagcggcgcgaaatccatgacccctaccgttgaagttattgcctatgtcgtccccgttgcccgccttaaaggcccagcaaacgtgtttattggcgatagcggtacgttcacgctcactgacctcaaaggtaatgcgctcgatacgaccggaatggttgtggaatggtcggaggatcgcggtaaaacctgggccgcaggggaaggctcctaccgactgagccgcaactctgctgatcgtgtgtacctcacggccaggctgaaatactcagactcaccagaggataagcgcgtctacaaaaccctccgtgcaggcgttgcgtttagacctgtccggccgcctcgtgtccagatcatcgggccgcgccgtcctgaggtaggaaaggaagctacctgggtcgccaacttgatgatgccgtacccgaaaatggatatgacaatggatggtgagttcatcctgcctgacggcacagtcgtcgactccactgaggtgaagtacaccccaactcgggaggacatggagaaagaagagagctacatcagcgtccgatcttggatcaatgggtatgaggatcgaggcggtttgggcctaactcagcaccgtcttattttctggtcgtacgactggcctgagtggaagatcaacaccaaatactcagccaagtatgcgccggcagacttgaccatgacggctcgctctcttggcttgttccgagagttcgagggcttgaccatcgagtgggatatcccaccttacgccggcctcgaaatgatcaaggactccagccagaccagtcgcatcgttcgactgactgagccggggatctacacattcggtgctcatatcaccgactcgcggggcaactacagctatgccgaaacagagatggagtttttggagccaattccgtgggatgtgaaattgtcctggagtggggataacgacgcgaatcgtgccccgctgggcgttctgatccgaccatcaatcaccggcgggcatcccaaggaccagatactcagcaaaacgttcagtctcaacggggagacgctatcaagctcaggggactatgggcgagcgacccttgaagaggagggcgtgtatacggtgaaactggatgttgccagcgcaatggggcacacagcaacaggccaggttgatatctcggtggcaaggaataagcccccggtctgcaagctggagcttgtggtaggtcgaacctcctggctggcaaaagccgtttgtactgatgaagatggccgcatggccaaaaacctttggttcatcaatggtgagcagcaggctctcagctcaaacagcatctctgtgccaatgtggcgttatccagatggcgagccggtaattacgctggtaggtatcgataactccggcgcggaatcgcctccagtctccaacaagtaa

SEQ ID NO: 358319 - DNA, 1266 bp, Pseudomonas aeruginosa
atgcttgccatcggtgggacggttctggtcgtcggtactatcgttggcgtcgccatgaacgcggcgagccccgagcgcaaagcgcgcgcagcggcaaaaccacaggtagaggccatcctcaccgatgaagacccacgtgcgttgggcttggactccatcgccagccaattgcgacagctacaggcgcagcaaaaccgccttgagcgagtgatgggacagaaagaaaaggacgttcagctcaaaaatacgcaagaaaaagtgagcggtctggagcaagaactccagctgcttcagcaggagctggcgcgggttggacgcgaaaagaaaggcactggtgagggtagtgatacctcgtcgagtagttcgacagccacccaggcgagatcccctatcccccctcgtgaatcagcattcatcaacaaagcaacgagctcgccagcagatctgactgacgtttattcgaaccttccacctgagcaaccggaagaccccaaatcacgatcaagcgagaaaaaggaaacgcctaagatccgggtgataaagggcaaggaagacgaggggaagagcgacaagcctgaggagctttctgtgaccctgcccgctggatcgatcctgtctggcgttttggtcacaggtatggacgcgccaactggaaagcaggcacagcgcgaccccttcccgagcctgatccgcatcaagaacgaagcaatccttcctaaccgcttcagggctgactttcgcgaatgctttctgatcgccggcggctggggtgacctcagctcggaaagagcctatttgcgagcggagcgcctgtcgtgcgtacgcaatgatggttcggtgctggagtccagcctggaggcttacgcaacaggcgaggatgggaaggcaggcatccgcggccgtctagtcagcaagcagggccaaatcctcgcaagaagccttatggctggcttcatgcagggggtcgcaagcgcgttcaacgttcaaaaggtaccgacaatcaacgtcactcgcgctggcgataacggcgacaccgttgctcctgtttacgagcaggcattcgatagcaacgcacttcagtcggccggtttcagcggggctggcacggctcttgagcgaattgccgacttctatctcgaaatggctgaaagcatcttccctgttattgaaatcgatgcaatgcgcgatgttgactttatcgtcaacaaaggcatgaccgttaagttcaatgcagcaactctaaaagttaatgacgtaaacaattaa

SEQ ID NO: 358320 - DNA, 786 bp, Pseudomonas aeruginosa
atggcaacgaaaacaacaccctcgaaaacgatcccttttgctattgctatcacagcccttgccaccgctctggtagttggctcgtactaccacttcaccaccatgagccagctacaaggccaagtcaaaagcctcgagggtgaattgtctgttgcgaaagcacaggcagttgaccccgccgcgatccaagagattgtcgataacctcaaacagcttccagaagatgatatccccgcagctccggacaactggatctatggctcttcatctgctcggtacacgctcgtcgagatgacggatacggaatgcccttactgccgcgatcacttccccctgctgaaagcgcttatcgagtcttcggctggacaaatcaatgccgcgattctccatgtcccagcccttggagaggcctcccggcgacaagccctggccatcgagtgtgctggtgagcaaggtggctcagatgctgcctggaagtacacccagacggtgttcgataaaaccggtggcaacggcaagggagtttcggaatcgctcgtgtctcttgcgaccgatcttggcctggatgggaagcgctttgcagcctgcacagactcgaagcaggccatcgagcgagtaactggcgatctcgatcaagccattaagcttggcatccaacagaccccttcgactctgctcctggacaaccagacaggtatgtcgatggtcctccaaggtgctaacgctagtcatgaaggcatcctcaaagcgatagccagcctcagcaaagcagggggtggcaagtga

SEQ ID NO: 358321 - DNA, 609 bp, Pseudomonas aeruginosa
atgaagacctttgagtcatgctgcaaggcattccatgccgtagaagccgcaatcgtcgctcaccgcaattcggagttaggagtcgagatccaagaaaaaaccatgttggggaaactcagcatgttcatggatctggataactggcctgagaaccctgaccttcagggattgacggaagcagacgaaaagcagctgcgcgaatggggtgttgtttacagtaagcggctccaggacttccatgcgaaggccgaagagctgagaaaggagcggtataacgccgtctgtagggcgttacggctgctcggagaagaaattggcttgcagttcaacttcttcacatcaggcccactagatgagcgcatagcgaatgtgctgagccatgctgacttgctacgcaagacgctgcttgacgggctcggctatgtcgatgtgcttgatccagaaacaaactttgcgaagggcttctacagcaccacaaagttgaagaaaaccgagctgttccacgacctgaagctctgtgctgagttccgtaacaacggtgttctgcatgcgtatgaggtaatggccaggctggggttccatgagggtgtcgacaatgaaaatcgttga

SEQ ID NO: 358322 - DNA, 504 bp, Pseudomonas aeruginosa
atgcgaccgtcaaccgttgaggggctgaaggactcccttgctagctggggggagatgaaagaagagggtggtgcgttcgcggaatacgctgacgaaatgatcgagcaatttcaggtgaagctcattctcctggagtacctgctttgtcagttcactatccacggacttggcttgacgctgaagcatcggagccgggatgcctggggtgttcttatcccagacgcatctcagcaagggcgctttcggtggcaggcgtttcaacgtgatggcttcaccggccattgcacgcatgacacgccggagctgtgcattggcgacatgcttgacgatggatacgcacttctagatatgggggcgcttgatcgattgtcgggtaccgctgaatggcagcgcggcatggagatcgtcgcagtgattcaggcttgcaatgcaggtcagttgagcttcgaggatgccatgcgcaagcgagaagaaatctactcccgctacgcgaaggttgcgtaa

SEQ ID NO: 358323 - DNA, 180 bp, Pseudomonas aeruginosa
atgcggacttacatcctatcgatgaccatcctgcatacacagcagaaggctaccttccgttgtgaagcaaccaccttcggcgaagcgatcgacaaagcagagaaggcccatccgggtttttttgccgttctgacccactcccttccaggagagcagaacaatgcgaccgtcaaccgttga

SEQ ID NO: 358324 - DNA, 627 bp, Pseudomonas aeruginosa
atggcaactgcacaaccgaaagtcaccgtacagctcatgcatgacaccgacgcagaaaacccgcgcaagtgggacaaccttgcaatgatggtctgcgctcatcgccgctacattctgggtgatgaggatggagctactgaggcgcttgacctgatctacgagcacctgtccgaaaggcagctcaacgagatgggcttcgactcaactcatgtacctgacatccaacaagctctcaaaatgacaggcaaggcgatcattctgccgctgtatctctacgatcacagcggcatcacgatgagaaccaagccgttcgcctgcccctgggacagtgggcaagtgggctttattttcgtgagcaaggcgaaagtgtgtgctgagcagggctggaaacggctgaacaagtcacgcaccgaaaaagtaaccgccatgctggttggggaggtcgaggtttatgaccagtacctaaccggcgatgtgtggggcttcaaggtgattgaagacggcgaggagacagatagctgctggggtttctatggcagcgatccgctttctaacggcgtagtagagcatcttgcaggccaagcaaagcagctggttgaagctgggcaataccagcgaatcaactga

SEQ ID NO: 358325 - DNA, 909 bp, Pseudomonas aeruginosa
atgaacgatctaccacgcattgcatcgtttcgccagttggacgaacacctgaagaaaactggtgttccacgcgacgaacagatgattcgcaacaacatctacattgcaccgcttgactggtttgcaattgaagaaggcttcaatctgaggcccatcgatcctgaccatgccgaaggcttcgccaagtcttatgagcagggcctgtatgtgcctccagtcgtcgcagaactgaagatcatcgacggcaaccctcgcctcgtgatccgagaaggccaccatcgcctcactggcgctcgcatcgcagatgggcgcggtgcaaatcttccaggcctgatggtcaacgagttcaaaggaaatcagtccgacgctgttgtgatgatgatcaagaccagcgaaggcaaagagctgctgccgctggagcgaggagaaggctacaagcgcctggccgggcaaaactggattccagcccaaatcgccgatcgcatgaacaggagcgtcactcatgttgagcgactgctgcttctcgccaacgccgaggagaacgtcaaacagctcgttcgcgacggcgcaattaaagcgtcgcctgtcattgatgttctggtggagctgcgaggaactgggcaagacccatatccaaagctgctggggatgatcgaaggagcaaaggcctccggtcgtacccgcgcaacgggctcagacgccaacaaggcgcttggcaagttcaaggtgacacccaaggaagccatgagtgcgttcagcgcactgagcggccttacaggaagcctgcgcgatcaactcaagtccgggggcgatgcgcagcatgagttgcggcttgactcgaaggcggcggaatcgttgctgaagatcctggagaagtatgaggccagccagaacacggctgaagcctga

SEQ ID NO: 358326 - DNA, 174 bp, Pseudomonas aeruginosa
atgctgcacattgagcgcaaggtaggggagtcgattcggctcggcaacgacatacaggtgatcgtcacaaaggctgcgaacggtacggtcaggttggcgtttgaagcgccgaaagaggtgaagatctaccgcgaagagatctaccagcgcatccagaacgaaaaaacaccctga

SEQ ID NO: 358327 - DNA, 837 bp, Pseudomonas aeruginosa
atgaagaaccgcagtataacgattcgcaccgggcttctcgccgcagctattgctctcctggtcgggtgctcttcctcgccgaaggcacccaccgtacaactgcctgacccgcagaatgtgccgaaggaaaaatggtctgatgcgatgcacgttctgactgccatgaacatttctggtcagcgtgatgttccccgagaattcgttgtatccgacccgaccacggcgactcctagtacaggaggctcgagtgtggcggacgctgctgttgccgcaggcggctatgcgtcgcctcctcctggtgtcagcagcaatgcagctcttggcctaggggtaggcctcttcctcctcggcggctcgagcgatccagctcgcacctaccagactgccgcttgggtacccagcacgctggcaaaatcgcccgaagaagcgtctgccctggtcttgaagctaattgaggaggcgcgagtcaaagcctttcctcataaccgctcaaaactcaaatcgctggtaggtaagtatccgtcaggtcacgggaaggcctacgatagtcccgcagctttcgtgaaagaaactcccgtgcaatttgccgacagagccacgcccccaccgagctttattaatgccgccgaggcatatgggccaatcttcattctcaatgagcagtacacagttgatggaataaagaacgacataacgaccttggaagccatgactaaaatttccgaaattctgccggagtggttctacatgtatcacccaggccagaagctgcgaaagaactctgtacccgcgcgcatcatcaataaaggccaggcgatgtatttcattgggaaatag

SEQ ID NO: 358328 - DNA, 132 bp, Pseudomonas aeruginosa
atggactcgatgcagatgcttgtttacgcaatcgtaggcgttgtcggtgctttggccctaaccggcgtgatcggttatgtggtcgctgaccgtctcgacaagaagcacggcacgaacatcaaggcccactga

SEQ ID NO: 358329 - DNA, 207 bp, Pseudomonas aeruginosa
atgtacaagaaaatactattcgactggattaaggcttcacttatgggcgttggctgtagcttgttggcagccgcttttgtttccatcgttacaccaggaacgcatccgcttgtcgtatcgttctgtctggtgcttggcgtggtaatgatgatcgccgatttggtggtatccttgattacagcgatgagcaatccgaaaggagaatga

SEQ ID NO: 358330 - DNA, 246 bp, Pseudomonas aeruginosa
atgaacgcgatcctcgaagctgctcgtttgcaaggccaggcctcgataagccgtaaggcttgggtaaccaaagggggcacaaaggttcacctatgggagctgtcatcagggggcgtcatcctcctgaagcactcgcggggagaaggttttttccagccgataaagctggaggagccaatggagatggttgttgaccgtttccggaataaatgcggccacaaggtgttctcacctaatgggctatga

SEQ ID NO: 358331 - DNA, 267 bp, Pseudomonas aeruginosa
atgaaaatggagatgaaaatgcaccggtttgttgaagaaaagatggcaaaagtcgcgcctgttccatgcgacttcatccttggcgataccgtgacggtgacaaatggatacggagtcgaaatccagggaaagaaaatcctgggattcgtccgagagatcgatcctgagtttcgtcccgaagctttcatttttctggactgggattgctactggttcccggtatcaccggataaattgaagctcgaaagcagatattcaggactctaa

SEQ ID NO: 358332 - DNA, 387 bp, Pseudomonas aeruginosa
atgaatgcttataaggatgcccaggccggcgaagccaggacgttcgttactcgtaacgatcaggtggtcaagctagttgaaaggctgctgaaacgcgctgccggcgttctcgtcgagaaggtttgccgcaaggctatgacggaaggcgagcttcaggttgtaaagcaggcggttgagcgtggcgagctgtacaaggttttcagccttgttcgtccagctgctgaccagatgcgacgtgtggacagcacgaacatttactgggactggattgacgcattcgggagctattcggacgcagttggctcttgctggccatacatgagccaggagcgaagagcgtacgctctgctgcacgctgaagagctggccaacgcaatctgcaaataa

SEQ ID NO: 358333 - DNA, 171 bp, Pseudomonas aeruginosa
atgaacttcgtccgaaagtacccaatccattgcttcgcgccaattctgctcactgacctgaggatgaatgatctgcctcagagtgattttcagcaggtattcccgcatccactcaacgtaatcatcggtgatttcgtctcgtgtccgcagggcttccaactcagcgtctga

SEQ ID NO: 358334 - DNA, 360 bp, Pseudomonas aeruginosa
atgagcaataccaacgaagtcgttaacctgaccaagtttaaaactacccgtgaactcgaagccttcggggttcgtgatcttacgagttggaaggaatttcaggagattcgtagtctccttttcttcccggtgttgccaacgaaggaaagtgttgcaaagcgcgttgagcgtcttggcgaaattgcccttgctgaagcaaagaaatctggcgcaactaccgttctggtcagctgcccgccatggatgatgcactcgctgtgtgccgagctggtttatcacgggctcacaccagtcgtaagcttcaccaaaaaaaccagtgaagacagcctgtctgtaattgatctggtagttgctgcgtaa

SEQ ID NO: 358335 - DNA, 729 bp, Pseudomonas aeruginosa
atgcccaagtttcttaacaccagcgctaccaattactacctggaggagctgatcaagaacgcgaaagagcggctgatcctgatcagcccgttcctcaaaatcaatgatcgcatccgcgagctgctggaagacaaaaaccgtatgaagattgacgtgcggatcgtctacggcaagagcgagctcaaccctcaggaaattaactggctcaagggcctgaccttcgttcgcacgagcttctgcaagaatttgcatgccaagtgctacctcaacgaagaagtggccatcatcacgagcctcaacctctacgagttcagccaggtcaataacaacgagatgggcatcctgctgacccgggaggctgactcggagtgctaccgcgatgcctacgacgaggctcagcgtattgtccgtgtaagcgatgaggtgcgtattgcaatggaaatggtcgtcaaggtcgaaggcggtggcgctgctgctcaggcagcatcggcatcgaccgatgcggctgatggcggttcaggcgctatggccaagctcacctctgcaaagttggctgcaaaaatgggcatcaagacgaaagacctgatggatcggcttgttgcggggggatacctcgagcttcgagataccatgcattacctgacagaacttggtaaatccgcaggtggcgagttccggaaggggcctggcggtttttactttttatggccgtttgattttgatttttga

SEQ ID NO: 358336 - DNA, 804 bp, Pseudomonas aeruginosa
atgatctacctctaccttgcgcttttacttgtgccggccggagcgatttttgtctggggtaggctggtgtcacagttttcggcaaagacgtggattatctatcggaacactggaatcatcggcgggcccgtacatgagctggcgcacgcgattgcatgcctgctcttcggcctgcgaatcaggaagcttgcgctattcgcaccggatgcaatcactgggcagttgggctacgtcgagttttcctatagcccgttttctttgcgcaactcgattggtcttcttgttcagggcattgcgcccttgttggccgggggcgcaatcgccgttctctccctcggcacatcatccgaacagagccttcccgaccagggcatggtgcctttggttgtctggatcggcgctgtggccaccggttctgttaccgcgatcgtcgacttgggtactggctcattgcaggggtttgctctggcgttgctcgtcctagttatctcgatgcacgccattccaagcactgccgatatcgccctgggtctcaagggctttgccatcattgcggtcgctttcggcggcttagtcttcttgctccagatgattccattccagggagaaggtgttgcaatggcgttcatcatcaaggccgcggattttgtggcgcgttatctcgagatcgggatgtggcatgcgctcaacggcgcagtaacggtggtgaccctatctgtagtcgcgagcgtagtgctgatcctgctcccagcgtttttcttccatctcaaatccttctgggatggagcccgtggccatgtttga

SEQ ID NO: 358337 - DNA, 453 bp, Pseudomonas aeruginosa
atgcccagcgaaaaatatcttccggcgatatgccgatcaccactcattgactacctggcaggcatcggctcgcacgcggtcatgattctgacgttcaggcacagcggcgaagagctgcgctcgatatccagtcgtcacactgctggcctgatggcagtagcggttggcatggtcgtcgcctgtacccacttcgccccgagctccagttccacgcatagcttggtgtcttgcgcattatttgccctccttatcgcagcggccttacgcaccttcggaatgcatgccgttgcagggtatgcgacgttcctggtggttacagagccggtggccctggttattcgccatctcccaatgggcgacgtgattgatgccgtgttttcgttctggtgcttagcagcgctgtctgtctacggcggtaagtccgcaaaaaacagaatggagtcgcctcaatga

SEQ ID NO: 358338 - DNA, 276 bp, Pseudomonas aeruginosa
atgaatcgtcaagaactcgtgaaagcgattgccgacgaaagcgggcacagccagtcaaccgtgggagaggtgctgaacagcctcatctcgacggttcaaaatgtcgttgccggcggcgacaaggttagcctcgtgggctttggtactttcgagtcaaccaagcaggccgagcgtcagggccgtaatccgtctaccggggctccgatcaccatcgctgcctcgatcaagccaaagttcacccctggcaagtccttcaaggatcgcgtcaaccagtaa

SEQ ID NO: 358339 - DNA, 546 bp, Pseudomonas aeruginosa
atggatgacgtaggagaggcgcgtgctcgcaagtttgcagagtcactgcgcgatgcaagctgggttatcgatgacgatactgccggcgcacaaaacgccgttggattctggctgtactcatacaacttggttgctggcccccgactcgttggccagctcacgctggatggctatcgagcaatgcagggcggcgaagatctgaagaatcttgacggacttcagcccgctgatgttctcggcgcgaccctcagcgcctatgacgctctgccagagcagagccgcaatgctcgggagtcgcaaatcgtcatatcagcgctgtcgctatacgccagctccactatgacctggcaggcgctgccggctctcaaaactggagcccaccaacacttcatggtgttcgattggctcacggcccccggcaagaggatttttcgccccgccgccgcaatcaccggttccgttcttgctcctgaaatcctgaccgacttcagtaagcaagtgctcaccgcccatctgtcgaaacacccccacgaaacgccttactaa

SEQ ID NO: 358340 - DNA, 882 bp, Pseudomonas aeruginosa
atgcaattcaacaatttctcatcctcgtccaaatctcccttggctctcggctcgattgccgttgtggccgttataggtatgggtctgctgcttggctcgttttataccgtcgacgagaaagaacgcgcagtggtcctgcgcaacggtgccttcatggaggtggcagatccagggctgcattggaaaatccccttcatcgatagcgccaaagcgatctcgatacagaacaacgccaccaagtgggacggtttgcaggcatacagccgtgaccaacaggctgcaacgttgtcggtctcggtcagctggcacgtgccggcaggcgaggtcgcggaggtctacaagggctacgccgatctggacggcctgctgacaagagcaatcagccgccatgtcccaacacaggtggaaaacgtcttcggtcaatacaccgccgtcaatgccgtacagcaacgcggcaagctggttgccgatatcgcctctgcaatcaagagcgcagtcagtgggccggtggtgatcgacagtgtgcaggtcgagaacatcgacttcagtgacgcctacgagaagtcgatcgaagagcgcatgcgcgctgaggttgccgtgaagactcgcgagcagcaactggccactgagcagatccaggcgcggattgtcgtcacccaggcccaggctaccgcggattctgcactggccgccgcacgtgccgaagcggaaagcattcagctgcgcggcgaagcggaagcaaaagccatcgacgcccgcgctcgcgccctgggcagcaaccccggcctggtcgaactgaccaaagccgagcgctggaacggcgtgctgcctaccactgtacttccaggcggaaccctgccgttcatcgacgccaagaagtaa

SEQ ID NO: 358341 - DNA, 531 bp, Pseudomonas aeruginosa
atgcaccgaaccatacccagctgcaccttcttatcgcgcagtgacgctgaagcatactcgcaaggccccgactggcacctgatatcgatatctgatggtcttgaagaccaggcccgcatcgacgaggcacgctggaagagcgtgagctaccaccacttcattgacgctggctttgacgaagaagtcatcgagatatatgggccagattttgagcggaactacgtcgattacttgctcagcggtaaggctgacgtgctgcgggagcgcatccgggaaattacagatcgaggggaaaatatcgctgtcaattgccaagccggccgatcccgcagtgccgcggttgctttgtatatcagcaaacattatggctaccaactgcataagccgaccccagacgcaaaccagtgcgtctaccggatgctggccaacgatgttcacctgatggcagcctaccgtgcggcaagcactccagtagaaccagaagcgccaaagcgaagccttctctcggcaatcaaatcgatgttctcgtga

SEQ ID NO: 358342 - DNA, 354 bp, Pseudomonas aeruginosa
atgtcttacaccaccgccaccatcaacgaactgtttggtctacgcgacaaggtaggcctttcaaccgcttcgggcttcaaagctcgtgtgcgctttgtacagctggcttaccgccacaatctcgtacatgagatcaccagctaccagttgtgggatcgtgggtttgaaggactgggcgagcgtacttttgatacctgcttcgagatgggagacagtcccgaagttatcgccgagctgatccgtgacgcgcgcacccacggctatgccggaaacatagagatggaggtgggaaatcctgaatgcttcgcccgttggtgcggctacgcagaccgccagcaagagcttgcattttaa

SEQ ID NO: 358343 - DNA, 258 bp, Pseudomonas aeruginosa
atgccgtcccatacattcaagtcgagctatttgccggaataccttgcatggctcatgttcctagccggggtggccaatgccacgctgatctggtctggggtattcgcagccgcgcctcaggccttcctgctgctttttggcgggctttttggcaccgctggcatcgccctcctcggcttgctcatgttggccacctggtgcgctctgggattgctgctggccgctcttacccgccgggcgctggagtgtcggtcatga

SEQ ID NO: 358344 - DNA, 720 bp, Pseudomonas aeruginosa
atgggaaaagataaaattcactggagaatcagcgcggaggatgtcctggccgttctggagtattacaacgccgctagcctgaaagcccaacaaacggcgctttctggcacggcgacccagcttgagaaattgttgggagggccactgcataagctcctcgagccggaggaggctaacgccatccgaaaggccggggagatcgtccgctcgatcaatattcgtgttgagcacgccaaagagatcaagcgccgggaggagaagcagagggaggctcggcttaaagctcgcaaggccctgattgacgccgaaattagggctgcaatcccgaggccccaggcaacagcggagaacgtaatacggatcacaacgctggcaatggcacttcatcaggagaaattcatcctggatttctatgatgtaccaaccgtgatcaggcagttccaggagcggctacagcgagcgctcaaggaaaaggcactgggtggctacatggattacgttcatacagacatcgtgcgcggattatctgaaaccctcgactatcggcagagtgggaaccccagggcggacattgcggccgcacttagcttgtgtgaaagctggaagccaagataccggccgacgcaggaattcctagattttgtccatcaccaaatagccattgagcactcgaccaacgtagagagattgccggtcaagaagaagccagccggcaggtag

SEQ ID NO: 358345 - DNA, 549 bp, Pseudomonas aeruginosa
atgcgcagcgggctagattcggctgaggatgacttcaaaaaatggctcagcccttccgtggtggttgactcctcgggttttcctttgctgctggaacatcgaaccaatggggagttcgacacccttgatccgtccaaaacggtcgacggtgggcttcattttggtacctcagaacaggcctccatgcgtgctggcaagggttcccgtgtcatccgagcctatctgaaggcgaagaatattcgccgaagcaaagatcgcggcggtaactggaaatccataatcgcgagcgcgaaacgcgcggggatggatgcaatcgtctatctcaaccgctacgaagggctcaccaccgaggtgattgagcggctaagcgctagtggcgacctcagccggctcgacgacatgacagatgcgcagtttagaaaggtagtgcccgaggctcgggacgttacatcgtgttccgccaggatcagctttggattgaacgcgatcgttctgaatagccaccccaaacccaaccgatggcgacacccaaccacagaaggagaatga

SEQ ID NO: 358346 - DNA, 240 bp, Pseudomonas aeruginosa
atggccgatcaactggattatctcgacgccttggcgctgcgcgtggccaagggcgaccttgactgtgttggtgccctgagtcgtggcgaatacctctatgtcgcactggccgcgaacagcgccgagctgctgaaccagagcaatgacactatcgccgaagcacttgcccgcctggggcctgaatggactgcggcgctgatcgagcgctggcagtacaaaggcaatccagcccgctactga

SEQ ID NO: 358347 - DNA, 309 bp, Pseudomonas aeruginosa
atgcgtgccgacctgctagaccgctacattgcccgcctgtgtgccgagtcggcgggcctcgattcactgcatattgacgtgccctatatggccggccgcaagcgctacgaagccggccgccgctggtcaggcatgcccctggtctaccgcgcgcagcgtatcgcccgcctgggttatgccgacgccgcgcacggccgcccggtgcggaaactgcacgaccgcgctgcgccggttactaatgtgacctacccagcgcctgaccctgtgtccgtaacgaaccgaaaggaacccgctccatgcgaaccctga

SEQ ID NO: 358348 - DNA, 276 bp, Pseudomonas aeruginosa
atgcgaaccctgacgctgccactcaaaggcgagtatttcgacgcgatcaaggctggcgtgaaaccggaagagtttcgggctgccacaccctattggcgtcggcgtttggaggggcagagcttcgaccagatagagctgacacgtggctatccgaagcgcggagacgacgcacgaagacttgtgttgccctggaagggctatcgtttgacgacgatcgttcatccgcactttggggcagatccagtcgaggttttcgccattgatgtttcgcgctaa

SEQ ID NO: 358349 - DNA, 690 bp, Pseudomonas aeruginosa
atgagcaacagcgtggacctggcccagcgcaatgagcgtgaaaatcgctacctgagcatcatcaagaagtatgagccgagcgaggttcatcggtttccccagatgctcgccgaactcaccatggcaatggaatatgggcctgacgatgtgcttggccaggtattcggcgagttggagttggggaataatgcaagagggcagtttttcacgccctatccaatctgcaagctcatggcctcgcaactcattggggatggtgcagatctgcgtaaacgattggatgagcgaggctttataacggtcaacgaaccagcaagcggtgcgggggctatggtgatcgcaatcgccgaagccttgcgagatgaaggtttcaactaccagcgctgcctgcatgtgactgcgcaagatgtagattcccgcgcagttcacatgacctaccttcagctcagccttctgcacattccagcaattctgatcctcggtaacacgctggcgctggaagagcggcaactgtggtacaccccggcacacgttctgggcctatggagtgccaggctcaaccgcagccaggccgtggccagcgagatcatcgaatctccagccgaaaatgctaagcccaacctgtaccaggacccggccccgctccccgcaccacacctaaaccgcggccagcaaattgcactgttctga

SEQ ID NO: 358350 - DNA, 687 bp, Pseudomonas aeruginosa
atggaagttgttgcaatcaaaaaccttaaaacacttagtcattcgcagaaggaagaaatactgcggatggctgaacgctatagcctagatttggtcaaccgaccgatcagcgctgatcaccctatgttcggcgtagttcgcgcctggatgctgactgatatcgcccttcagcttgatccagcaattagccttcagatcaattctgaagtagtaatcgctgtaaatgtcgcatcaaaaattataggcttcatgaccctgagccgagctaatgactccgcaactgcttgtggaataaattatatctgcgttgattcagcacatcgcaatcagggggtcatgactgcgatgattgacagcctgaaaccacgcttcaccgatatagcactcagctgctttccaacactcgtagaagcgtatgaaaagatcggattcgtaatgtgcgaggcccaaggagctcaagtcgctatgcgaattggggactcgtacaatatgaatgtcatcgatccaaattacttgaacaatcagcgtgctgtttcgcaagaagcacaacgcttgatcaacgagctaggcccgaagcgagcagtcgctgtcaatgatgagtatgacgcggaaacaaagcgcatctcaaaggaagtcgcggctttcgttgagcaacgcagaacagcggcatcgcaaacggacgactga

SEQ ID NO: 358351 - DNA, 1257 bp, Pseudomonas aeruginosa
atgagcaaactaacccctaagttcgtcaaggatgtcgaccagcccggctcctaccaggacggaagggggttgattcttcgtgtatcagctaccctgcggaagagctgggtctttcgctatatgctggcgaagcaaaggcacgatcttgccctgggtacgtttcctgccttgagcctcagagacgcacgactggaggctgacaagtaccgactcgatatcgcacgcggcgttgatccagccgctgaacgcgcgaaggccaaagctgccaaagcatcgcgagccacaacgagccacacatttcgggcgtcggcagaaaggtacatacgcacgcattcgtcgagctggtccaagaagcatcaccagcaatggcagaattccctcacgaagcatgtctaccctgtcataggcggatttcggatagccgaggtcgacacggacgatatcctggatgtgctgacgccgatctggagcaagatctcggttactgcgaaccgcatccggaatcgcattgagctcgtgctcgatgcagccaaggcactgaagcttcggcaaggcgaaaaccccgcacggtggcgcggtcacctcgacaagctcttgcccaagcaatcgcatacggtagtccccttcccgtctccgacaccttcacgaacggccgagctgctggccaggctcgactcgctggatggtgcagcagctcgtgctgttgagttcgcaattctgacagcaacacgtaaccaggaggtgagtggggcccagtgggcagaaatagattgggaggagaaaatctggttgatcccggcagaacgcatgaaagcgggcaaggctcaccgggtaccacttactgaccaaatgatcgaggtgctacggcagcaggtcggaaagcatgccaaatggatatttctcaactcctggcgcacaggcccgattcccggcaacgcaatggcaagggtgctcgatcagctcaaggtcgatggagtggtaccgcatgggttcagatctacttttcggacgtgggccgcggaagaaaccgatcaccagcgagaggtttgcgagatggctctcgcacacaccctcaacagtaaggtcgaagcagcatataaccgaggtgacttgctggataaacgccgcgctctgatggaggattggggtagatttcttgccgccaatgctacccaggtgaggggtagagtgtcggaagtttcggagatgccccctgatccggggtctgacctggccaaggtccagccggctgcctga

SEQ ID NO: 358352 - DNA, 486 bp, Pseudomonas aeruginosa
atggatagcactgaaaacgtcgatgaacgcctgttggccgcggttatggatgaagcccaaacagacttcagcatagccagtattgcagttgagaagatccgtcagggagctgaaagcatcgccgccggcatgcacggccgcaaccatgtaaaggcgtcattcgagcattatgacggtacaccgatgtcgcctgaagaagctttggctcaccagtgtgttcatgcagcaagcatcggaaaatccctcggccaggaatttcttctgaaggcacctgctgccctcctggagcaattttccgccgttgcagggaaccgaaacgttgctgacagtggggcaatgctcaccggcctgctgcatgggttcatgattgcctttgccacgagggagacggaggatagagcgctgaaggcactactggaggtagctcggatctgcgacgaggcaaacaatattcgaggcaccaccttcggccaagccagcgaataa

SEQ ID NO: 358353 - DNA, 360 bp, Pseudomonas aeruginosa
atgtccctcatcaccgagtaccgagccacagaagaagccatcaaggagcttcaggaccgactgaagaagctgagcggaaatgaagcccttttgaaggagatggagttcgaggaaaagctgcgatccttgatgtctgagtatggcaagaacctgcgtgacatcatcgcgattcttgacccggactatcgaaagcaggtttcccatcagcctggcaaacctcgtgcccaacgagcagtcaagatctatcggaaccccaacacaggtgagatcgttgagaccaagggcggcaaccagaagacgctcaaggagtggaagcaacagcatggcgctgatgtagtcgagacatggcgaacccagtga

SEQ ID NO: 358354 - DNA, 645 bp, Pseudomonas aeruginosa
atgcaaacacctcaggacgacacaataatggattttggcccgaacctcttcggtggcgagggtggctccgcgtccaattcttcggctgatgattcagatgctacgaacgatgctccggatgctccggatgctccggatggggcggcgagtatttctcagcagatggctgaaggttgcaccgaagagaagacagccgaggccgccggcggccaggcgggaggtgacaatgctccctcgagcagcaatggtgcatctggcgtgaatactgagaaggcagccactcaaaccaaggcagggaagtccgaagtaggcaccaaagccttgtccagtgtgaaagcggccgtgaaggttttcgaaagcatcaatgggttcgacgaaaaaagcgcgactcagcgtaccgttgttcgcgatctgatgctgaagcagtccgaagccatggaactcaagctccagggcaagaaaccccctgagggtgaagactttgatgccattgctaagcagctccggcgcgagaacaaccgcctcgactccctgcttgaaggaaaggaatcactgttcggcaaggcccggaaagccgccgaaattgcgatcgaaaacatgcagggcgtaattgccgaaatcaaccgcttggaggaggagggttag

SEQ ID NO: 358355 - DNA, 306 bp, Pseudomonas aeruginosa
atgagcaattcaaccaaacaccgtatctcgctggcgtatgagcacgaaggtgaggtgcggcaggcttcagctgagctgaacctaacgaagaccagcatcatctttagcggactcccgagcataaaattcaaggtctccctgagcgatcctgaacaggtcatattgcagttgccgacagaccgcaaaggaaaaaaaccaacggtgtcttgcgacatctcctcgattcctgagctggaagcggcgatggcagaggtgcgcaggcaaggctggctcaggccgaaggtgtcggtgagtgagtgcgaatga

SEQ ID NO: 358356 - DNA, 1017 bp, Pseudomonas aeruginosa
atggccaagtcggaggattacccaggtcaaaaaaagaccccccctcaatgggtcactggagttcgcccacccgcggaaattgctgagcctaatctcagggtctccgttgcagacatgctcgccgcacaacgggcagaacaggaggtcagtgcgccaagtccggccgcagtgttagctccagcaccaggtcataatgatgaggctgttgccgcaagtgacagcggcgttcttgctgaggtgaaggtcgattcgattcgggtatctccgtttcaacctcgtttgaccttcagcgaagcagctattgaggatctagcgaactcgatcgcctctgttggactggtaaagccgttgacggtccgccctgtcggggatggagtttatgagttgatcggcggcgagcgccgttggcgtgctcacaagctgctgggcagggaaaccgtgaccgcctatgtacgctccgttacggatgcaatggcgaagattctggccctaaccgacaacgagggacaggaagctctgaccgagtatgagcgcggccgttcttatgccgcgatcatgcgagcaggggaggaaagctcgattcgtgctctcgcgcgcagggtaggggtcaaccattcgatagttagcaggtgtcttctcctaatggatctgccagaggaagtgcgagcaatactcgacacgaatccggggcttatcggcgggaaatgggcaaaggacttcattgaattcagtcgtaccgagccggcgctgcttctgcaagcagttacctctatgcgcgatcatcaatggacgcaggagcatgccctacgatggttagcgaaggagcttgcctcgcgtgatcagcagaagacgccgggcaagttcaccgataaagaaatcagtgggataggcaaggttcgtgtagatgggaaaaaagtcgagtttcgatgcgagaaaacggtagatgcgaagcggctggcggaacaatttgaggctttcttgaagaccattgatcgctccctgattacaagcgaatga

SEQ ID NO: 358357 - DNA, 480 bp, Pseudomonas aeruginosa
atgaatactgccgctttcgcgggcgtcgcagcttatctgctcagcatggctgctatagcgccggagccggtaagcctagctgtaggcgttacgacgatcgtagacgtccagcagcactacaccatcatcgacaagattggtacttcctacaccggcgggccggtactgaacctttcagagtgggaggtcaatctcgagggcgtcagtgacattcaactggcctttaatgctgaaggggtcctggatgtagctacggtaaaagctgacaagctccatctggaggaggtgctaaatggcttcaggaaccaactgcaaatcagcactgatgaatccggccttggctttgaaaacgtgaccttcttatctggctccaccgaggtggttgtcgaatcgcatccactggacactcagttcactgtcaactacatcagcgccgacttcaaacgcgcacgcacccaagctcaaaaacagtacgcctaa

SEQ ID NO: 358358 - DNA, 975 bp, Pseudomonas aeruginosa
atgactgacgcaattgtttccgcttacgagcgcttggtcgaaacggttggggctttcaatgagaagtggcccacattggttgtcggcgggatgatatggcgcatcccgctcctcactgaacagaggacgccatctcgaatcagtgtccaggtgctgacaggaagtgacgcaatcaaggtcgctgtagaggcgctacgcgaatttgagcgcgatctcggccaggctccaggtaccgtgctgcgtttgccggggtactttatcctctccggatcgatactcgatgagggtagggcggtgaatcgctgcaagagcgagctggtggacgcgatcgaggctgagcgcctgtttcgcaacgtcgccgtcagccgtcgctcccacatcatgcgccaggccctggggaaaaatttctctctcaaccagctgaagcgcgcaattcaggtgtttgatgcagctccaagacagatcacattcacctgggccggtcacacctcaggaaaagagcgtgtcactgttggccacgtccgtgaggtactgctcgccgaggcccatgaaaaggctatggccaccggcgagccggtggtgaatagcccccaatggatcgatctacgcagcatcgcgaacatggctgaaaccgatgtgttggatgtgcccaagcctatcgctccgcatccacgggccatgctgtggttttccgagcgcagccgttacgacgcaatgctccatgccaacctcccattctttgtacttgacgggcaacctgctgcaagaatcgttggcctcaaggacttcgatagagacgcgcgatcagcaaaacggcctgacgtaaagcagcgattgccggcactccctggggggcgctttttcgtagcctcatccagtgcggaatcagttgcccaagagcccagcgcgccggatgggcttgaggtgctatcgacgtaccgagagtcggtcaaagacaccgccggacggaaatag

SEQ ID NO: 358359 - DNA, 276 bp, Pseudomonas aeruginosa
atgatgattgatggcgttgagaaacgaatcgaagccggcgtgaatacggccctggacatggttgaggtactggttgcagctggccagcccctcaaagctgcgattgccacctcgcgaatactcacgatggaagttgtccgcgagtccctggcaaaaaacctggcaaacaaaagcggctcggtgattactcacaccttggccactacgccagcggaatctgggccggtaccggcccagcacagcacccaaacgaaacagcaccagaccgttgactga

SEQ ID NO: 358360 - DNA, 960 bp, Pseudomonas aeruginosa
gtgaaatcgatcctcatgatgtttacggccgtgatgatggccacatctcaactcgcttttgcctcagcgcctgtgacctttgagcaggccaaggtcgagctacgccagaaggtctactacgaccgcaacaccagcgaaaccggcgatctctactgcgggtgcaactggaagtgggtagggcgatcgggcggccgtatcgacttcgcctcatgcgggtacgaagtgcgcgctcaggagaatcgcgcgcagcgcatcgaatgggagcacgtcttgccagcatatgccttcggcagccagcggcagtgctggcagaaaggggggcgcaagaactgcatcgataccgatccggtatttcgcaaaatggaggcggacatgcacaacctcgaagtgagtgttggtgaggtcaatgctgaccgaagcaattttcgatacggcattttaccctcgacaccgatgcaatacggggcttgcccgaccaggacggattttcagcagcgcgtgacagagcctcgagaccaggtgaagggcgcggttgcccgtatctacttttacatgcacgaccgctacggactatcaatgtccagggcacaacagcagctgctgatggcctgggatcgtcaatatccagtgagcccgtgggaactggagcgtgaccggcggatcgccagagtaatggggcatagcaacccattcgtaaccggtgaacaatcctggagtctcggtgtgcgagagaaggcagtcggcgcaatagaacaggtggttaggagcgagtcagttcaaccaggtgaacatgccgcgagctcgttttcgccggtgattggcaaccgcaatagcaatgtttaccacctgccagtgggctgtccgagctacggaaaggtcggaacgcgaaaccgcgtagagtttgagagcgctgcggacgccgaagccgcggggttcaagcgggccggaaactgccgatag

SEQ ID NO: 358361 - DNA, 1380 bp, Pseudomonas aeruginosa
atgacagaaccagtccaactgttccggttgcgggtcgacggcctcgttgcagaggaaaacattcccgtagcgcagctatcgggtctcttgaatgactatggcgtcgtgaaggacagtaccttgaataggctgatggctggccagagcgagcgcgttctaggtcaagagctggaactgtcgaggcagacgccagaggttgccccgcggttgtacacgctgcttgttgatggaaaagtcgctgcgaaggacgttcctgatgcagagctcgaaaaactcctcgccaattacggtgctcgtagaaaggaaatatctcgtggtctcgttgccggcaagacacagcgtgtgctcggtcaggatctgaagctattaacccaggcagttgggcacacggtccacgtcaacgcccagcacgaacaatccacaacggaagcgatagctgagccgacagcgccgaaggcacctcgagcccaacccgaatcagcaccgccggcaacagcgccgacgccttttgacgcgccccttcaggaactgatctcgcgggcgaaaaagctacgcaaaggcaccctaatctacggcggtaccgcgttgggtctggcgatattcggaggcgtattttatgcgctgggtatcgccgccgaaccaaccacggctattgaccagattctggttcccgatgcgatcgccatggctttccaaacatctggccacgccggcgacggtatcggcgggcttatgggggtcgaatcggttgtcgactcgatcctgaatagcacagcgctcaaaatgatcagcgcggttgcaatgattgcgggtgtaggtcttgcggtcattaccggacgccttttcaacatcgttccagccctgatggtcgggatgatgccgcacgtcatgggagcgtttatggggatactcgatccgggcacgacaagtaagcccagcgagttttattccgcggttgagtcgaagaacctgccgaccctccagcgcctgctcagctccagagaagatctggacgaggtggccaaggcgtatgtgctggcccaagcatctgttgccgagggcagctcctcgaagtgggttgtgctgacagcgaagaacctgcgagagggcaagatcaagggcaactttgccgtcccggccggcattgcctacgccatcgaggcaactgcgcttggccaagaaagccagtctctttcggatcgagccgaacagcatcgccagagtgccttggccgaggcaaacgactggaagcgcaacagcttctgggcacttctcctggcagggttgtttggcgtgattgccacgggtcatgaatcgatcgcgcaagtcatctttcgcagggttcgtcgcattggcgagctgcttaccccgctgcggtag

SEQ ID NO: 358362 - DNA, 1119 bp, Pseudomonas aeruginosa
atgcagcaggaaattaccgtgacagatctcgccactaccaacaccgagcttactccagctgggcttcaggctcttggtctccaggaacaggacatcccccagatcaaggctgtagcggcactgatccaggcagaaaacccgctctcggtttctcagttcggcagggaagtggcagaacacacgtcctcctacgccgacagcttgctcgaccaggttcgtaacagcgacctggacgatgccggcgcaaagctgagcgaggtggttgccgtcgcgcagtcgctcaatgtcagcgcgctttccaatcgccgttcgcgcatccctgtcatcggcccgctgatcgacaaagtaaccctgcgcggcaagtccgtcatgggtcagttcgacaccacgcgagagcaaattgaaaagctcgttgctgaagtcgaccaaacacaagcgggcatttctgctcggaacaccggcctcgagtccatgttcgttgcggtacgcgaggagcatcgcctgcttggcatccacattgccgccggtaagcagcgccttgcggagctacagatgcaggtttctcagcttcgggcgaacatcgggaacgacccggcccgcttgcagcaagttgcggatctggatgcactgatctccaacctcgacaagcgtattggcgacctcacggcgctccagcagtctgcgatgcagagcctcccgacgattcggatgattcaagcgaataaccagatgctggtggacaagttccacaccatccgggaaatcactgtgccggcctggaagcgccaattcatgctggctttgacgctgaacgagcagcggaacgccgtccagctggccaccaaaatcgacgacaccaccaacgatctcctcaagcgcaacgccgagctgctgcaccgcaactccgtagagacggccaaagctaaccagcgattggtaatcgacgtggacaccttgcagaaggtccaggccacgctgatccagaccgtcgaagacgtaatcaaaattcagcgtgagggcgtagctcaacgcaaggccgcagaaaaagaaatccagggcatgcgtatcgatctccagaagcgcctgggcaggactgatgaagtgaaggagcttcactga

SEQ ID NO: 358363 - DNA, 774 bp, Pseudomonas aeruginosa
atgactcattcagtggtcaacatcgaccacctcaaacagcaggtactccctgagttgtttgctttcccggctcgcctcggcgagtacgggggcgtagcggatagctctgccaaaatcgatcaactatcagatctcatggagagcgggtcggcggcagcgcttgcggccaaaatcgcagaaatcctctcgaaaatggccgacgcctcgccggagcagattacccggaagccgacctggttcgagaaggttctgggcggagccgtggaaaagcaggttcgctatcaagtcgcccggtcaacactggaacagctactggccgaagctgaaggacacgcccaaggtgtacgcgatacggtcagtgccatcagcagaatgatcgttgcccacgccgaagaggcggaagcactgaaagtgttcatccaggccgggcgcgaattcctcgaagagaaccctctcatcgggacggtagcggagggggagatcgagtttgatcggccgcgagagcggctggcgcgaaagctcgccaacttggcaacacttctggcctcacacgaactgagcgttagccagatgaagctgagccgcgcccaagccctcgacatgctcgatcgcttccgagagacagtcaccgtactggttccagtatggcggcaacacacccttaccctgatcaccaccaaacacatgagcccggcgatggtcgaggctgccagcaaggcgcatcaggcgctgatggccagcctgtctgaaagcctgaatggcgtgaagcactga

SEQ ID NO: 358364 - DNA, 360 bp, Pseudomonas aeruginosa
atgccagacaccaacgatccccagcaagacgagtcgcgattgatcgaccgcatgatgaccgacctgctttccacgatggatcaagacgactcagacatgcgctcgacgctgattgagaacggtgacgacatccgggccctggccgaaatctgccggcagaccggcgttttcgagcatagccacgcaaagttcgccgaattcaagcagcacctggaggattcaacacctcctgaagaacggctcgtcaaatcgtgggcgtggctgcttgaccggattgtccattcgccgaccactctgcacatgcggggagccgttcgcctatgcgtgccactggttgcgctctacctaccccctgaatga

SEQ ID NO: 358365 - DNA, 324 bp, Pseudomonas aeruginosa
atgactgagcagaaattgagtatcgcggcacagattgcagccctgatgcctggcggtgatgacagccgcatgtggcgaaactacttggccagcgctcttgagcaagtagccgcaaccgacgaccttaccctgctccgtgccgccaaaggcgctgatgagttcgaggtgggctttatggccttcgtgtccaacttccctggtgtcgagattgagcctgcgcccgagggcggcttctacggtgttgccttggggcttgtgaagctggatcgcgcgcttcgcggtgaggtgctgcgcgcctatgctgccgtgttgagaacaagttaa

SEQ ID NO: 358366 - DNA, 255 bp, Pseudomonas aeruginosa
atgcccttgatcaaactagactccgcgatggtgacccacttacaggctcgggtagccgccttggccgagctgcatcgcgatatctcgacactgatcgaggctatcgacctgccagctttattacacacggcagatcgtatcaatgaccgcctgcgcgagttgcacccgagggtaatccgcgaacatgaaatgatggacttacgcgagcaggttcgagtcatgaccgaagattgtcgccggctgctggacaactga

SEQ ID NO: 358367 - DNA, 435 bp, Pseudomonas aeruginosa
atgcaatccgtactctcgaagaagtccacagggatgaagagcagcttctgcccagttacgcattcgccttcccccaacgtaacgcgaagctttggctctgacgttcacgtcagttacaacccgcgtagcggcgactatggcagtgatacgacagctatcgtcctgcgcgagcgcgtattctttgtgctcaacggcgatcatgccgaaacgatctgcaaagtcgctgaaaacaatggtgtccatggctgtgtcgattacttcgtagagcacattgctcaggccaataaactcagtgagcacctgatggccacaggcgtaagtaatgatccctttgctctgatgccgactgccttggaaatccttgggcaagaaggcgtagaccgcatcgcggcggctgcaaaagctcaactggactccaagatagaaggtgtttga

SEQ ID NO: 358368 - DNA, 372 bp, Pseudomonas aeruginosa
atgatgatcgatgcaatcgcccagcgtttgggcttcattcgggtggcagttgttagggatcaactccagtttgctcgaaacatctccaagcgactggatgaacatcgagaggtggttgagcagatccaatctcaaacgaatctattcacagaatgcccgtggcacgtcagccacatggccacgcaagacgactacctcatgcggatctatcggatggtgcatggtgcctggcccgaccattccgatgaagttcaccgtcagcactggtacggtgaatttattcgtcagcgtccccagctgcttggtggttgcggcttgcctgagtaccgcccgcaagacaacgtgagtaattccgacgctccagcgtcctga

SEQ ID NO: 358369 - DNA, 834 bp, Pseudomonas aeruginosa
atgtggggactcaagatgcaacgggtgcgtacaacagtaagcagcatcctgactcggaaaaaggacagtgctgatcggccgtttattggcccatacgttcagcaggcaatggtcggtggagcgaaactcgctcccatgatgccgctctacggtctgatggtttgggccatgggcgattacgagggcctgcggcagttcttatcctcggcgagcagtgctgagatgagccagacggtattgatgttcatcgtcgcgggtttcgcgctgggcggcgctgtacaggtgctggttgacgcgagcactccaagcctgagctcccaaggagcttgggaaccagacttcgagcgtaccgaaactgagaagtggtactgggctcagcgaccaaacggtgaagagtgggcggtgcgggaagccacaactgaacgctgctcaccgcacatcgacgtgcgctgggccatgggcgatctgatcaaggaacttcagcgccccgagaaccggactggctctgacttcctcgatcacaaggtgatgaagctgctcggcatgcaggcccaggcgcagggcctgaagccaacacagaggttggatgacgccaagcgtttgcttgagttgcgctatggcggagtgccttcccggcttgaatgggatgccaaggcagaagaattgccaccgagcttcaaggcgtacatcaccgtgcgcgtgcagtcgaaggccccggcgatggagccggagccctggcagcgctgcctgatcgcggacggcccgtccgaggctctagccgtcaccatcgccgcgattactcgcgagacctggacattcaaatcccaagtgtga

SEQ ID NO: 358370 - DNA, 420 bp, Pseudomonas aeruginosa
atgagcaagcaaaccagcgaagcccaaccggagcttgaagtcgtagccaccatcgaagtgatgagctacgacgaagagacgacctacatcgaaacccgcagcgatcggatcaacttcgacaatgcaatcaacgatgatgccctggtgttcaaatccgacgccgagcgcgtaatttctggcctgagctacaaagccgagctgtacgacgaggtatggggcaaagccaaggcgttgggattcatgaatgtgactatggcgttggaggaggtggagaagctgcgcgctaaccctgcgattgccgggctgctcgaggccctagggaaaatcgcaactggctccacaggcatcatggatcgcgactccgagcttgcccagatagcagcggatgcgctcaccaactatcgcaccagtctgtcctga

SEQ ID NO: 358371 - DNA, 456 bp, Pseudomonas aeruginosa
atgcagaacgaacaacttgaatacgcgggtttctgggcgagaacaggggcgtgcattgttgacggcatccttttcaccctggtttccctgccgctcctgatgatgatctatggcacgggctatttcagcagcgacaagctgatccaagggccagcggatttagcaatcaactttgtcctgccagcgatcctgacggtagttctgtggcgtcgtctccaggctacgccggggaagatggcgctgaaattgcgggtgctcgacgctgaaagcggcaacaccgcaagcgttcgacagtgcatcggccggtacctcggctatgtagtgtcgaccctaccgctgggacttggcttcttctgggcggcattcgatcgccgtaagcaggggtggcacgacaagctcgccggaacagtggtggtacgcgagctcagaacacagccggtgaaattccggagctga

SEQ ID NO: 358372 - DNA, 234 bp, Pseudomonas aeruginosa
atgagccagaaaaactccaaagagccactgaccttcaccgctcgcttggtgaactcccatcacggttttcaggatttcgatatcgacgggcatcctgtggtgcggcgtgcctgtgttccgaattcgatcaagaagggcgagcacttcaacgtctatcacggggaaagctcgaagtcgggcgctgtatggacagggacgctcggtgactccctccgcaaatttgcgctcatctga

SEQ ID NO: 358373 - DNA, 270 bp, Pseudomonas aeruginosa
atgaccctctatttcgagtggatcggaagcctctgtggcgtcctcggcgcgctgatgatctccaccaatacccgtgtttctccgtggggatggtggctattcctcgtgtcgagcttgagcctctgctgctacgccgttctcgcgcaggcctggggattgttgctgctgaatggttgtttcgttgctacgaacattaccgggctgatccgctggtggtaccccgctgtgtcggccatgcgttcaacttgccatgcaggcgtcaaggggtag

SEQ ID NO: 358374 - DNA, 339 bp, Pseudomonas aeruginosa
atgcaactattcaacccgatccacaaggcagagctgatctctatcgtcgaagaagcgtcagcaaaagcagcgaagaatgcgggtgttgtccaggagttggttttcccgcacatctacttcgttctcagcaaacgcctcagcgtggtagacggggcatcggctactgcggaggccaaagattctgctctgttggctgctctcactgaggcaaaaaaagcgcttcaggattgcgtgtcggtgatgagcaacgacttggggggcttaaagctgatacagccagagttggcgagtgcgcgccaagcattggcggcagtcgatgcggtgcttgttgttcagtga

SEQ ID NO: 358375 - DNA, 618 bp, Pseudomonas aeruginosa
atgcccgttcggccagcggagcggttttgtatgcacactccctggttaggaaccgaagatatgactcacgttgacccctccgtacctcagcacttggcagagctttaccaagagctgaacgcatcgagagcgacccttctggcactgatcgaggcagagggttctggcatccatcgccggacactggatcagcttgaccgcatgattgcagagatattttttccactggagtccgtcgtttacggcgaagacgatgcttcctccacggacaacgctgcgactgtgaccccggctggatatgcgtggcgtgtaatcggtcgcaatggagaagtcaggactctccgctgtgacgaaaccggacaggaaatatcagtctcgattgagcgagcgataaacgactttgccttggtgccgactcatttgccggaagtctactgtcccgacctcgatctcactccgacgcaactggaggggaaatatgcacagcgtggccacaaccaccctttcctgaccaattaccagtggctccaagcggtgcgcaacacccagacccagcttggatactggcagtgggttttggcagaactgtcggcactgcaccgaagttcgctgtcctaa

SEQ ID NO: 358376 - DNA, 291 bp, Pseudomonas aeruginosa
atgaccgatcaagtaacgatgctgttcggccctctggaactccgcaagacagaggaaggttggcagtacctcagccagggagctggtcatgaacctggtacctggtgtgatgccactagcgtgcttgggccgttcggcggttcaggtgtgaacgatctgcttgatgagttggctgcaacaaaatccagtaagacagctcgcgaatccgaactggaagatgttcttgagcatattcgcggcaaaagttcctgctgcgacgcctgggatctcatcgaccaggttttgccgtag

SEQ ID NO: 358377 - DNA, 309 bp, Pseudomonas aeruginosa
gtggagtcggtacacgaaacgctgaacccgcaaggccccggccagcaggacgagttcaccgaatggatgcgtggccctaatgcacgtttcgtcggggcaaaacgtctacctgacggcacctatgccggcgtcctgccgttaatgttcacgtatgccatctgtcttggagtgacctacgaggctgcttaccaaaaacggttctgctttgaggacactcctgtgtgcctgcatgaatacagcaagctgacctccttcaacgatgagccttcgggatgggttgcacggcgtccactgattcaagatcgttaa

SEQ ID NO: 358378 - DNA, 690 bp, Pseudomonas aeruginosa
atgctttacatcctcctatgctccgttgttctgctgatcgtggtcattggtaacgtcgctcgcgctacgcaggccttggtttcctccggcccaagtcagcggctacagcaaatggctctcgtgctggtttcctatgcggtgggcatggcctactgcgcaccattgctttacctattctttggcccagatggcgctccaggggaaactctcggcatcgatagtgcgcggctaaccgtatacctacttttcgccgcctcagtggcgctactcttctacatcccctcactgtggaaaagagctgctaactccaaaggcttttggccgatgggtcagctcacgctggtcgccctggcatgtttcgtagggggcaaatctgcatacgaccatctaacgtttttcaacaccgatcaagcaggatgggcggatgttgcgctcatgaaggaaatcggggagataaccgatatgccgggatgcacaagcccggttgcctttgtccggttccaatccactggcccatttgaataccgctgccctggtttgatcgttttcaaccggctttcatcgcagccttttggcccatggccacacaacgatacaggctcaagtcagcagctcgcagatgtcatcctgaaaatcaaaagcgaagctaaagtggcggaagactttgcagaggagcccgcccggttatga

SEQ ID NO: 358379 - DNA, 192 bp, Pseudomonas aeruginosa
atgagtacgaaagcccgcaagccaaagccagtgcaggcaccgtctgaaatgcctattgagtggccgcgtgccgacccggccgagctggcgaccttcgacccggcgtcgaaggtctgcaatatgaattgcggccagcacgcccgcgacccgcgcagtagggaagagcggctgtttctgtgtacagactgctaa

SEQ ID NO: 358380 - DNA, 390 bp, Pseudomonas aeruginosa
atggaaatgatggatatgaataatcaagctcaggggttccctatcaaacggcttagtgaattttgcgagcagccatcaaaatggctcgttatagccgtggccgtggccttcgccttttttcttctcgggccgatcttaacaagcagtctgttagcgctcgatctgtcgtatgaaacaacaatgctgcccttgatggcggtcggtggagccttccttatcaagctcaaggtgtcgcacaacagagcgttatcgaagtatgtgtgctatctcgaaagcaatgacaagcaaactcttttgttggtgcgtgattctgttgagcttactgaaaaagaacgtgtggcgatacgcaagacactggactctaaatttccaggctggtcgctgacctga

SEQ ID NO: 358381 - DNA, 216 bp, Pseudomonas aeruginosa
atgacattgatccatcaatgtggccgctgcggctaccagggccgcgttgttgagctggccgacagctacctatgcgaagcctgcgacgaactgcataggcgcgagcagcgtgccgaagaaatctgtcccacttgcggccatgagggcatcaccgaaaccggcctctgctacccctgctcgcaatcgcccgatttaatgccgcaacccgattgctga

SEQ ID NO: 358382 - DNA, 267 bp, Pseudomonas aeruginosa
atgacgaccgagaagaccactcagcagcagcgcgacgagctgctgcacctgctggaaagctcgttccgagcgctggtcaaggcctccgacgtgcgcacctatcgtttcgacattggctatgtgcagggcatgctcgatgcgatggacatactgcgcgttgccgacgcggaactattcactcctgaagaaatgcaagagctgttcgagcgcaagcgggtagtaggcaacgagacggttaagcggatcgagggcgaggcagccgactga

SEQ ID NO: 358383 - DNA, 162 bp, Pseudomonas aeruginosa
atggcaaaccaagaagtcgtagtgacgaccgacacccaggatttgctgggactgtccgctgaggcagcagatgcgattctttccaactgccaggtgcagatccagctcgtagacccagccgccgctgcgcacgctgttcaaaccgacgacaactcaaagtag

SEQ ID NO: 358384 - DNA, 183 bp, Pseudomonas aeruginosa
atgaccgatgctgagtggaagaaagaagcagctcgactgcaaggcgcagcaactcgcgcaaaatcgaaagtgaagaaggtgacaatgcttgccgacaagctcgaggcgcgagaagcccagaaggcagcagaggaagctctgcgtatgcacaagctgaattactacgaattggtagccatctag

SEQ ID NO: 358385 - DNA, 306 bp, Pseudomonas aeruginosa
atggaaatgaaatttcgcacccagtccggtgccactgtcactgccgaccctatggctgaggcaccgtaccccctagagcttgcagatccagcagctgagcgtggcgttggccacgtcgagtccgcttcccttctgcgcaaacagattgagcgcgtgattcgtgaatacggcgcagatcctgcggaagcagctctggccgtatgcgtcatcctcgatggaaatctggggctggcggaagacggctacttcgacgacgacgataccgtgctgaacgctctcactgccgacaatcaggctgacgactga

SEQ ID NO: 358386 - DNA, 462 bp, Pseudomonas aeruginosa
gtgaaaaattttgcgttcgtactcgccgctgtgctcggttcaaccttttcctttgcccaggcctcggataagcagctgacgttaatcccttccatgtcagtgatccctgtcatcgtcgtttctccggggttgctcaccacggctaacgtccaggacttcgatgggctgaaccatgccgcaggcaccttccaacaggccaacaagaagctcatcgacaacttggtcaagcgcgaatgccgaattacgatccaggtgatacggaagctcgatgaaagcaggatttatcgtaacttcggtaacggggaaggttctctttcctgcacagagggtgacggctcgatcagcgacatcgttctcggcggcgatctggtggacgaaagtggcgctcttggcctagacctcagagatttgaaaagtggtaccaaggcctactttctcgtgaagcagactggcgcgatataa

SEQ ID NO: 358387 - DNA, 411 bp, Pseudomonas aeruginosa
atggccagtgagtccccttttctgaaacaccgagaaatcctgctccaccaatcctatagcgccgccggcgcgctccaagattttgccctgagctgctacaacggccagctcgggcagttccggggcgacgccctggccaacttcgaccaacagcatttcgcgatttttgtcgagatggccacctactaccatcagcaccgcgagaacgatccgcatctgctcgaggtcggtgcggccatgtggagcgatcgccgcgagcgcggccgtcaacacctggctcgggttgccgagcaccgcgcgatcaatccgaagcagtatgccgaaggctcagagcgcgactattacgagcagctggattggttggagcgccagactgagcggatgaaagaaaagggctggatcgacgaataa

SEQ ID NO: 358388 - DNA, 189 bp, Pseudomonas aeruginosa
atggcgaacgtacccagcgatttgatgcagcaacaagatgaccctgtgtggttcgtggaggagcgccagctgaacggcgactggatcgccatcgaccgcgcggacgatcaggccgaagccgaagcgaagttgagccatgccgagaactgccttccaggcacgtaccgtctgagtcggtcggattggtga

SEQ ID NO: 358389 - DNA, 1299 bp, Pseudomonas aeruginosa
atggcctggaagatccgcttctacagcgggctgaaccagggcgccgaagtctcgctcggagagggccgggtggcgcttggcagcgatccgttgcaggccgacctggtgttgctcgacgagggcatcgcggcagtccacctggtgctcgaggtcgatgcccagggcgtgcgcctgctggaatgggcggagggctgcgagcctcgccaggacggccaggcgcaagtcgccggagcgatcctgcaggcgcttgccgggcagacctgcggcccgctgcgctgggcattctgcgacccgcagcggagttttcccgagcgtttccccgaagccgaggtgcagaccgcgccagtgcgccgcaagtcgtccgcccgtgccggcggggcctggctgctcggcgtcagcctggcgctggcgctgtgtctgctgggcatgctcgtcgaaccctggtcggcccgccagcacggcatggccggcgaggagcccctggcgaaggtgcgcgcctacctgcgcgagcagggcatgagcgaggtggatgtgcagcgccagggcgacagtctcctgctcggcggctacctggaggacaacgcccggcgcctggcgctacagcgctacctcgatggcagcggcgtggactaccgactggaagcacggagcatggaagacattcgccagggcgtggatttcatcctgcagaaattcggctatcggcagatcctcagcagcaacgcggacaagcctggctgggtccggctcaacggcgaactggcggaacaggacgaacgctgggctcggatcgacgcattgctggagtccgaggtgccgggcctgctcggggtggaaaaccaggtccgggtggccggctcgcacctgcgccgcctcgagcgcctgctggcggacgccggcctcgaccggcaactgagtttccgcgagcgcggcgaacgcatcgagttgagcggcacgctcgacgaggtccagctcagcgccttctaccgcctgcagcgcgagttccagcaggaattcggcaaccgcccgagcctggagctgctcagtcgcggcaagcgcgccagcggcgacgaactggagttcacgattcgctcggtgtcgctggggcgggtgccctatgtagtgctcggcgacggccagaaatacccggtgggcgcctcgacatcccgcggtgtgcgaatcctcgccatcgagccggagtcgatcctggtggcccgcggcaagcagcgtttcatcatcaatctcaaaggggaggtgctccatgatgacagccttggaaacgcgactgtcggtcgctga

SEQ ID NO: 358390 - DNA, 363 bp, Pseudomonas aeruginosa
atgccctactctactagcgacaacagcccactatccgagcccaatgctgctgaccaaaacagcgcactggccgaccggaacacgcaacgaccgcaggccggcttcgccccactactacccaacgaccccagctgcatacttggctttcgtagcgatgcctccgctagtgagctctatgacgaagcgtcgctgcgccagcaggccgtgcttggtttgctcggtgcactcagcggcacgcccagttcgagtgagctcgcaagcgaaccgctgagtgcatgcatccaagcgatccgcttgttgtgcagcgatgctgctgcgctgtattccgcagcccggaacagcgtgcagcaagaagcagcctag

SEQ ID NO: 358391 - DNA, 495 bp, Pseudomonas aeruginosa
atgtatatctaccttaccgattatctgaattacggattttcggttatgagcatctctactatcacacccttcatcgccttggacgccgagcgatccgccctgctcgacgctaaaaagcacgttctctacctaagctttgaacgcatccttagccgcttcgacttcgagctttcagcagtgctgaaccatgtaatcggctcagatattagtatccgcttcgatccgcttagcggcgcgccctacctgaacttcaaagatattccggcctttctgagcacgattcgtccggctaagagcgcttactttgatcgttggaagatgagcatggagctcgattgttctgttctttcattaaaaatggatcgggaaggcctgctttataagccacaccagctaagcatcgagctagtcacgatactgctgccttaccggcctttttattcaaaagatatagatgacatgctggcttttacgcgtgaagtagcagccttctga

SEQ ID NO: 358392 - DNA, 711 bp, Pseudomonas aeruginosa
atgacctccaacaaagcaaagcaaagcttgccgaccggcggcctccacagccgcgacctgtcagtaggctacttccagcatgaggggcagacattctggccactacgcttggtgtgtgagcaactgagcgtcgattggctgcaggaaagcgagaagcttcggtcatcccgcttcaaacccgtggagctgaacgtccgcctgcaagccaatcgaggttcagcgcttcatacctgccttgagcaaggcgatttcattctgtggctgcaaacgctagacgcgagcactttgtcgcctgccgcccaggaaagcctgcagacgctaaaaaggcacacgcaacgaccggaaagaataactgggcagaccacaccagcaaagcttctgtatgccgtagtcgtgtatcgactccagcattttcccgagccgtggtctggactgctggacgtcatagaacgggagtttgctacgagctacggcaccgccttgaaggtggtggatgccgaagacatcccacgcgcattagatgtgctttgcaccatcctctccactttagagaaagtcgaacccacgactgcgtatgcgcgcctagacatgacgatctcacgccttgtcgccaccatcggccaggggcatcggaaaacgggcaaccgtgatattgcggagctaatgagcgccatcgaacaatcgcgcatcgaggaaggccaggatgaatga

SEQ ID NO: 358393 - DNA, 399 bp, Pseudomonas aeruginosa
atgaatgaactaaacgcactgactgacctgctctacggaccaggccagcccatggcgggcagtgagatgtcggacgaagacgccatcgcttatgcacggaaccacttcacgcatggcggttattgcattgtacgcgagtggatctggatcgaccttgatgtcagtgaggaactgcgcgctgcgctagcgaagacgcagcgccaaccggtgttgctgtatgcacacaacgtcgtcttcgatattaaatgccgctgggatgtcggcgacttcgtccgcacctcaccgctacatgctttcgaagaagactttcattttaaaacgctcaacaccacgtacttgcttctcggtaacggtatacgcaagcgcgcaaatgcggaaaccgtagctcggattttctaa

SEQ ID NO: 358394 - DNA, 876 bp, Pseudomonas aeruginosa
atgaaccctccgcaaccacgcctcatcgataacggcaacggccatccgctggccagccattggtaccggcctgccggggagccgcgcggctatctcctgatcgtcccggcgatgggagtggaacagcgcttctacgcgcccttcgccgcctggctggcagagcgcggctacctggccatcaccttcgactacctgggcatggggcaatcgcgcaacggctcgctgcgcggtctcgaggtcgatgtgctgggctgggcccgtcatgactgcagcgccatgctcgccgccgcgctcgccgagagcgggagcaagcccctgtactggatcggccatagcctgggcggccagatcctgcccttcgtcgaagggcgcgagcgtatcgatagggtcttcagcatcgccagcggcagtggctactggaaggaaaacagcccgcggttgcgcaacaaggtctggttgttctggtacctcgttgcgcccctgctgacgccgctgctcggctattttcccgggcgccgcctgggcatggtcggcgacctgccgcgcggggtgatcgaacaatggcgacgctggtgcctgcatccgcagtacgccctcgcggatggcgaggccatccgccgcgccttctccgccgtacgcacgcccatcgtgtcgctgtcgttcaccgacgatgaaatgatgtcccgacgcagcatcgagtcgctgctgggcttctaccgcgaagcgccgaaaaccgcctggcgcatcgctcccgaggaaatcggcgcccgccacatcggccatttcggcttcttccggccgcagttcgccgaatcgctatgggcgggctacctgttgccggagctgggctccggcaacgccctcagccgaggttga

SEQ ID NO: 358395 - DNA, 858 bp, Pseudomonas aeruginosa
atgaaagccaacaaagttaattcagataaccaagacgctatccttgcacataaagacaatctgtcttttatgcgtggcttagaaagcgaatcaatgaaattgatcgttacgtcccccccgtacaatatcgggaagtcatatgaaaagcgttcctcccttgaggattatatacatggccagacgcaagtaatctctgagtgcgtccgcttgcttcacccgcagggatcaatatgctggcaggtcggcaatcatgtccaaaagggcgaagtcttcccgctagatatagttctctatcacctattcaaagaccacggcctaaagctaagaaaccgtatcatctggcactttgaacacggactacattgcaaaaaccgtttatccggaaggcacgaaacaattctgtggtttacaaagggcgatgagtacacattcaacctcgatccaatcagagtaccgtccaaatacccaaataaaaaatactataagggtgcaaaagcagggcaactatccggaaacccattaggcaaaaaccctggtgatatgtggatatttcctaacgtgaaaaacaaccacgtcgagaagacaatccacccttgccagttccctgttgagctggtcgagcgcctggttctctctcttaccaatcctggcgacgcagtgcttgatccctacatgggcgtaggttctaccgcagtggcagccctcaagcatggccggcgaacctatggatgtgatgtcatgcgcgaatacgttgatgtagcatgggaacgagttcatgcccttagggcgggaacactcgaaactagaccgatgcacaaaccggtctacgaccccacgttacccaacggcggacattag

SEQ ID NO: 358396 - DNA, 612 bp, Pseudomonas aeruginosa
atgcgaatcgttcagttctactcccacttaaatggatttgaataccttcagtaccataagcccacaatatgggcagaggttgaaagtattatcgcgggagtagatgctgagcggtgcagaacaaaagcctctgccgaagcaagaaaatcaggaaaaactctttactcgcctgtagacatgaatgccgagttcaaaactctattcgagcagaatgggtggcaagaagaaagagtaacgaactggctatccgaagatacaaatcttttacgccagattgtaaatcttagacctgacgaccagaaaaaaaccatagaggaaggtaatcaggaaccaatcatgacatacaaccaaaccgactttattaaagatcgggtagccgttgaagttcagtttgggaaatattcttttgtcgctcatgatctctttgtaaagcacatgtctttttatatcaacggaaacattgacgttggtatagaaattgttccaatgaaatctatggagcgagatatgtcatctggcgtgccttattatgaaagggatttgttcaatctaatgaggcaagggcgcggtattccagcagtacctatcatcctggtaggcattgcgccctga

SEQ ID NO: 358397 - DNA, 303 bp, Pseudomonas aeruginosa
atgaaactactgttcaccttcgatgatcgtgatgatgccgaagaggctgctgagaagctgactggcgaaaagcgtctggctagtgagcgtgattcaacagtcacaatctataacctgtttggcatccccagttggggaaacttccaccggctggggatgtacaggttaggtgaacttaaaagcctgttggctcgccgtagcgcctggcaacagatagaccaggctaaccatgcagagattattgccatgctagaaacggtggcaaaaaactacggtattgaggttccaagtcactggtactga

SEQ ID NO: 358398 - DNA, 924 bp, Pseudomonas aeruginosa
atgagcagcgttaagacatggcgacgcgccgcactggccgcctacgttaccgcaggcttcgccctgcccctggccggctatgccctggcaaccacacaggccaacgtcaacgcagtggcggctgcacaacaacgcctcagtgatagcgaatggcgcgaccacttgaacaacgaccaccaggtcaacgcggccagctctgccggcgagctgctgcccttagattcccgcccgtattccccggtcattgattgggccgccctgtccgtggacgtcatgccgtccgcggtgatggtgtccacgctggatagtgcccgaggcgacggccgcagcaatcgcgcctggcttatccctggcgtacaaaccaaccaggcgaccgcctggcttacccggtaccgggcttgggacgccgagtgggcgaagctagaccaggagcgcgagtgggtcacgatgggagcgggcttcctgatcggtgatggccgccaagtggcaaccgtcgggcatgttctcagtggagccgaggccgtgcgcgtgaagctcgcagacggtgagtggcgagccgccgaggtggccgccttggatttcgccctggacgtggccgtgttgcgcatcgagggcgcaccaggtcagccggtcacaatcgcccctgcactgcctcggcagggccatgcggtggcaacgatcggtgctccccatggttggggtttctcgctgtcggccgggctggtgagccgctacggagagacggccagcatgtttctgaatcatcccatgatccagattgccgggccgatcatcggaggcaattccggcggactggttttcaacgccaggggggaagccgtgggcatggtcagccacggcaaagatacgtttaaccaggccgtcccgattggtcgcgtcctggacgtagccaagcgcatttaa

SEQ ID NO: 358399 - DNA, 222 bp, Pseudomonas aeruginosa
atgactgacagcaattttaccggcggccctcgccgcgacctaacgaaatatcgaattaccctggcggcttctctagctgcccttgtcctagccggctggatgatccaggccgcctacagccaacacgtccaggtcttgaagattggcgaccagaccggagagcgccttcaaatgcgcggctacatcggccaccaggagggcgcacagcatgagcagcgttaa

SEQ ID NO: 358400 - DNA, 1992 bp, Pseudomonas aeruginosa
ttggcaatttttcacctaagcgttaagacaatcagccgcagcgctggccgttcggccacggcggcgattgcctatcgctcaggcgaaaaagtcattgatgcgcggacgggtcttattcatgactacacccgccgaaatggtgttgagcacaccgaaattttcctgccggaaaatgcgcccgcatgggcctcgcagcgtgagcagctttggaacgcggcagagcttgccgagaagcgcaagaactcgaccgttgcccgcgaatttgaagtggcgttgccggcggagctgaaccgcgagcagcgcctagagctggtgcgtgagttttcccgcgatcttgtgcaacgtcacggcatggccgttgatgttgcaatccatgagccgggcaaagaaggcgaccaccgaaaccaccacgcgcacatcctttgcagcacccgccgactgacgccggaaggcttcaaagacaagacccgcgaactggacgaccagaaaagcggagaggtcagccactggcgggaacgctgggcggaaatgtcgaaccggcatcttgagaatgccggccgccaggagcgaatcgaccaccgcagcttagaagcacaaagggccgccgccatcgagcgaggcgacaccgagcaggccgcaaaacttgagcgcctgccgaccgtgcatcttggcccgaatgtggtgcagatggagcagcgcggaatcagaaccgagcgcggcgaccaggggcgcgatatagcccagcgcaacgcgcaaatcatcaacttggccgaggtgcgtcagcgcatcgaggcagcgagggccgcttatgagcgaaacaacggacatggacgagatagaacggctgatcgggtcactggacgagacgctacccgagcaggtggagaacagcccggacgagtcgccggtaagtccgacattggccgccctggaaacgtcccgccggccttcgcccgaggtcgcttgcggaacctgtccgaactcggtgtggttcgcttccccgaacgaggtgaagtgctattgccgcgtgatgttcctcgtaacgtggagcacgagcgagcagaacctgataacgcattgcgacgggctgacaatgggctaaccggcgagaagccgaacacccgcgagctgatccagcgcaagctaaccggcgacttgttgcgccgtgctgtagcagaccgcgaacccatcaaagcggccaacgatccaagcccggaagtcatcaagcgtgaatggaaagatgagaaggcgcggcaattcactctgatagtaaatcgagccaaggttctgcacgcccgcacagcgggccagatggaacgccaggaagggaagttgcaggccatcgaccagcaacgtccagccgagccgagcgggcttcttgcgagcttcaagaaggccgcacacgatcaggcgatttccgcctggcgtggcgtccgcgcaggcttagagcgtcgatggacacagctcaataaccgcctaaatctgattggcgattacatgcgtaaggctggcccctatgagcagcccactcggggcgaactgctggccgagaagaaagccgcccaggctcgcccggaactggccaccaccttccagcaggttatcgagaaagagaaggctgcgcgtatcgccgcgcagcgggcgaagatcgaccaacgccgtcacggcaaaaaccaggagcgagacatgaagcaggagagcatcgaggagctgaaacagcgcatcgacacaaaccgcgagaaggccgaaaaggccgagcgtaacgagctggacaaggcgggccgcttggcgagcctccatgagcagaacgcggaacagaagtacgacgaaaaccagattgccaagacacaggcagacaccttggcgaaggagctgaacgccggcaccgacaagggcgaccagacgaaagaagcaaggaagcgcgagctgttgaaggcctaccaggagaaggcggcccgcgaccgcgacaacgatagaggccgaggccgctaa

SEQ ID NO: 358401 - DNA, 312 bp, Pseudomonas aeruginosa
atggcaaagcgtactaaggacaaattggctgaactgcttgaaaaggaggcacagctaaaggcacagattcaggcgctgaaacaacgagagagcgaagcagagcgcaagaaagatgctcgccgcaaaatccttattggcggtgcagtgctcgccaaggttaagcgcggtgagtggcatatgaatcagcttcaagaccttctcaattctgagctgaaagcagaccgcgaccgcgagctgtttgatctaccggctttgaaccaagaaaaggccagcgaagcgcccagcgatacgggtggcggcaaccagccgtaa

SEQ ID NO: 358402 - DNA, 1668 bp, Pseudomonas aeruginosa
atggcaggtgcttttgtgttcctcccatttctgccccagtggctcatgatcgccgccacgcttgccggcacttttgctacctaccatttcgccggcccggtgtttggctggttggctgcgcgggcgggtgcaaatacgccgaccggccagcgccttctaaccattggcgggactcttgaaaacctccgcgccggcctgggtggtgcgcccgcttcggcttctgctggtgttgtcgcgcaaatggctgcaccggttgctacccacggttctgcccgttggggcacccctgcggaaatgcgcgagaatggccatctgctgcccgttggtcagccggcaggcttcgccttggctcgggtgctcgatgcgcctgccggcgtcgatcagcggttccgccatgtgggccatgtggtgactgttgcgccgactggatcgggcaagggtatcggtgcagtgatcccccatcttctggagtaccggggttcgtcccttgtcctggacgtgaagggcgaaaacgcggccgtgactgctcgcgctcgccgtgcgctcggccattccgtctatgtggttgatcccttcggcgtgaccaagggcgaaacgcacgctttcaacctcctggatcgcctggacgtggccgacccggagtgcgtaagcgaatcggctgtgttggctgactgcctggtgatcgttgacgccaagggcggcggtgagcatttcgaggaatcggccaagaccctgctgcaaggtttgatgctgcatgtcgctggcctggacgatccagagcgccgcaacctgggtgagctgcgccggctgctgacggccgacgaaatgacgttcctggaaatgatggcggacatggcctccgatgaaagcgtggcgttcggcattccctccagggcagcaaataccatcatgggcatggccgacaaagagcgtggttctgtgttgtccaccgctcgccgtcataccgccttcctggatgacccacggatcgccgccaccctctcacgttcggacttcgatctgtcgaacatcaaagacgagctgatgaccgtctacctggttctgccggccaacaagatcggcccgaatgctcgcttcgtgcgcggcttcatcggctcggtgattgcggccatcacgtcatctgccaagcagccggaacatcgtgtcgcgttcctgctcgatgagttcggccagctcgggtacatgaaggccatcgaggacgctgtaagcctgctgcgcggctatggcctgtcgttctgggtcttcatccaggatctttcgcagctcaagggcgtgtatccgaagtggcagaccttcctggccaactcggccaagtcgttctatggcaccgatgactacgacacggcgaagtacatcagcgattcactgggtcaggccaccatcgaatacgagacacaaaacgagggcaagaacagcggtagcgggatttctggcggtggcggctcgatgaacaggggcaagagtgcaggcagctcgcaacagttcaccggccgtcacctgctcacgcctgacgaggtgatgcgcctcggcccggaacgtccgattgtcctggtcaaaggtgaatacccgtatcagctcgccaggctcaactacctggtggatgctgagtatgtgggcatggccgaccccaacccgtaccacagctaa

SEQ ID NO: 358403 - DNA, 369 bp, Pseudomonas aeruginosa
atgatgatggtcatcggggtactgttggcgactgttgccggcgtctggttcggtcgtcgcctcgggcctgccctggtggctgccgccatggtcatggctgcgccgctctggctggtcggggggttcgccctcgatctgctgcgtaagctgcccgccagcctccggcgggcttggtttgccctgctccgggcgctgggtttcctggctgtgctaccgctgatcccgtttgtgttcgtgtgggcgttcctggttgaactgttccggccaaagcatcagccgccggccccgatccagtcagccacacagcggacggccgaagtcatcgacctggccgcctggcgtcggcggaagggaaaagcaaaagagtag

SEQ ID NO: 358404 - DNA, 939 bp, Pseudomonas aeruginosa
atgtccgtcgccatccccgcagacgtgcgcgagcgcgtcattcaggccgcccaggagctgtacgagcagaacgggcgcgagacgatgcccaccgttgacgccgtgcgccgtctggcccgtgtcgatatgaactcagccagtgccgtgatgcgagaatggcgccgctcgcagaccgcccaggccgcgccggttgctgtcaccgtccccgaggctgtcacccaggcgcacagcgctgcgcttgcctcgctctggcagaccgcccaggagctggccaacgaatcgttgcgtgccgcccaggctgcatgggaaaccgagcgggccgaagccgaccacgaccgccaggagctggccgacgcttacgaacggcaggccgccgagctggaggaagtgcgcgccgccgctgcacgatctgccgagctgcaccaggagcaacaggacgcacgcgcccaggaactggccgccctgcgcgccgagctggccaccgccaccacccgcgccgagcgtgccgaggcccgcgcccaggagatcgagcagcgcgccgccgacctgcgcgccgcactcgaccatgcccaccaggagcaggagcgcagccgcgccgagctggccaccgccaccacccgcgccgagcgtgccgaggcagccacccaggccgcagagcaacgcgccgccgcactggctgctgagctggccgcagcgaatgcccgcagcgatgaacgcgcccaggaagccgagcagcgcatgactgcccagcgcatcgaggctgacgccgtacgcaccgccctgaccaccgcccaggccagcgccgccgaggcccgcgaggaagccgcccggctggccggccagctccaggcgcatcaggaacaggccgccgcgttgctggcccgcatcaacccggtcgaaggcaaggccgcgagcaccaggaagaaaggcggggagtga

SEQ ID NO: 358405 - DNA, 1065 bp, Pseudomonas aeruginosa
atgaccaaacgcaccaacggcccgcagcccattggcagtgttatcggggatgacctgatagaccgggttgagaagatgcgcgagcgcagcaaccagcgccgcatcgaggacgaggcccgccccggtgagtcatgggcagatgctgccgccaggttgcgcaagcagcaggccgagccaacccgctcgaatatccgcaagccgccggccgccgacagccagccggattttttcgtgccgacactctatgacgtgggtgcccgcgacagccgcagcatcatggacgtggccgtgttccgcctgtccaagcgtgacaaacgagccggcgaggtcatccactacgagctgacagacggctatgttgaagtgaaagctggcccggatggcatggccagcgtgtgggattacgacctggtactgatgatggtttcgcacatgaccgaggccatgaaccgctatcgggaagggaagggcgagaagcctggccgcgtctatcgcccacacataagcgacattctcaagttctgccgccgtggcgatggaggccgccaggccgaagaagtggaaggggcgctagaccgactcaagggcacaaccatcaagaacgtgcgcgagcggccatcccctaacggacagcgcatcatgcgcgaggttgaagcggaagggctgatcagcagttacaaagtcgtgtcccgcacggacaacggcaagattgcggccgtcgagattgaggctccgaggtggttgcaccaggaaatcaccgaaggcaagcgccccgaggttctgacggtacaccccgattacttcttgatcgaacctggcattggccgattcatctaccggcaagcccgccgagcggccggcaagaatcaagccgtgtgggcgtttcagaccctctacgagcgcagcggcagcgctgggacgctcaaaaaatttaccttcacgctgcgcaagctgatcgaggccaacgacctgcccgaatatcacctggaggaagatcagggccagaatggcccgctcctagtaatgacgaatcgcacctggctgacaaaagatggcggttcctaa

SEQ ID NO: 358406 - DNA, 216 bp, Pseudomonas aeruginosa
atgagcaaaaccggaactttgagtgcaggacgcccgagcgcgaccaggaacaaagccgccaccctcgctagcctggccgatgaggccagcctgaaacgggtcaatttccagctttccgccggcctgcacaccaagttgaaggtctatgccgcgagccacggcaagacaattaccgagattctgactgattacgtcgagcaactaccggaggcgtag

SEQ ID NO: 358407 - DNA, 267 bp, Pseudomonas aeruginosa
atgaccagccaccacgaagaaccggctttcctggacgacgaaggcccgtccaacgacctgcctgcgttcatctccaccactaacgcccgcgagctgtacggactgcgcgagggcgagacagtgtccgaagccatcacccgccaccagggcgaagggtcagaagttagccggctgacgcctgacgagctggccgagctgcggcgagacatggccgagtcatcggcctggatgcgtgccgagttggcccggcgaaatgagcgcaaataa

SEQ ID NO: 358408 - DNA, 684 bp, Pseudomonas aeruginosa
ttgagcacgaaatcactgatggatgccatcggccgagagaaggcacagacgctgatggacgaggctgtattccaggccattgaggaaaaccgagcacacggcctcggcagctccaagctgatgcttggctatgcccgagtaagcacggatgaccaggacctaaccaaccaacgcgccgagctgcgcaccgctggctgtatcaagatttttgccgagaagatcaccggcacccggcgcgaccggccggagctggcccgtctgctcgatcacctgcgccccggtgacgttgtgaccgtgaccaggctcgaccgtctggccaggagcacccgcgacctactggacattgccgaacgcatccaggcagccggagctggcctgcgcagcctggccgagccgtgggccgacaccacgacccctgccggccgcatggtgctgaccgtgttcgccggcattgccgagttcgagcgatccctaatcatcgaccgcaccaggagcggccgagaagcggccaaggcgcgaggcgtcaagttcggcccacgcccgacccttaccccggcgcagatcgagcacgcacgcgaactgatcgacttggaaggtcgccccgtcacggaggtggcagacctgttaggtgttcaccgttcgaccctataccgcgcacttgagaagaaggaggcgacccaatga

SEQ ID NO: 358409 - DNA, 567 bp, Pseudomonas aeruginosa; identical to SEQ ID NO: 329820

SEQ ID NO: 358410 - DNA, 252 bp, Pseudomonas aeruginosa; identical to SEQ ID NO: 149248

SEQ ID NO: 358411 - DNA, 396 bp, Pseudomonas aeruginosa; identical to SEQ ID NO: 149247

SEQ ID NO: 358412 - DNA, 537 bp, Pseudomonas aeruginosa; identical to SEQ ID NO: 149246

SEQ ID NO: 358413 - DNA, 882 bp, Pseudomonas aeruginosa
gtgattcggctaatggctattggaatatgggctgtactttgtctcgcagcagttcccgctatggctgacagcaagccttttgtctgcgttaacgaaaaggaccatctaccccctctggacccgcaggccgacgcttggtatcgcgaagcggcgaccctggccaagcccgataccttgcgtccgtggcctcgtatcgtcgggttgtacagcaaggcggccgagcgcggccactggaaggccatgcacaacctggcgaatctttatcgtacagggtggcccggaggagtagaaaaagatacgcagaaggcattggatctctatcaaaagatgatagatctggatgtgcctcaggggttctatgatatgggagcaatgattggaaatcgcgccggggttaaaaaccctgcaactgatggacttacttttcttgataaggctgctagcctaggaaatccgccggcactaaccgagctaggtaagctctatatatatgtggccaaaaaaaaggatttggggttggcgtatactcactgtgctgctagccagggccatgcgccggctagttatgagttgggggcgtattacaagatagtagagcataattttccaaaagcattgggttattatcaggcgtcagtctctcagggcggaaagagtgcggctttatttatctccggtgtttttgataaagccagtcctgatgtcgatagaatgtggtacgcccccgatgagaagctgcacaaactatatgatggtatttacgatcaacttgccgctgatcctgatttgcgttttcccaatttgataaaggaccatcctctgcctcctcacccgacccaaggctacgacgtggaccgcccagactggaagccggagcggtaa

SEQ ID NO: 358414 - DNA, 471 bp, Pseudomonas aeruginosa
atgcccgtcttcgaagtggtgagcggaggtgaccgccgcagcctgatgaagcgcttcgagcgcaagagcaagcagcaggctatcagcgaactggtggacttccatctgctgaactgcgcccggatcgagaaactggagcgcgccctacagacggttgtcaacgctgccgaccatggatcgtggccgactaccgttatgcacggcatcgaggtggcgcgcgccatgctcgccgccgaaccgaccagttcggcatccccgtcgtgcaaatggaccgaaagcagcggcatctgggaaacaggttgcggccagacctggggcttcgttgaggatggaccggcagagaacggcgcgctgttctgtcaccactgcggcggacgcctggtcctcatcaagagcgacgaccacgaagatgacggtgagccgtgcccggactgcatggaaaacgcgccagcgtctggatgtgaagcatga

SEQ ID NO: 358415 - DNA, 861 bp, Pseudomonas aeruginosa
gtggtttttttactgttggcggccgtcggagcacgcggaaagagaaccgtcagcggccgaaaaacagcggactttccctacgccagctcccgtgcgcctacaccggggcggagaacccgatggatatcggcggcagcgacgggctcttggtggacggcgcaccgccgtgcgggcgcctcggggtcgtctgctgctatggtgcgcacaggcacgtcgccatcctctctcccggcgaatggaatcgagcatgacgctttccctggatctgttgttgagcctgtgcacggccctggccatcggcctcctgatcggcgccgagcgcggctggcaggagcgcgaccacgaagatgcgcggcagatcgccggaatccgcaccttcagcctggccggcctgctcggcggcttcgccaccctgctcgcgggcgaactgggcagcgcagtctgggtagccttgctgctggccctcgcggcgctggccgtggccggctacgtgagcgatgtcaggcgtggcggcgaccagggcatgaccaccgagatcgccctgctgatgaccttcctcctcggcagcctcgccctcaccgaacagcgcctgctggctgccgccggcggcatcgtgctgaccctgctgctgagcctcaaggacaagctccacgccctgctgaagcgcctgaccgccgaggagctatcgggcaccctcaagctgctgttcatttccgtggtcctgctgccggtgctgcccaaccagggctatggtccctgggcgttcttcaatccctacctgacctggtggatggtggtgctgatcgccgccctcggtttctccgtaagcgttcattccaagacatcctgccatcccgctga

SEQ ID NO: 358416 - DNA, 1509 bp, Pseudomonas aeruginosa
gtgatcagtatggaaatgatgggcaaaattcggcggatgtatttccgcgacaagctgtcgttgcatgagatagccaagcgcaccggattggcgcgcaacaccattcgcaagtgggtcagagcgccggaagccaagcagccggtgtacctgcgccgggccattttcaacaagctgagtccgtttcacggcacgctggagcaggcgcttaaagccgactcgctgcgtcccaagcaacaacggcgcagtgccaaggcgctgctggcacaaatcaaagccgagggttatgacggtggctacagccagctcaccgcgtttgtccgtgcctggcgcggggatcagggcaaggcagcgcacgcctttgtgccgttgacctttgcccttggcgaggcgtttcagtttgactggagcgaggaaggcttgctgatcggcggcatttaccggcgcatgcaggtgtcgcacctgaagctgtgcgcgagccgtgccttctggctggtggcttatccgagccaaggtcacgagatgctgttcgacgcgcatacgcgctcgttcagcgccttaggcggcgtgccacgccgaggcatttacgacaacatgaagacggccgtcgacaaggtcaacaagggcaaaggccgcacggtgaatgcgcgcttcgcggtgatgtgcgcgcactacctgttcgatccggatttctgcaacgttgcctcaggttgggaaaagggcatcgtcgaaaagaacgtgcaggacagtcgcaggcgtatctggctggacgcccaagaccgtcaattccactccttcgaggaactcaatgcctggctcgggcagcgctgccgcgcactctggagcgagcttccgcacccgcaatacagcgggctgagcgtggctgaggtgttggagttggagcgggccgaaatgatgcccatgcccgcgcccttcgacggttacgtcgagcgtgcggcgcgggtttccagcacctgcctggtcagcatgggacgaaaccgctactcggtaccctgtgagtacgccggcaagtggctcagttgccgcctgtatccgacgcggatcgaggtggtagctgatgacgtattgattgccagccacgcgcgcttgctggatcgcgaccaggtcaactatgactggcagcactacatcccgctgatcgagcgcaagccgggcgcactgcgcaatggcgctccttttgcggatctaccaacaccactgcggcaactcaaacacggcctgacacgtcatgccggcggtgaccggatcatggcgcaagtcctggctgccgtacccgtcgccggactcgatgccgtattggtggccgttgaactggtactcgaagccggcaccctgagcgccgaacacgtcttgaatgtcgtggcgcggctgacagcgaccgagccaccgccctccgtcgagactcacttgcagctcaaggaagcgcctgtcgcgaacacggcgcgctacgaccgtttacgcggcagcgtcgaggagatccgtcatgcgtga

SEQ ID NO: 358417 - DNA, 804 bp, Pseudomonas aeruginosa
atgcgtgatctcatggcagaactcaaagagctgcgcctgcacggcatggccaatgcttgggcggacttgacggcgcagggtgagtcggccctagcctcctcgaaatggttgctcgaacacctgctgcaacaggagcatgcggatcgcgccatgcgctcggtgagccatcaaatgaacatggccaagctgcccatgcaccgtgacctggctggcttcgacttcagcgcctccagcgccgacgcacggctgatcagggaactggccagcctggccttcaccgacacggcacagaacgtggtactcatcggcgggccgggcaccggcaagacccacctggccaccgcgctagccgtgtccggcatcactctgcacggcaagcgcgtgcgcttctactccacggttgacctggtcaatctgctggagcgcgagaagcatgacggtaaagccgggcgcatcgcccaagcactgctgcgcatggacttggtcatcctcgatgagctgggttacttgccattcagtcaggctggcggtgctctgctttttcacctgctgtccaagctgtacgagcacaccagcgtcgtgatcacgaccaacctgagcttcgcagaatggtcgcgcgtgctcggcgacgccaagatgaccaccgccctgctggatcggcttacgcaccactgccacatcgtcgaaacgggcaacgagtcctaccgcctgcaacacagcagcttggcggctcaggcaaagatcaaatcacgggagcgaaaacgcaaggacgatcagaagccggtggacgacgaaccgttttga

SEQ ID NO: 358418 - DNA, 996 bp, Pseudomonas aeruginosa
atggcgacagtaattagagatccgatggatttgctgacctcgatagatatggttaacaccggcggatcagcatacaaggacagtgacaaacgcgttctcgcaagctggccagcggacgcgaacgccccccaactttcaaccggcggcgccggccacactactttcgcccgctggtacagaccagcagagagcgatatttatgagttttcaccgtccggagtgatgccagatcaccgagcgcttattccaattaggccgtgtaattctgagtttcgtatcggtggcaggagagtttttaacaaatatatgtctcccggagacgtcgctttaagcggccctatctacgccacacgcaattgtattcacaagggagagctcgatatgtttcttatcagcttacctcccacattgctttctgaggcggcagagacactagatggaaggggcttgtcaactgacatcattctatttgacgcccataccacacaggatgccatttccaacaaccttctcatggcatgtttttttgcaactcaagactactcccctgcaaactcgcttcaactagagagtcttggcttggctttagctatacatcttgttggacaatacaggaatcgtgagcgcaaaagctctttcccaaagcagtctccgctagcaacttggcgacttaatcgtgtcacagactacatcgagtcaaatctcaacaagagcttatgcttaagcgaactcagtgccattgcaggactcagtcgcatgcactttgcggcgcaatttaagattgcgactggcctctcgccccactactacgtcatgaagcggcgagttattgccgctcaatccctactattatcaggaactctcactgtccaacagattgctatcgcactaggcttcagtagcgcctcccatcttataaggcatttccggcagatcattggcgttcctcctggccgctggcgagaagaaatggctcgaacaaagccacgctgctga

SEQ ID NO: 358419 - DNA, 987 bp, Pseudomonas aeruginosa
atgaagacctactcaaccctgaatggtcaagctcaatgggcacccgaacagcaggagtcttcggagaaatcatacatacccacacccatggatgcgctcccctcctccgagaccatctggcgccggcctccccctccccataaactccccagcggcaatgacgcgctcatccgactctcctgctggaaaaatttaagctctgatccaacgatcgaagtcctctcggacacagatgatgactttcacgtcgttacactggtgacacgcagaacacaagcagagttgtttatagacgaaaacagcgcctggaaaggaggtatgcctgggcaattattagtaacagggccaaaaagaggcgcttggcgcaaagtaataaaaccgccctatgagcatctgagagtgtatcttcctcagcagcttatctcagaatgttttgaagcagttacaggacatgaagctccaccagtaatttctctgtgcaatgccacttcactcagtgatcatggcgtttcacacatcctagcagccctattacatgcccaaaatcgacacggcggcagcaatccatgcttaatcgaaactctcggcttggcattgggttcacgcctagtagcgtgcctacataaccaaagccggcctaacgacaatgaaacaaaatttagatccgaaaaactcagacttcaaaaaacgctggaatacattaatgaaaacctaaacaaccacataacccttactcaactgagcagtatatttggtgcaagccgatgccgctttacagtcacatttaagcagcacacaggctacacaccacatgcttacgttgtgcaacaaaaaattctgcgcgccaaggaaatccttaagaacaccaaaaggccaattcttgaaatagctttagacctcggattcaatagccaacctcatttcacgagttctttccgcaaagaagtcggtcttacgcctgcacgctggagacttgaaaacttatga

SEQ ID NO: 358420 - DNA, 1539 bp, Pseudomonas aeruginosa
ttgcaactggtcgaacagaatctttctttgctcagtcaatctctgcgcggagtggagcgcgagtgcctgcgcgtgaccggtggtggtcatctggcccagactccgcaccccgcggcattgggttctgcgctgaccaacgaacagatcaccaccgactattccgagtcgctgctagagttcatcaccccggccctggccgacccggcaaaagtgctagaaagcctcgagcaggtccatcgttttgtctacaccaaactcgatggcgagtacctgtggagcccatcgatgccctgcatactgccagctgaggaggacatcccgatcgcagagtacggcacctcgaacgtcggcaagttcaagcatgtctaccgcaagggactggccttgcgctacggtcgcactatgcagtgcattgctggcatccattacaacttctccctggccgaggcgctgtggccgctgctgcgcgaaaccgagagtggtgagcagagtgatcgcgactaccagtctgcggcttacttcgcactaatccgcaacttccgccggtacagctggttgctgatgtatctattcggcgcctccccggccctagaaaaaggtttcctgcgtgggcgagcgcaccagctcgaggagctcgatgctgagacgctctacctgccctatgccaccagcctgcgcatgagtgacctcggttatcagagtaatgcccaagctagactagcccccagccttaacagtctcgacagctacatcgaagggatacgaaaggcactcgatacggtttatccattgtacgaacagaaggggacgaccaagcggggtgagtggttgcagctgaacagcaatgttttgcagatcgaaaacgaatactattcgagcatccgccccaagcgtgtcgcttacgtcggcgagcgaccgatcgaggcactgacatcccgtggcgtgcagtacgtcgaagtgcgctgtctggacatcaacccgttcatgccattgggcatcgacctcaccgaatcgcgcttcctcgacgcgttcctgctgttttgcgccctggaagacagcccgcagtttgacagcggtgagtgcgaccagtacgacagcaacttccttgcagtggccaaggagggacgccgtccgggtttggagctgtgtcttgatggtcagtcgatcggcctgaaggcctgggcaagcgagctgattaggcatataggtcaattggctgttttgctcgaccgcgctaggggcggtgaggaacatatgcatgcgctggccgcgcaacaggcgaaggtcgatgatgcttcccttaccccatcggcccaggtgctggcgagcatgagcgagcacaatgagagcttcgtccagttctccctgcgccagagcaggctgcacgccaaggccttccgcgaaatgccgcttgccgccgagcagcaacaagtctttgagaatctggcaagcgaatctataacggagcaagtgcgtctagaaaccttagaccaagaagacttccatcaattcatggatgcctacctagcccggtcttag

SEQ ID NO: 358421 - DNA, 774 bp, Pseudomonas aeruginosa
atgtcattgatagtcatagtccttgtcactttgatggcaggtattggtagcgtatgggtggctgatcagttggtcgtgcgcgcccaggtgattcgccgcaacgatggccatatgcagcaggggttgctgagcctagctgcaggcgccttactggcgacagcgctcctgcatttgttgcccgaagccttcgaaagcggtgctgaatcccacgatctgttcctgacgttgttggtgggattggtgttcttcttcttcttgagcaaggcccagctttggcatcacggtcatgagcactcgcaccacgaacaagatcatcacaataccgggtggacgctattggtcggcgatggtatccattgttttggcgatggcgtgctgatcgcttcagctttcgttgcagatatgcgcctgggttttatcgccgccgtttccgtgctggtgcatgaggttccccatcacatgggggatcttgtagtccttaggcagggcagccctcgaagcgcggcagtgcgcaaagtctccatagcgggtgccatgaccgctataggcggtattgccggatatacgttgctggaccagttatgggattggcaacctatgcttctcacgttggcgggtagcagcttcatttacgtggctctgtcggacttgattcctcagctgcgccagcgccgcactaccggagatacctcgcttcaggtcatatggctgttgttaggtattggcttggtggcattggtcagcgagttttctcacgtggggcatgcacattga

SEQ ID NO: 358422 - DNA, 642 bp, Pseudomonas aeruginosa
atgaatacatccaagccaatcagaatcgccctggtcgatgatcacgtccttgtgcgtgacggcgtcaaggcgctgctcggcgccattgcgcattttgacgtaatcggtcaggccgagtcgggggagcaggcactcgagctggtggctagcaccgagctggacattctgctggtcgacgtgggcctgcagggcatgaacgggctggagctcacccagcgacttcgcagcctatatccagacatcaggattctcatgttgagcatgtacgaccaccaggagtatgtgcgcacttccatcagcgcaggcgcatcgggttatgtgctcaagaacgcgccgtctgccgaactggtcgcggccattgagaccatcgccgcgggtgggcgcttctatagctctgagatcactcgcaagctggttggcggcagccgtgacgaaaacgacctaacgccccgggagctgcaggtgctggtaatgatcgcgaaaggacgcaataacaaggaaatggcacgtgagctggacatcagtgtgcgcacggtcgagacctaccgcttgagcatccgccgcaagctcaacatcgacacgccggtggcgctcatgaagtatgcccttgagcaaggtttagtttcattaggtaaagcttga

SEQ ID NO: 358423 - DNA, 1347 bp, Pseudomonas aeruginosa
atgcaactcaagcacaagatcgtcaccctcagtgtgctgccgctgatcctctcagtgctgttcatctgcgtcctggtgttcgcccaaagtcgcaagctggaagaggaacaggcgcgtcttgtggaaagcagcatcatgacggcgaagaaggcagagctgagaaactacctaagcctggcgatgagcctgatcgcaccgctgtacgacggtggcgtggatgacgaggcgacgcgcaatcgcgccctagccatcttgtcccaggccaatttcggccgcgacgggtacttcttcgtctatgaccagcacggcaagaacctaatgcatccccgtcaggctgagctggtcggcaaggaactgatcacgatgaccgacaagaacggcctaccggtcataaaggcgctgctcaatagcgccagggaaggggacggctatcagttgtacgactggcagaaaccatccaccggacagatcaccggtaagctggcatacgtggtgatgctcgatcgctggggttggatgctcggtacgggtatctacattgacgatgtagaggtggcgaccctcaaatcacgccaggaagtggcctcaggtgtgctgaccacggtgttggcgatcgcctcgttctcgctggtcgcggtactggtgatcttcgccggcggtctgatgcttaatgtcagcgagcatcgcttggctgaccgcaagctgaccttgctaaaccagcgcatcgtcaatctgcaggaagaagagcgctcgcgagtatcgcgggagctgcacgacggcatcagtcaggagctggtgtcgataaaattccagtacgagctggcggccatggagttggcccgcggtggagaaggggggttggaaaacctgcgcaagggcactacgcggctgggggccgccgtcggcgagatacgccggatctcccatgatctgcggccctcattgctggatactttaggcctgtcggcggctatcgaccaacaagtacgggaattcgagcaacgcacgtcaatccgcacccagtacgagtgcggcatggcagctaccgacgtggggccggaggtctcactgacgctattccgtatcatccaagaagccttggcgaacgtggagcgtcacgcaaaggcgacgacggctatcgtctcgattaccgcgcagcaaggcatgatcgtactgcgggtcgaagacaacggcgtagggttcgataccaatgccgcggacgacagccacggcatcggcctgcgcaacatacgcgagcgcgccgatcatcacctgggcagcgtcaccctcgcgtcggtccacgggcgcaccgaactgcaagtgcagataccgatcgtcaacgcatga

SEQ ID NO: 358424 - DNA, 204 bp, Pseudomonas aeruginosa
atgttcaatgacttgagcaagatgggtaaatacctcggtcaagctgcgcggatgctggttggcatgccggactacgatgcctacgtggagcacatgcagggaaagcatccggataagccggtgatgtcctacgaggtgttcttccgtgaacggcaagaagcgcgctacggcggaggcagcggacgccccgttcgttgctgctga

SEQ ID NO: 358425 - DNA, 2058 bp, Pseudomonas aeruginosa
atgaccacactggctacccgaattgcctggttcgccgtcgccttgctgggtgcatttgctctaggcactctggcattgcgcaggggcgaagccatcagcgccctctggattgtgactgcagccgttgctgtctatctgatcgcctaccgttactatagcctgttcatcgccaacaaagtgatgcagctggacgccacgcgcgccacgcccgccgtgctcaacaacgacggcctggactacatccctaccaacaagcacatcctcttcggccaccacttcgccgccatcgccggtgcaggtccactcgtgggcccggtgcttgccgcacagatgggctacctccctggcacgctctggctgatcgccggcgtggtgctagccggtgcggtacaggacttcatggtcctgttcatctccacccgccgcaacggtcgctctctgggcgagttggtgcgcgaggaaatgggcccaatcccgggcaccatcgcattgttcggtgccttcctgatcatgatcatcatccttgcggtgctctcgctgatcgtggtcaaggccttggcggaaagcccctggggcatgttcacggtgatggccacgttgccgattgcggtattcatgggcatctacatgcgttatatccgcccgggccacatcggcgagatctcggtgattggtgtggtgctgttgctcgcctccatctgggtcggcggaattgtttccgccgatcccttcttggggccggcattcaccttcaccggcgtgcagatcacttggatgctgatcggttacggcttcgttgcagccgtgctaccggtgtggctgatcctggcgccacgcgactacctgtcaaccttcctcaaaatcggcaccatcgtcgctttggctatcggcatcctgttcatcgctcccgatctgaagatgccggccgtcactcacttcatcgatggcacgggcccggtatggaagggcgcgctgttcccgttcctattcatcactgtcgcctgcggcgcggtgtcaggcttccatgcgctgatcagttctggaaccacgccgaagctgctggccaatgaaggccacgcgcgctacatcggctatggcgcgatgcttatggagtccttcgtggctatcatggccattgtcgccgcttcggtgatcgagccaggcgtttacttcgccatgaacagcccggcggccctggtcggcgcggacgttaccagtgtcgcgactaccgtcagcagctggggcttcaccatcacccctgaagtgctgcagcagactgccaaggatattggcgaacacaccatcctggcccgcgccggtggcgcaccgaccttggcagtaggtatcgcgcagatcctccacaaggcactgccgggcgagaataccatggcattttggtatcacttcgccattctgttcgaggcactgttcatcctcacagcggtcgatgccggtacccgagctgggcgcttcatgctgcaggatctattgggcaacttcgtgccgtcattgaagaagaccgactcctggaccgctaacctaactgctaccgctggttgcgtggccatgtggggctggctgctgtaccaaggcgtgatcgacccgctgggcggtatcaataccctgtggccgctcttcggcatctccaaccagatgctggcgggcatcgcgctgatgctcggatgcgtagtgctgatccgcatgaaacgccagcgctatgtctgggttaccttggtgccggcggtatggctgctgatctgcaccaccacggccgggctgatcaagctgctcgacccgaatcctgcgatgggcttcctggccctggccaacaagtacagcaccgctgccgctgccggccaagtgctggccccagcgaaggatttggcgcagatgcagcacgtggtgttcaacgcttacaccaatgcgactcttaccgtgctgttcctgctggtggttctgagcatcctctggttcgcaatcaaggttgcccgtcgcgcttggatcatgcccgaacgcactgacaaggagtcgccgttccagcccttgcccgatgcctga

SEQ ID NO: 358426 - DNA, 903 bp, Pseudomonas aeruginosa
atgcttaatcgcctagaagccctgaaaatcttctgtgtcgtcgcagaggtcttgcagttccgtgatgcggcaaatcgacttaatctatcccctcaagtggtcacgcgtacaatcggagccttggagagagagtttggagaggtacttttttatcgtactactaggcaggtcagattaagtggtttcggagagcaattgctgccccaagccaggcagctcataaaagatagcgagcggctatttcagaatcgttgtcaggtgagacaggatctggtgagcggtttagtgcgtgtgtctgtacctgactctccatgcatgcgactcatcttaggagacatactcgatggtcttcggagttacccgagtgtcattctgaagtggaatgtaaagctgggtgcgttggatgatttcgacggtcagggggttgatatattaatcaccttggacctgccatccgataacagatggatcgtgcgtaaggctggcgttacgcgcaatcggatcgtagccgccccttcgcttatcgaccgcattggcatgcctaagaatatcgaggacctacaacagaatttccctcttagtacagtaacggaccccgctacaggcagagcttgtccctggtatattcaccaaggccgccagttctttcccgcgcagccctacctaaccactgacgatttatatagtcaattggaagctacccgggcagggcatgtgattagctatattcagggcatgacgtgtttgccatacctagcaaatcgtgagttgatagaagtactaccggagctagagcgcgcgagttggccgatctacgtgtgtcaccctcagcggaccgataactgcccaagagttgatgtggttttcgaaatgctggtcgaaagtctgaatcgacgtctctaa

SEQ ID NO: 358427 - DNA, 2652 bp, Pseudomonas aeruginosa
atgccaaatccttcatacggtgaatcctcgtgcactgctgcggccagcggccaagtggaagtgcgcggtgcgcgggagaacaatctcaaggacgtggatgtcgctattccgcgcaatgcgctggtggtgttttccggtgtctccggctctggcaagtcttcgctggccttcggcaccatctatgctgaggcacagcggcgctacttcgaatcggtagccccgtatgcccggcggttgatcgaccaggcgggtgtacctgacgtagatgcgatcgacggcctgccgcctgctgtcgcgttgcagcagcaacgaggggcgagcaatgcgcgttcttcggtggggagcgtgaccacactgtctagtcttgtgcgcatgatgtactcgcgcgccggcgcttatccggccaaccagccgatgttgtacgccgaggatttctcgccaaacaccccgcaaggcgcatgcccggcctgtcatggtctgggccatgtgtacgaggtgacggaggcgaccatggtgcctgatccgtcactgagcatccgtgaacgggccatcgccgcctggccaccggcctggcacggccagaacctacgcgacatcctggtcaccctgggctacgacgtcgaccgtccctggaaggatttgccgaaaaaggaccgtgaatggatcctgttcacggaagagacgcccacggtgccggtctacgcgggtttcacgcctgccgagactcaacaggcgctcaagcgtaaactcgaacccagctatatgggcaccttcacgggcgcccgacgttacgtgctgcacacctttgccaacacccagagcgcgttgatgagaaagcgcgtgtcgcgctacatggaaggcaagctgtgcccggcctgccacggcaagcgactcaaggccgaggcgctgtcggtgacctttgccggggtggacattggcgagttcatgcaaatgcccctagaccgcttagcggcgctgctcgagcccattgcccaaggcgacttccgcgcccacacggctggcgagggtaccgaccgcgaagcgacacgccgtgatcgagccgaacgggccgcaagtggtcgtgcggtccatgcggtatcgcctgacgtgcgccgtacgtcggcgctgtcggaggagaagcgtctcgccgcgcagcgcctggccggtggggtaatggcgcgtctgcgccaactgcgcggattgggcctgggctacctcacgctggatcgggccacgccgacgctgtcggctggcgagttgcagcgcttgcgcttggccacgcaactgagctccatgctgtttggcgtggtgtatgtgctcgatgaaccttctgcaggtctgcacccctctgacagccatgcactgtacgactcgctggataaactgcgcgatgctggtaactcgctcttcgtggttgagcacgacctggacttgatgcgccgcgcgcaatggctggtggatgtaggaccagatgcgggggagcggggtgggcgcgtgctctacagtggtgtgccagaaggattgcgcgagattgcggagtcgcgaactgcgcggtacttgttcgacgaaatccccgcaccggctagccacgagcgcgaaccgaccgggtggctggagctgctaggcatccggcggcacaacctgcacggcgtggatgcacgtatcccgctgggtgtgctgacggcggttaccggtatctccggttcgggtaagtccagtctggtcgcgcaggccctgccagagctgttgctactgcacctagggcacgagcccgaagatgatgcagctgaaaatgctaacagcgaaggtcctgctgttatcgaggctacaggaggtcatctcgccggtgatgtggatgtcgtccagcgcctggtccaggtcgaccagaagccgattggccgcacgccacgttcaaacttggccacctataccggtttattcgatcacgtacgcaagcttttcgccgccacgccggacgcgcgccggcatcgttatgacgctggccgattttctttcaacgtggcgaaggggcgttgtgatacgtgcgaaggggagggtttcgtcagcgtcgagctgctgttcatgcccagtgtctacgccccctgtccgacctgccatggcgcccgctacaacgaggccacgctcaaggtacgctggaacgggcgcaacatcgccgaagtattgcagatgacggtggaagaagcctgtgacttcttcgccagcgaagacgccatcgcgcggccgctgcaactgctgcaggaaatcgggctgggctatctgcgcctgggccagcccgccaccgaactatcgggtggcgaagcacagcgcatcaagctagccacggagctgcagcgaagccagcgaggccgtagcctgtacgtgctcgacgagcctaccactggtctgcacgcttctgacgctgaccgtttgcttgtgcaactgcaacgcctagtcgatgccggtaataccgtggtgatgattgagcacgacatgcgtgctgtagctcaggccgattgggtgatagacatagggcctggtgcgggtgaggagggtgggcacatcgttgcgtccgacactcctagattagtggcaaggacgtcaggcagtcgaaccgcaccattccttgctgagcagctcaagcgaaccaagtag

SEQ ID NO: 358428 - DNA, 1140 bp, Pseudomonas aeruginosa
atgaccgaactgtctcaacgcttgggtgttgcggaacccgacaatacgacgccgcttcacggcttgacttgggacgaaggtgacttgcactgcgagaagcacaccgagttctcgacctatctgtggagtgctgtgcttgatcccgagacgggagcaccttgtggagagaatcccttcaagcgagggttcgttccaccaggtccggtaatctcaggtattcgcctgaatgtattgccttggaccgaggcggctgaacaggagattgaacgttttgaccctgttagcctgtgctattcggtggtggagaacggcgcagccgctattgtgaccgactttcggcaggacgcggatggtttgacgaacatcctcattcttgaccgtgacttgactcaggctcgcgcaggagcgctcgcccagcgcctgctggaaatcgagacctaccgcactttagcactcctggcgctcccgctgacacgctctttgaccgtggatctgcggcgcatggaatcgcaactcgcggccatcactgacgaaatgcgcaccggcaagggcgcgcgtcgtgacaacgatgttctgctggctgagcttaccagcctcggggcggagctggaggccggtgtggcagcgaacctttatcgtttcggcgcgagtcgggcgtactacgagatcgtcgaagagcggttggatgcgttggcggaggagtcagtagcgggctactgcacgtggcgcgatttcctgcataggcgcattgcgccagcgatgcgcacctgccagtcggtcaaggaacgccagaccaagctttccgacaagctgacgcgcgccattgcattgctacggtcttggatcgacgttgagcttgagcgtcagaaccgggaccttctggagtcgatgaacaatcgcgccaagttgcaactgcgccttcaacaaaccgttgaaggcttgtcggtggcggctatttcctattacgtcgttagcctgctggcgtatctgctcaaaggtatcccaggagttcatgacaaggttgctcctgagctggtgatcgctgggctggtacccgtggtcattttggcgatctggtggacggttcggcgaatcaggcatgcccatggtgaccatgcaggggaagagaaatcttcctga

SEQ ID NO: 358429 - DNA, 2274 bp, Pseudomonas aeruginosa
atgacgactcgacgcaaggtacccggtgtacgtaactacgatggcccagctggtggctggggggcgttgaaggcgactgcgacagcggtgcgagagcagatggatacgctcaaagcgcccattacgctgatgcgcaccaaccagccggatggtttcgattgtcccgggtgcgcctggcccgataaggaacataagtcgacctttcagttctgcgagaacggcgctaaggcggtgacctgggaagcgaccaacaagcgcgtcacacctgagtttttcgccaaccacccggtggccacgctgctgcaccgcagcgattacgagctggaagacctcgggcggctgacccatccgctggtctacgaccacggcagcgacacatacaaaccggtcgagtgggagcacgccttcgcccggatcggtgaaatccttcgtggactggaacccaaccaggtcgagttctacacctccggccgcgcctccaatgaggcagcctacctgtaccagttgttcgcgcgggcattgggtaccaacaatttccccgactgctcgaacatgtgccatgaacccaccagcgtgggactgcctcgctccattggcatgggcaagggctcggtgtcgctggacgatttcgaatcgtgcgagttggtgatttcgatcggccataaccccggtaccaaccacccgcggatgatgggcacactgcatgaggtatcccggcgcaaggtgccgatcatggtcatgaacccactgcgcgagcgggcgctggaacgattcgctgacccgcaggacatgatcgagatggccacctacggctcgacccggatcgcctcgacctacctgcaggtcaaggccggtggcgacgcggcggcaattaagggggtgatgaagtcgctgctggagatggaggactcgctcggccaggtgctcgacttcgaattcatcgcccagcacaccaatggcttcgaggcgctcaaggccgatctgctggccactgcatggcccgatatcgagcacgctagtggtctgaccaaggccgagatggaaaaagttgctgcagcctacgctaagtccaacgccactatcgtcacctatggcatgggcatcacccagcacaacgagggcaccgcgaacgtgcggctgatctgcgacctgctgatgctgcgtggcaacctcggaaaacccggcgccggtatctgtccgctgcgcggccactccaatgtgcagggcaaccgcaccgtgggcatcaccgagaaaccgtccgccgatttcctgcagaagatcgagcaagtactgggcttcaagccgccggccgaacacgggcatgactcggtgcaggccatgcaggcaatgatcgctggtacgtcgaaggcgctcatctgcctgggcggcaacttcgccgtggcgttgcccgatccggcccagtgcttcccggccatgggcaagctggatctgagcgtgcacatcggcaccaagctcaaccgcacgcatctgctggtgggcaaggaaacctacctgttcccctgcctggggcgcaccgagttggacgtgcagaacggagagcggcagtcgattaccgtcgaggactcgatgtcgatggtgcatgcttcggctggaaaactgctgcccgcatcggagttcttgcgctctgaaccggcgatcattgcaggcatggccaacgcgacgatgccggacagccccgtgccttggctggaactgggggccgactacgacaaaatccgcgacctgatcgagaagactcttccgggcttcgagaacttcaatgcgcgcattcgcgtgccgggcggttttcgcatgccgctaccggccaccgaacgcatctggatgaccccctcgggcaaggccgagttcttcgtcttcccgggcctacacgaggacaaggaagtcgagggtgacgatgtactgcgcctgatcaccctgcgtagccacgaccagtacaacaccaccatctatgcgatggacgatcgctaccgcggcgtgttcggccgccgcgacgtgctgttcatgaaccctgccgacctgcaggcgcgcggcttagcccacggcgacttggtggacatcgagacggtcacccatggtcgcaagatgcgctatgaacgcataactgccatcgagtacaagatctcgcctgggtcggtgggggcctattatcccgaggccaaccagctggtgccgctggactacattgacgtggacagcggaacgccgtcgtacaagtcggtgccggttagggtgatgcgttcagagttaggttga

SEQ ID NO: 358430 - DNA, 201 bp, Pseudomonas aeruginosa
atgaatttcaaaaaacccaaaaaaccggtgctgatcgaggccgcgctattccttctggagcatcaatctcgggaggacgtgattctcgagccgtggcgggaggccctgcgccggctacaggcaggggacgtggagtctgccgcagaggtcgctgccagggcctaccacaatgggcctcattggaggaccgccgcggggtga

SEQ ID NO: 358431 - DNA, 561 bp, Pseudomonas aeruginosa; identical to SEQ ID NO: 15275

SEQ ID NO: 358432 - DNA, 2967 bp, Pseudomonas aeruginosa
atgccacgtcgttccatcctgtccgccgccgagcgggaaagcctgctggcgttgccggactccaaggacgacctgatccgacattacacattcaacgataccgacctctcgatcatccgacagcggcgcgggccagccaatcggctgggcttcgcggtgcagctctgttacctgcgctttcccggcgtcatcctgggcgtcgatgaactaccgttcccgcccttgttgaagctggtcgccgaccagctcaaggtcggcgtcgaaagctggaacgagtacggccagcgggagcagacccggcgcgagcacctgagcgagctgcaaaccgtgttcggtttccggcccttcaccatgagccattaccggcaggccgtccagatgctgaccgagctggcgatgcaaaccgacaaaggcatcgtgctggccagcgccttgatcgggcacctgcggcggcagtcggtcattctgcccgccctcaacgccgtcgagcgggcgagtgccgaggcgatcacccgtgctaaccggcgcatctacgacgccttggccgaaccactggcggacgcgcatcgccgccgcctcgacgatctgctcaagcgccgggacaacggcaagacgacctggttggcttggttgcgccagtctccggccaagccaaattcgcggcatatgctggaacacatcgaacgcctcaaggcatggcaggcactcgatctgcctaccggcatcgagcggctggttcaccagaaccgcctgctcaagattgcccgcgagggcggccagatgacacccgccgacctggccaaattcgagccgcaacggcgctacgccactctcgtggcgctggccaccgagggcatggccaccgtcaccgacgaaatcatcgacctgcacgaccgcatcctgggtaagctgtttaacgctgccaagaataagcatcagcagcagttccaggcgtcaggcaaggccatcaacgccaaggtacgtctgtacgggcgcatcggtcaggcgctgatcgacgccaagcaatcaggccgcgatgcgtttgccgccatcgaggccgtcatgtcctgggattcctttgccgagagcgtcaccgaggcgcagaagctcgcgcaacccgatgacttcgatttcctgcatcgcatcggcgagagctacgccaccctgcgccgctatgcaccggaattccttgccgtgctcaagctgcgggccgcgcccgccgccaaaaacgtgcttgatgccattgaggtgctgcgcggcatgaacaccgacaacgcccgcaagctgccagccgatgcaccgaccggcttcatcaagccgcgctggcagaaactggtgatgaccgacgccggcatcgaccggcgctactacgaactgtgcgcgctgtccgagttgaagaactccctgcgctcgggcgacatctgggtgcagggttcacgccagttcaaggacttcgaggactacctggtaccgcccgagaagttcaccagcctcaagcagtccagcgaattgccgctggccgtggccaccgactgcgaacaatatctgcatgagcggctgacgctgctggaagcacaacttgccaccgtcaaccgcatggcggcagccaacgacctgccggatgccatcatcaccgagtcgggcttgaagatcacgccgctggatgcggcggtgcccgacaccgcgcaggcgctgatagaccagacagccatggtcctgccgcacgtcaagatcaccgaactgctgctcgaagtcgatgagtggacgggcttcacccggcacttcacgcacttgaaatcgggcgatctggccaaggacaagaacctgttgttgaccacgatcctggccgacgcgatcaacctgggcctgaccaagatggccgagtcctgccccggcacgacctacgcgaagctcgcttggctgcaagcctggcatacccgcgacgaaacgtactcgacagcgttggctgaactggtcaacgctcagtttcggcatccctttgccgggcactggggcgatggcaccacatcatcatcggacggacagaatttccgaaccgctagcaaggcaaagagcacggggcacatcaacccaaaatatggcagcagcccaggacggactttctacacccacatctccgaccaatacgcgccattccacaccaaggtggtcaatgtcggcctgcgcgactcaacctacgtgctcgacggcctgctgtaccacgaatccgacctgcggatcgaggagcactacaccgacacggcgggcttcaccgatcacgtcttcgccctgatgcacctcttgggcttccgcttcgcgccgcgcatccgcgacctgggcgacaccaagctctacatcccgaagggcgatgccgcctatgacgcgctcaagccgatgatcggcggcacgctcaacatcaagcacgtccgcgcccattgggacgaaatcctgcggctggccacctcgatcaagcagggcacggtgacggcctcgctgatgctcaggaaactcggcagctacccgcgccagaacggcttggccgtcgcgctgcgcgagttgggccgcatcgagcgcacgctgttcatcctcgactggctgcaaagcgtcgagctacgccgccgcgtgcatgccgggctgaacaagggcgaggcgcgcaatgcgctggcccgtgccgtgttcttcaaccgccttggtgaaatccgtgaccgcagtttcgagcagcagcgctaccgggccagcggcctcaacctggtgacggcggccatcgtgctgtggaacacggtctacctagagcgtgcggcgcatgcgttgcgcggcaatggtcatgccgtcgatgactcgctattgcagtacctgtcgccactcggctgggagcacatcaacctgaccggtgattacctatggcgcagcagcgccaagatcggcgcggggaagttcaggccgctacggcctctgcaaccggcttag

SEQ ID NO: 358433 - DNA, 1239 bp, Pseudomonas aeruginosa
atggatcgtcaagacgacaatcgtccgaaactgtctgaggaagtcctggagctggtgaagagcaacggcggttggcttaacgtgatcccacgtttgactagctcgttcgatgctgcactcaagaaccatggacatctggtcgactgccctttcccacaccgtcaccggaatgggggagggaagagtgatttcagattctcaaacaagccgggctacgaagaccgcgctatctgctcctgcttgcaggacggtggccgggacccagtagagcttctgatcctggacggcgtcggtcgcaacttcaccgacgtaatgttcaaagtcagagatgcactaacaagcggcaaaagctatacccgtaaggtcactcctgtagtggtcaattcacgggctggcataagtccggaggatgagcagaagcggaaggcgaagcacatcaagactgcacaaggcttgatctcgctaacccacccggatgctcttcctggccgtttgtactttcaacaccgcggtatcccgcttaacagcaaccttggtgacgtgaaattccacccggccctcgagtattacgaaacccgtaagaaagatggtcaggttgtgaaggagctcatcggtcggttcccggccatcgtgtcggcgtttcggagcaggactggtcgagtggtgaacttccacaagatctacctgactccggatggtcataagctggaaggtgtctcgaaggtgaagaaaattgattccccgttgtctggcttcaaaggagcgtcaatccgagtagcaaacgtcgaaggttgcaggacgctgcatgtgaccgaaggcgtagagaaaggatgggcaatccacctggcaacaggcgagtctgttcgagtagcgcatgcctgcaccactctggcgacgttgtttgtcgatcgtgctgaattcgatagggtagttatctggtctgataacgacccatacaacgaagcacgtgggaaatatggcgatggacaaacctttgcgtggaagctctttattgagctgatgcgtaaagggttcgaggtggccttcatgctgcccgatgtgattcacactcctggagccaagggccaggattgggaagatatcatcgtggttgagaaggtctttggacagccattgccgcaacgcttccacctcctgcgtgcgaaagcatgcgaaggtgggatcttcatgggcttcaagccagccaacgcagatggcttgctcagtgcctgtgcgtga

SEQ ID NO: 358434 - DNA, 948 bp, Pseudomonas aeruginosa
atggtccctcagatttcagctatgtatcgtggggatcaaagtcgcaaagagacattaatagactatggtttccgccttccttcgtcaaaaaataatcgtccattgagctttgaggaatttgaaggcattaagcctcaggccatttttgtatcagcaactccagggccctatgagctcaaagcttcagcgggcagagttgttgagcaagtaattcggcctacagggttgctagatccagaagtggaagtaaggcctttggaggggcgtatggacgatttgcttcgggaaatatctgtgcgtgtgcaaaacaatgaaagggtattggtcacggcgttaacaaaagttgaggccgaggatctgagtacctttatggcggatcagggagtacgcgtccggtacatgcactcggataccaaggctgatgctcgggttgagatcattaatggattgcgcgcaggcgatttcgacgtgttaattggagttagtctattacgtgaaggtttggatattcctgaagcatctttggtggccattttagatgctgatcgcgctggctttttacgatctgcacatgcgctgattcaaatgatcggtcgagttgcgaggaatcaaaatggtacggctattttgtatgccgatactgtgacccctgcgatgcaagaagcaattgacgaaaccaagagtcgtcgcgaacgtcaaattgaattcaacaaactaaaagggatttcacctgtatcctcggtccgcaaaatggctgatgaagcgactctggtagtagagccggtcgtccactcaagcaagttttgcgaaaatttatcaacgctttgcgaactgataactaacaaggagcaggagttgcttgaatatacagatcgacatgacgatgagagtgtagaaaacattcgtgtgcagttggatgcattgtatcgacagtttatttatatgtag

SEQ ID NO: 358435 - DNA, 1392 bp, Pseudomonas aeruginosa
atgtcagttttaactgcgttggacctggcgcggattcagttcgccttcacggtctctttccacatcattttcccggctatcactattggtctggccagtttcctggccgtgctcgaaggttgctggctcaaaaccaacaatgcggtctataaggacttgtataagttctggtcaaagatcttcgccgtcaacttcggcatgggcgttgtctcgggcctggtcatggcttatgagttcggcaccaactgggcgcgcttctctgatttcgctggcagtgtcaccggaccgttgctgacctatgaggtcctcaccgcattcttccttgaggcgggtttcctcggggtcatgctgttcggctgggaccgggtagggcgcaagctgcacttctttgccacggttatggtcgccattggtacgctgatttctatgttctggatcctttcctcgaacagctggatgcagaccccacagggtatcgagatcattgatggccgggtggtaccgcttgactggttcaaaatcgtctttaacccgtcgttcccataccgtctggcccacatggcgttggccgcgttcctcagcactgcgttttttgtctcggcttccgccgcctggcacttattgcgcgggcgcaacacgccgcagattcgcaagatgttgtcgatgggcatgtggatgattcttgtcgctacaccggtgcagatagtggtgggcgatgctcatggcttgaacactctggagcaccagccggcgaagatcgctgccatcgaagggcactgggagaacatccccggtgagccgtcgccgctgatcctggcaggctggccggatatggaggccgagaagactcgcttcgccattgagatcccctatctgggcagcctgatactgacccatagcttggataggcagatcccggcgttaaaaagcttcgcgaaagaggaccgccccaactcgaccgtcgtgttctggagcttccgggtcatggccggtttagggatgctgatgctcgcctgcgcgctgctggccttggtgctgcgtcggaacggcgcactgtaccgtaaccgcctgttcctcgggttcgccttgctaatggggccgtccgggctgatcgcactactggcaggctggttcaccactgaggtgggccgccagccctgggtggtctacggcatgttgcggaccaacgaagcggcgtccaatcacagcgctgcgcagatgagcctgacgctggggttgttcgtgcttatctacttctcggtatttaccgtcggcatctgctacatgatgagcctggtgcgcaaggggccgaccgcgcacgagcaaatgccgagcgctgatcaaccggaatcgctggctacggcgcgtcgcccgctgtccgtcgccgactga

SEQ ID NO: 358436 - DNA, 1017 bp, Pseudomonas aeruginosa
atggtaattcaaggtatcgacctatcagtcatttggggcgtgatcatcgccttcggtctgatgatgtatgtgatcatggacggcttcgacctggggttggggattctcttcccactgatcggcgactccagcgaccgtgatgtgatgatgaatacagtggctccggtgtgggacggcaacgagacctgggcggtgctcggcgcggcggcgttgtacggcgccttcccgctggcctactcagtaatcctcgaagcgctttacctgcctttggtgctggtactagccggactgatcttccgcggcgtagctttcgagttccgcttcaaggccgaggcacacaagcgtcatctgtgggacaaggccttcattggtggttcggtcctggcgactttcttccagggcgtggctattggcacttacatcagtggtatcccaatggtgggccgtcagttcgccggctccggctgggactggttggcgccgttcccaatgttctgcggcgtcggcttgctgctgacttacgcgctattgggcagcacctggctgctgatcaaaactgacggcatgcttgagacgcgtatgcgtcgctacagccggccgcttacctacgccttggcagtggtgattgtgacgatttgtatctggtccgcttcgttgaacgacgatattgcccagcgttggttcgatgccagccactggttgcgttcagcgctaatcgctgctctagcggcgttggtggtaatggtgattttgaagacccttcgcaagcgccactcgcacatgccttttatcgccgtggtggggttggtcttcctcggctaccttggcctggcgatcagtatctggccgaacattgtgccgccgagcctgaccttgtggcaggccgctgcgccattgaccagtcagttgttcgcgctgatcggcgcgctattcatcatcccgattatcttggcttataccttctggagctaccacgtattccgcggcaaggtgcaggcgggggatgcctatcactag

SEQ ID NO: 358437 - DNA, 327 bp, Pseudomonas aeruginosa
atggatcatcatgaaattgaaccccaggcggtagacggtgcggttacccgcagcgcaatcttcctggtggcaacgctcaatcctggcaatgacagccgcgaccgagtacatgacctgtgcgccgatcttggcgggctagttcgctcggtcggcaaacgggtgccgcgcggtaacctgtcttgtgtcatcggcttcggcgcggcggtctgggacagtctgttcggtaccccgcgaccggctggcctgcatgctttccgtgagttcggcagtggcgagcgcaaggccgtcgccacgccgggtgaccaaattgtttgctgtcgatcctaa

SEQ ID NO: 358438 - DNA, 3147 bp, Pseudomonas aeruginosa
ttgcaggctcgactgctgatccttaatccatggcttgcgagtgcgcccggtggtatcagtgctgcattgatcgagctacggaaacgagtcactgatgagctgttgcccgccaacaaggcgttctgggagcaggtgctgaaccgttcggatatccaggtgaaggacgccgaaggtaagcctcgtagtgtgcgtttcttcgatgtccgcgatgccagtaacaacgacttccatgtggttgatcagtatgtcgggcgcaacgcggatggcgaggtttttcgtcctgacttgttgctgttcgtcaatggtctgcctctggccatcgtcgaatgcaaagctagccaccatcgtctggatgaggcgttggggcagctggatggttatcagaacagctttcccgaccagtttgttttcaaccaggtattggtcgggctgaaccggcggcaggggttatacggtgctctctttaccaaaccagcgtattacgctcgctatcggttacaggagcaggagaccgctactgtatctgccttgctgggtgataatccgagtgagcaggaaagcttgctgtgggcattgttcgagccgagccgcttcctgcaactgatctcgcactttgtattgttcgaaacgcgcgaaggcaagacggtgaagaaactgccgcgctatcagcaatggcgagccgtatgcaaaacggtggatcgcctgtgcgcgcagaagccaatgggcggggttgtctggcatacccagggtagtggcaagtcactgactatggccctgcttgcgcgtatgctgcgtgccgatagcacaggtttgaacaaccccaccgtcttggtgctgaccgaccgcaaagacctcgacaaacagatcttcgataccttccactcagtgggcattcatgccattcaggccgtgtcggttgatggtttgctgaagatgttgtccaacgattacggcagcgtcttcaccagtacggtgcagaagtttcaggagaacgaaaagccctgcgagcagtctgctgatgttcctgacgaagaagatgatgcgttgcaagcgacccggcacaggcggattcgcgaggagaaggatttcttcatcgtgcatgagcgcaatgtccaccacctagaggtggatgaggtcggcgtaccggtgaagccgaagtgggaagaaatcagccgggaaaaggtgcatttccgggtactcagcaccaagcccaatttctacgtgctggtcgatgaggcccaccgtagccagtacgacttcctcgcggcattcatgcgcgccagtttgcccaacgccaagttcatcgcctttaccggcacaccgctgctgcaagaggacaaacacacgctgggcgagttcggcggtggtgagtacatcgacgaatatcgcctgcatgaagcggtggcggatggcgccactctgcccatcaaataccaggatgcctgggtggctctttctgccaatgctgagctggatacagcgttcaaagagcagtttgcagaacagacagaatttcggcagcaggatatcaagcgagagctgctgcgtcgttggcgtcaggccagtgatcgcatggaacaggtcgccgagcatctagttgagcacttcctcagtcacgtaaaagctaaggaactgaaggccatgctggtctgcgatggccgtgatatggcggtgcgttacaaggatctgctcgacgcaataatggttgagcgagccgcaaagggactaccaaccttcgacagtaaggtggtgatttccctggccagtatcacctcttcccgaaccggggcctctctcaaggaacaggcggcggagtaccaagtagagctcgacagaatccagagcatcgaagagcggatcaaggctgagctgaaggccgggaagactcctgtggccatgccatccgagcagattggcaactttgtcagcaagctgttccccctgctctacggggaggaaacttccgagctggatggtcagccaaaggcgaacaacgtcggattgatcattgtgtccgacatgctactgactgggtgggatgcaccgattgtcggcaccatgtacctggataagccgcttaaggaacacaccctcttgcaggctattgcacgggtgaaccgcaccctgcctggcaagaatgccggttacattgtggactatcatggggtggtcgagcaccttgaccatgcgttgaagatctatggcggcgaagtgacgccttcgcaggtttgggagggtgttgaaaccgaactgcccaagctgcaagccacgctcgaccgcatactcaagctgctgccgaaaaaacatgacccggtggcgcagcgtgaagcatacaaggatgacgccgagcgcttcctcgatcctgccaccaggctggatatggtcgaagagtttcttgacttggtgaagcagttcaaccgatctgtagacatcatcctaccggatgtccgtggtgtacccttcaagcccttctttaccctgtttggtgagattcggctgatgctgcgcgacaagctaccaggcaatgccaaggagcggatcaccaagctggagtctgcgctgcttcaacaactactggatgagtacatcgttgccagcccggccaaaagcctgctgggccatgaagtctcgattctggatgccagcgatatggaacgcctaaagcaactggccagccccggtagtcgagccctggtgatgaaaaaccagctgaagcacaccatcgcgaccggcaaggacaaggatccaggatttttcggaaagatcgccgaggagctggaaaaactgttggaagaggaaaaggcggggcgtatcagccaggtcaagttcctggagcagttagagctattcagccagcgtattcaggagaaggacaacaccggcttcgccaagtcttcgcattcagcggtgtaccactaccttgtcgcgttgctggacgagagcacggccagggtcgcgacgagcaagctgttcgaagacgaagagctgagccgcacgactgccaccgagaactggaagaagatgccagatctgcatccggacatcagagaccatctgcgtggcctgctgatgcccttggccggctgggagcgctcgacggcgcgcgatcacgcgaagcgaatcttggatatcctgctgaaaaactaa

SEQ ID NO: 358439 - DNA, 1302 bp, Pseudomonas aeruginosa
atgaaaaagacctctgacaaacggcaccatgtcgtcgtcgttggcgcgggtttcggcgggctggacgttgtcaacggattctccggcgccgacgtggacgtaacgatcatcgatcgccgcaactatcacctgttccagcccctgctgtaccaggtggccggcgcgtcgctgtcgacctctgaaattgcctggccgattcgctacctgttccgcaaccgtcagaatgtgcagacgctcatggcggaggtgcagggtgtggatgtcggctcgcgacaagtcctgctcgacaacggttcgaccgtcggttacgacacgctggtcctggcgacgggggcaacgcacgcctactttggtcacgatgaatgggagccccatgcgcccggcctgaagactctggaggacgctgccacgattcgcggacggattctctccgcgttcgaggaggccgaacgctccaataatccagcggagcgtgccgcactgcagaccttcgtgatcatcggcggcggtcccacgggggtcgaactggcgggcacgatcgctgagctggcgaaagacacgttggcccatgacttccgttccattgatccgcgggctacccgggtggtgctgatcgaggcggggccgcgtctgctgccggtgttccctgagaagctctcggactacactcgacgcgcactggaaaagcttggcgttgaagtggctttgggcgctccggtcaccgactgctcggctgacggtgtcatcgttgcgggcaagccgcttccagctaagaccattgtctgggcggccggggtgcaagcgtcacccgccgctcgttggctgaatgccgaggcggatcgtgccggtcgagtgctggtcaggccggacatgagcgtgccggggcatcccgagattttcgtgattggcgacacggcggcatcggcgatgtcggatggcaagtacgtgccaggtatcgcgccggcggccaagcagcaaggccagtacgttgccaatctgatcaagaagcggctgaaaggcaaaagtgtggatgagccgttcaagtacaagcaccagggcaacctggccaccatcggtcgtagcctggcggtgatcgacatggggcgtctgaagctgcgtggggcactcgcttggtggatctggaagctggcgcacatctatttcctaattggcgtgcgcaatcgcttgagtgtcgcgctgagttgggtctggaaccacagtgtcggttaccgagggtcacgtctgatcatgcggtcgacaccgcaggccaagcgtgggcccgccgagctggaacccaagtaa

SEQ ID NO: 358440 - DNA, 525 bp, Pseudomonas aeruginosa
gtgaacgccacggagctgccctggagcgatcacttccagatgtattcctatgtggtcgacgaactgccggcgctgatcgaggctaacttcccagcgtcgtccaagcgcagcatcagcgggcactccatgggtggacatggtgccctggtcattgcgctgcgcaacccaggtcgttatgcgagtgtttcggcattctcgccgatcgtcgcccccacacaagtgccctgggggcagaaggctctggcggcttacctgggcgagcacaaccaggatgcctggaagcgctatgacacggttgaactgatccgtactgcgcaagagcgcttgccgttgctggtcgatcaagggctgggcgatgagtttctcgagaaccagctgcggccggaattgctgcgcgccgcctgtgaacaggcagggcatccgctgaccctcaacctgcggcccgggcatgaccatagctactactttatttcgagctacctgggcggacacatggcccaccatgcggctgcgttgaatcgctga

SEQ ID NO: 358441 - DNA, 399 bp, Pseudomonas aeruginosa
atggctactccagtaatttccggtaacgacatcttctcccacgtgttcttcggcgccgccgacatcaagaaatcgtccgcattctacgatgcggctctgggtgccctcggcatcaagaacctgggtcctttcggtaacgattgggtgctgtacggccgtgacaagccagcgttcatcatcgcccgtccaggcaatggtgctgcacctaccagcaatggcgtaactgtcggtttcgctgccgccaccaccgctgaagtggatgcgttccacgctgccggcctcgccgctggcggtagcgatgaaggtcagccaggtccacgtggccacctgccgggtgcctacgcggcctacctgcgtgacccagctggtaacaaagtgtgtgcctacacctttgtctga

SEQ ID NO: 358442 - DNA, 789 bp, Pseudomonas aeruginosa
atgctcgccgtcgcaggcgaactcgtccttcgcaaacgtaaccttcaagttgggttcaaggataccgaagggaatgtgagttttgacggcatgaccctggaggattggatcaacgattggttcgtatcactgttcgatcagcgaatgtcgcatgctaaactctccttgcgagatcaaaagcgcggcgggcattcggcttctggtaaaggtccaggagagattgacggcttcatcacttcaagtgacagcaggcgagtggggattttcgaagcgttccgcctcttctctgtagacactacgacaattggagaccacctcaacaaaattgcggggtatgacggtgagtctctcagccctgtggtgatggtcggttattgcgatgttaagaactttgcaaacctcgtgaaaggctataattcctacgtttcaaatcaggcatatactggttatacaatcagtgacggagctcctagtgcattgagagtgctccatgatgtagatcatatttggctagcgagcgagacccggcgcagaggaggtaaagacatagtcttctaccatcttttgatcaatctgcacttctctccgacagttgaaatcccagaaagcggaaagcaaggggcgtcagtacctccggttaaaagggctcgccgcgcgcgtactactcagatctacaaaaaccctcacaacggtgaaatggttgaaaccaagagcggcaaccataaaatcctcaaggcttggaaaggtgagtatggtggcgatgtggttaagtcttggctagttcaataa

SEQ ID NO: 358443 - DNA, 1200 bp, Pseudomonas aeruginosa
atggccggtaataaaagcgtcgtctatcatgggacccgtgatcttcgggttgaaacagttccttatcccaagcttgagcacaataatcgaaagcttgaacatgcggtgattttaaaggttgtatcaacaaatatttgtggttcagatcaacacatttatcgtgggcgctttatcgttcctaaaggtcacgtgctcgggcacgaaattactggggaagtggtagaaaagggctcggatgtcgaattaatggacatcggcgatttagtgtctgtgccttttaatgttgcgtgcgggcggtgccgcaactgtaaagaggcgcgatctgacgtttgtgaaaataacctggtcaacccagatgcggatttaggtgcctttggctttgacttgaaagggtggtctggtggtcaagctgagtatgttcttgttccttatgctgactatatgctgctcaagtttggtgataaagaacaggcgatggaaaaaataaaagacctgacgcttatctcagatattctaccgacaggttttcacggttgcgtttctgctggagtgaagccaggtagccatgtttacattgcaggtgcaggtccagtaggacgttgtgcggcggcgggggcgcgactgttaggagcggcatgtgtgatcgtgggcgaccagaatcctgagcgcctgaagctgctatctgatgccggttttgaaacgatcgacttacgtaactctgcaccgctgcgcgatcagattgatcagatactaggtaagccggaagtcgactgtggtgtagatgcggttggttttgaagcacatggccttggtgacgaagctaatactgagacgcctaacggtgccctaaatagcctctttgatgtagtccgagcaggtggcgcaatcggaattccgggtatttatgtagggagcgaccctgatcctgttaataaagatgcagggagcggacgcttgcatcttgacttcggcaagatgtggacaaaatccatacggattatgactggaatggcaccagtgacaaactacaatcgccatctgaccgaagcaatactttgggatcaaatgccttatttgtccaaggtgatgaatattgaagtgattacacttgatcaagcaccggatgggtatgcgaaattcgataaggggtctcccgctaagtttgttatcgatccgcatggcatgttgaagaataaatga

SEQ ID NO: 358444 - DNA, 900 bp, Pseudomonas aeruginosa
atgattgtccaacctacccctggtgtattaggccttttttttacactcaaaggatccattgttagacgcatcgcgacacgatgcctgatgattgccatcttggcgtccttgatagttttgatcgagagtcgtcatcctgaatattttttacatgttagcgcaacaccattcaccctacttggcctatccctttctattttcatgaacttccgcaataatgcctgctatgatcgttggtgggaaggacgcaaagcatggggtatgatgatcattgagatacgctcatttatacgcgagagtgcagccatatctgaccaatctcttagagaagacatactgcgcagtctctgtgggttcgcacatgctctaaatgccaaacttcgcaatgagcatgaggctcaagcagctagctcatggctttctagcgatacactaacttctagtcacaatgtcagcgatcacattttgcaacatatcggagccacgtgctctcgcttggccaccgataaaatgattagcgatgtacgatacttggtactagtagaacgactgaatgcgcttacacaagtacagggcatttgcgaacgtatcaaaaccaccccaattccgttcccttactccctactgctccatcggaccatttatctattttgcatcttgttgcctttcgcgatggcagagccccttggatggatggcccccgtgttcaccgctatcgtaagttacaccttcttgggactagacaccattagtaacgaacttgaagatccttttggacgagaagaaaatgaccttcctacagatgcaatggttcgagtcatcgagcgggacatactaggtgcgctggactgcaaaaatcttccccctctgcgacagccaataaactgcatactcagctaa

SEQ ID NO: 358445 - DNA, 2451 bp, Pseudomonas aeruginosa
atgctgaaccttgccgaataccgccagcgcccggccttgctcgccgactggttgccctgggccggactgatcgcgccgggtgtcgtcttgaacaaggacggcagtttcctgcgcacggcccgctttcgcggccccgacttggacagcgccacgcaaggcgagctgatcgccgcatcggctcggctcaacaacgcgctgcgccggctgggttcgggctgggcgctgttcatcgaggccgagcgccggccggcggcggactacccacactccgactttcccgagccgctgtcctggctggtggacgaggaacgccgcgccgccttcgaggaatccggcaaccacttcgagagcggctatcacctgacggtggcgttcctgccgcccgaggaatcccgcgcccgcgccgccaagatgctgtacgagaacgcacctggcgacggcgtggactggcgtggccggctcgatgcgtttgtagcggaaaccgatcgcgtattcgacctgctcgatggcgtgatgccggaaatcgcctggctcgatgatgccgagacgctgacctacctgcacgcgaccgtctcgacgcggcgctaccgcatcggcgttcccgaggtgcctttccatctggacgcgctgctggccgactccgcgctggtcggcggcctcgcgcccacgctgggcgatctgcacctgcgcgtggcatcggtgcgcggctttccgacttcgacctggccgggcctgctggacgacctcaaccgcctgggctttggctaccgctggagcacgcgctttgtctgcatggacaaagccgaggcggaaaaggaactcggtcgcctgcgtcgccagtggtttgcgaaacggaagaacgtcgtcgcgctgctacgcgaaacgatcttccagcaggaatcgccgctggtcgataccgacgccagcaacaaggccgccgatgccgacgcggccttgcaggagcttggcagcgatcaagtcgccttcggctacctgacggccaccgtcaccgtgatggatacggatgccgccgctgccgacgaaaagctgcgcatggtggagcgcgtcatccagggccggggcttcgtgaccatccccgaaactctcaatgccgtcgatgcctggctgtcgtctatccccggcaacgcctacgcgaacgtgcgccagcccatcgtctcgacgctgaacctggcgcacatgatgccgctgtcggcggtgtgggccgggccggagaagaacgaccacctcgacggcccgccgctgatcgtcacccgcaccgatggcgcgacgccgttccggctggtgacgcacatcggtgacgtaggccacacgctggtcgccgggccgaccggcatgggtaagtcggtgctgctcgccatcctggcgatgcagttccggcgctacttcggctcgcgcattttcgccttcgacatggggcgctcgatgcgcgccaccatcctcggcttgggcggcgagcactacgacctgggcgcggatggcggcatcgcgttccagccgctcgcccgcatcgacggcgagggctaccgcacctgggccgccgaatgggtggaaggtcgcctgctgcatgaaggcgtgaccgtcggcccggacgagaaggcggctatctggtcggcgctcggaagcctcgccggtgcgccgccggaacagcgcacgatgaccgggctttccgtgctactgcaatcgaacgcgctgcggcaggcgctgtcgccgtatgtcctaggcggtgcccacggcaagctgctggatgcggacgccgaccgccttggtttcggcgacgtgcagggcttcgagatggaagaactgatgcacagcccggccgccgtgcaagcggtgttgcgctacctgttcgcccgcttcgatgagcgtttcgacggtgcgcccacgctgctgattctcgatgaggcgtggctgttcctcgatgagccgtcctttgctgcgcgcatccggcaatggctcaagacgctcaggaaaaagaacgtcagcgtcattttcgccacgcagtcgctggcggacatcaaggattcgaccatcgcgcccgcgatcatcgaaagctgcgcgagcaggattttcttacctaatccgcaggccaccgagccgcaaattcgcacgatctacgagggcttcggcctcaacagccggcaaatcgaaatcgtcgccaccgcgcagcccaagcgcaactactactaccaatcgcgcctcggcaatcgcctgttcgacctcgacctggggccggccgcgctcgccttcgtgggcgcatccacaccgcaagaccaacgcgacatcgaccgcgtgctgacgcaggccggcgtacccggcttcgccggcgcgtggctgcgccatcgcggccttgattgggccgccgacctgctgccgtctgcaccggcggccacttcgttcctcaacgcccaaccactggaggtttcaccatga

SEQ ID NO: 358446 - DNA, 267 bp, Pseudomonas aeruginosa
atgaacgttgccgtatatgacccgaaaagccagcgcctgaaacacctccccggccacccaggcatgacgcctgacggtctgcgagagttcagcctttttgcccaggtcgcagccatggccgaagggaagccgctcaacggcatcctggtcggctgggaggacgcaccctccccttacatcggcattttcctgctcggcgacaccgtcgatcagccgccgtccaagtccgtcctggatcgcatcgagcgcctggcacgaggccaataa

SEQ ID NO: 358447 - DNA, 321 bp, Pseudomonas aeruginosa
atgaccgcacaacctcgcaagcgcctgaaccgcttgaccctgaccatctccgacgaactcaaggccgcactcgctgaactcaacgaagcaaccggcgtagccgctgccagtttcgttggcgagatcatcgaatcgaatatccccatgatccgcggcattgccgaggctgcacgcaaggccaaagaggaaccctcccgcgccctggagctgatgcagcgcgccatgctggaggccctccacggcgtcagcgaagtgcaactggaactcatggacgaacaggccaagctccgcaccttccaacgcaaggaacccaacgaatga

SEQ ID NO: 358448 - DNA, 609 bp, Pseudomonas aeruginosa
atggcgggccattctccgcaccaagtccgaaacgatcgtcctggacatggcggaggaacaccccgaagcgctccccgtcttgctcgcctccatcctggaacgatcacgccggacaacgtccggcaagcctggagctgtctcgggtgtgctgagcggcgcgaagcccaccgagccagctccaggcattcccgtcacgtaacgccaaatcgcccacgaggagcacggcaaacggagtttgctaaagtgcgcccttcgcaatgctccggggactcactacggagtatttcctccggcgcttcgcccctccagaaaaacccctccgctcggagcctgacgcgctccgcttgtcccccacccatcaccagggcaaccagttgccccggctcttggcgggctcatcatctgcgccaaaagttgacaggtcaggggccgcgcccccggctcgtcggggaagcgccccacctccccggcgaacggaggcacgggcgaagcgcacccttgaccctccccgactcaatcaccctctggcactccatcgggccaggaactggcccgggggatgccgcccggcgagggcagctcttgacggcctcccattccacgcaatag

SEQ ID NO: 358449 - DNA, 1404 bp, Pseudomonas aeruginosa; identical to SEQ ID NO: 345639

SEQ ID NO: 358450 - DNA, 726 bp, Pseudomonas aeruginosa
atggctgccttcctcgataaccaacttgatgaagccgcgtgtgtcgaagttggcgagcgcacgcggcacgttgtccaaggtcaaggtgcggctgtcggtctcgatcccgtcgtggtgggcttccgcctcgctgtagcccacggtcgccacttgcggatcggtgaacaccacggccggcattgcggtcaggtcgagcgccgcatcgccgccggtcatgttgatcgcggcacgggtgccggccgctgccgccacatagacgaactgcggctggtcggtgcagtcgccggccgcgtagatgttcgggttgctcgtgcgcatgccttggtcgatgacgatggcaccttgcgcattgacagtgacccccgctgcgtccagcgcgaggctgcgcgtgttcggtgtccgaccggtggcaaccagcagtttgtcggcgcgcaattcaccgtgcgtggtggtcagcacgaattcaccgtccatatgggcgacctggctggcttgcgtgtgctccagcacctcgatgccctcggcacggaaagcggctgtcaccgcctcgccgatggccgggtcttcacggaagaacaaggtattgcgcgccaggaccgtgaccttgctgcccagccgggcaaaggcttgcgccagctccagcgccaccaccgacgagccgattacggcaaggcgttcgggaatggtgtcgctcgccagggcctcggtggaagtccagtagggtga

SEQ ID NO: 358451 - DNA, 792 bp, Pseudomonas aeruginosa
atgggtgtcgagatcgtgcgccatggcaggcgctatgatggcctgacattggaagggtatcgtgtgttggcattggctcaaaaaatgtctgatgactgcagagccttagatcgagaacttgccgcattgcgaagtggattcgaaggtgagttgcggctgggtatcgtaccggggacgacttctatatccccgatcttaagtgctgcacttgctgaaaaattcccactgttgcagcaaactatcagtactgctagcccatgttcattgctgcaagggattaaaagtaatggtctagacgtggcacttatgcatcttgagaacacttgcatggaggatttcgatacgcgagtcctgcataaggagcggttgtttctttttgggtgtttcggcttggaacttcctgcaagcgtaacgtgggaagatgtgttaagcaggcagctctgtttgttggcttctactttctcagttgctgtagaaagtaggcttgagcaaagtaaaatgcgatctgttgtaactgattcagtgagtgtactggtctcgcacatttcgacaggtagattttttgcagttcttccacagtccttagctaataattttttgcatgtggccaatgtcagggcggttgtgatcactggaacgccatcacactgcaccattgcccttgttgctggcaaaaattcattcgagtctgcctcggttcgagctttcttagaagtggctagtagtcctgagttagccattcctgtccgagccataatgtcgatccatcgccgacttcgagcaaaagactaa

SEQ ID NO: 358452 - DNA, 330 bp, Pseudomonas aeruginosa
atgagcaagaacaacgcgaacaagttttccccggaagtgcgcgagcgcgcagtgcgcctggtgcaggagtctcgcagcgagtatccatcgttgtgggtggcggtcgagtcgatcgcgcccaagatcggctgctcggctcagacgctgctgacctgggtcaagcggcatgaagtcgacagcgggcagcgcgaaggcatgaccaccagcgagcgcgaacggatcaaggagctggagcgggagaaccgcgagcttcgccgtgccaacgacatcctgcgcacggccagcgcttttttcgcgcaggcggagctcgaccgcaagctgaagtcgtaa

SEQ ID NO: 358453 - DNA, 723 bp, Pseudomonas aeruginosa
gtgtatggcgctgacaaggtctggcggcaactgaaccgcgaaggcgtggcggtggctcgttgcacggtcgagcgcttgatgcgcgtccagggcctgcaaggcgtgcggcgtggcaagcggctgcgcaccaccgtcgccgacgatgctgccgtgcggccgctggatcgcgtcaaccggcagttccgggcggatcggccaaaccagctctgggtctcggacttcacctacgtctcgacctggcagggctggctgtacgtggccttcgtcatcgacgtctacgcccggcgcatcgtcggctggcgcgtgagcaagtccatgaccacggacttcgtgctcgatgcgctggagcaggcgttgtacgcccggcagcccggcaatgacggttctctgacccatcactccgacaggggatcgcaatacgtcagcatccgctatagcgaacggctggccgaagccggtatcgagccctcggtcggcagccgtggcgacagctacgacaacgccttggccgagacgatcaacggtctgtacaaagccgaactgatccatcgtcgtgcgccctggaaaaaccgggaatccgtcgagctggccaccctggagtgggtcgcctggttcaaccatcaacgcctgcactcatcgatcggctatatcccgcccgccgaggctgaggcaaactactacaaccaacttggcagaaccgccgacgaggccgttttactttaa

SEQ ID NO: 358454 - DNA, 432 bp, Pseudomonas aeruginosa
atgcgcatattcacaatcggctttactaagaccaccgcgcagtcattctttacaagactaggggaatccggtgctaagcgcctaatcgacgttcgcctaaacaatacatctcaactgtcgggctttgctaaacgcgacgacctcaactacttcaccaaaaaaatctgtgagattgaataccatcatctcctattgctggcacccacagcagacatgtttaacgagtacaaaagtaaaggtggtgattggacgcactacgccgatagcttcctaaaattaatgtcatcgagaaagatagagaatatagacaaggaaatcatggacggcagctgcctcctttgcagcgaaaataaacctcaccactgtcaccgtcgacttgttgctgaatacctggcgagcaaatggccaaatgtggagatcgtgcacctttaa

SEQ ID NO: 358455 - DNA, 2022 bp, Pseudomonas aeruginosa
atggcaaccttgcccgaatcccctgagtacgcatcaggcatctaccagatcgaaacgtcggaccctgtggtcggtggccccggaggggtttccaacaagcaaggagagcagttggcatgccggacagcctggctcaaggtgcaggtcgacggcttggtcaccggcagcatcgtggcaggcaaagctgcacgtctatctgccgtgcgtaccttgtccatcactggggcaggtatcggcagcgcagcgttcgacggcagcgcgaatgctgccatcgccctgacgctagccaacagcggtgtgtcggcaggtacttactcaaaggtgacggtcaacgcgaaaggcctggtaacggccggcgcggcgctggtagcgtcggacatcccggcgcttgactggagcaagatcaccaccggccgcccgacaacgctgggcggatacggcatcaccgacgcgctggccaagagcgatgcggtgacctctccgacgccgaacaagctgctgttgatgaacagtgctggacagcttcccgcctcgatcacgggtaatgccgcgacggccaacaagtgggccgttgcacgcacgctgtcgatttcaggggacgcgaccggtagcggtacgctcgatggcagcgcaaacgccggaatatcggtcacgctggctaataccggtgtcgccgacggcatctacaccaaggtcagggtaaaccccaagggtctggtcatcggtgcaaccacgcttactaccgccgacattccctctttggatgcctcgaagatcacaagcggccggctcgatttagagcgtctgccgttggtttcccagggactggccacggctgtgcataccagcgttgatcccaactcggtagtcattcctctggtactgaccaaccacgcgaatggtccagtggctggccgctactactacatccagacgatgttctacccgagcgtcgaaggcaacgcgacgcagatcgcaaccggctatgccagcgtggctgacatgtacgtgcgttatgcgtactcagcgacagccacgacggacccaaatagccgggtgtggtcggcttgggttcggtgcgatctaggcggtgctttcgcacatacacccgatggcgaattgggggctggggtcaatctggactcgatgattgcgtcgggatggtggcaccaaccgttcacggcgaacgcaaagaacggcgcgaactatcccgtgggagaggccggcttgctgaccgtccacgcgcccatttccacgatgatttatcagacttaccgtggttacgccgccggcggtctgtactggcgctgccgctacaacggcacctggtcagcctggtatcgcgcatgggactccggcaatttcaaccctgccaactacgtggccaagtcggagtacaactggtcttcgctgccagggaagcccacgacattccctccttccgggcacaaccatgatgcaacccagatcacctctggcgtcttaccccttgcgcgaggagggctgggtaacggagctggccaggctcaaacagccctcaagcttgctactgccaggactatttcaatcacgggggcgggaacagcttcagtatcgttcgacggtagtggaaacgtcagcctgccgttggtggttaacgccagcaatattcagacgggcatcttaccgcttgcacgcggtggcctcggcgcggccgacgcaccgacagcgagaagcaatatcggcgccggaactatcgcaaccgcttcacttggcaccagcggctggtggcaggacaacgacacgggacttatccgacagtggggcgtcacggcctctatcggcatggacagctccgcgacaatcacctttcccagggcatttccgcgcaacgtgttcggggccaactggaagcaacgcgcaccaggtgatcaagcttcgtcaggcaaccaggtaatcaccaatctgacgaccacaaacatgacgatctaccagggcgataatactgctggccctgtctattgggaggcgtggggatactga

SEQ ID NO: 358456 - DNA, 1107 bp, Pseudomonas aeruginosa; identical to SEQ ID NO: 348958

SEQ ID NO: 358457 - DNA, 177 bp, Pseudomonas aeruginosa
atgcagtcacgcctgatcgatggcctggaatgggacctggacgaggatggcagcggcggcctgtgcaacgtccatggcgacaaggtccatctgcgccagggcgacatggacggcgcctgcgggccctactgcctggtcatggcgatgctggtccgcggccaactgcgccggctgtag

SEQ ID NO: 358458 - DNA, 225 bp, Pseudomonas aeruginosa; identical to SEQ ID NO: 330097

SEQ ID NO: 358459 - DNA, 357 bp, Pseudomonas aeruginosa
atgggtgccgactcagcgtgggctgtgtctgagggggcggccacggccaaggctctggattacagtctgaaacgctgggtagcgctgacgcgctacttggataatagggcggtgcccgtcgacggcaatggggtcgagaaccagatcaggccatgggcgcttgggcgttccaattggttacttgccggatcgttacgcagcggcaaacaagcggtagcgatcatgaatttgatccagtcggcgcggatgaacgggcatgatccgtatgcctatctcaaggatgtgctaacgctgctgtcgacgcagaaagccaacgagatcgaacagttgttgccgcatcagtggatgctgagctga

SEQ ID NO: 358460 - DNA, 315 bp, Pseudomonas aeruginosa
atgcgcatcacttctgggcttgtggacagcaagctggtctgcgatgacttcgcgggttacaaagccggcttcgagcagggcatcaccgaaagcggctgtatagcccatgcccgtcgcaagttcttcgacctgcatgtggcgaacaaaagccagttgtctgagctggcgctgcactcgatcggcggtctgtatgaagtcgaacggcaggccaagggcatgagtgtgaagatcgctggcgattacgcccggaaatggcggtgctcatcacagaaaagctgcatgaatgggtgccgactcagcgtgggctgtgtctga

SEQ ID NO: 358461 - DNA, 213 bp, Pseudomonas aeruginosa
atgtatacaggctattggattagcgacggacacatcttcggacgtagagggtataccaagcattggctttctgaggggtatatctatgggcccggaggatataccggcttctacatcagtgatggccacatctatggtcgtcatggctatacccactgctttatcaatgatggtcacatctttgggaaggctagtgctctcccgtggaactga

SEQ ID NO: 358462 - DNA, 1764 bp, Pseudomonas aeruginosa
atgcttagaaacaatacttcgttgaattacaaggctgtatgtgagcgcgatgagaaatcgggagagcgaagggccatgttctttgcatccgcaattgacatttctttgtggagtggcattcctcagaaaatgataattgacggaggagatagcgctgaaaccattggttttcaacgaatagagaaccaagccaggatagaacagataaagagtttctatagcgaaccaagaaatatcagctacaaccctatactgtgcgctgtgagatctcccgcagataaagcagtaagctttagcccagccaagggagaacaagatcaagactcacaaagtggaaaaatagaaatcttcttacaaagacttgaagataaaagcttttcagatctatttgaaatgttacgacgctccctagatgagcggctaggagaggacctcgagggagctactcctagcgagcaatatatatctaaccttaagcgctccttgttcaacgaggacactcccgatgatgagcctccattacaagatagcgaagaaatagagggcacatcagacaccgaaggtgttccaagtgttgaatctcacctgatcgaatttcgtaaagctatcgcggcgagagaacagctgtgccttgagggagcagcggatggtcgaaacgagtttgcaggctttacaaaggagcgccttatatcctttttgctaccgatagttctggtagatggacaacaccgattgaaaggcgcgatagccgcagctcatgaagcgctcagctccgaggcaatgcaaaataagcagcgtgatattttcgaaaagctaagcgcgagcttaaaaggtatagaacttgaggagcaactgaacttagagaaacttaatctacttcgagaagtatcaccagtattggcggtctctctattactagatgctgaaccagctgaacaagtctttcagtttgtcgtcgtaaaccaaaaatcagtaccagttggaaaggccttactaggaactattgtctctacaaccctgacggaaaacgagcttgaaaaggttcgaaatcgattaatcaatgccgggatacccttggaaaactctagagcaatgacaaaacttgttattgctccagagagcccatttcataataaagttgatcgcggcttaaaaaaagaggcgtctgcagacttactccaatggactgtattttcgggcttggttcaaatcgttagatccctacagggcgcaaagctttatcacgaagatcgcggactagattatgccagctgctggagagaggcatatctgatccaatctccagtgatagaggattatgcagtaaaaggatttagctcacccgtggagtattgggcgagcgagaatggtccatgggagtcattctttatcaatttctttaagtcagtacgagactgtctgtccaatataaactcagaagaagcggacaattactggggaaaaccaaaaacctcaaacatattcaataaagtttatttaaatatacttctcgctgacttttttgaatatctgtattcgaaggaggtcagactcaactcaactaacgaactagagtcactggttgatgcctggctatccggggcatctagtgacttctttgctaagagctggaatctcaaaaacataaagaaagatagtacggcaacgaagaaaaattggtcggcattatggtacaactaccgcagagcaccgagcatgcttaagaaagtaccatctatcaaatcattttcggacgggagataa

SEQ ID NO: 358463 - DNA, 951 bp, Pseudomonas aeruginosa
ttgtctcctaatttttatctttccgcatactcatttgatcagaccgtgtgggaccttggcataagccaaggtcttgcagatgtagctgtcgatcagaaaatacatagacatagaggctactatcttgagtccgacattagaagactttgggctcaatggtttattgaaggcgccctagatccttacgcgctaatagaaaaatttggaacaccagtattaatggatataatgcgcgaagtagagcgctcactagaaagcactttcaatatacctacaaacatatcatggccaaacattcgatcttctataagcgaggctctactaaaacgcatagagcaaataatttccatgcagaaaagaaaaccttttaccccaaaggacaaagagctacttttaacgcaggcaggtcagacacctagatgctggatatgcggtgacgccttttcaaaggaggctatctctatatttaatggagatagcgcagagataaaaacgccttactacatagacatactacgccctaaaggccttaaggaaaggcatctaaaaatagaaatagatcacgtctttcccgttgcaagaggaggagaacacgacattaccaacttccgactatgttgcggctggtgcaacattcacaaaaaagatagaacaactctttacgaagtcaacggagcgcctctaagactgaaacctggcgcaataaccaaaaatacaactatacgaacgatccctagaagcttttgggctgtacgagcaatgggcttacttcaacgttgcgagcatgaaggatgcacagcaacagcatctaacgcctctctgctaatatcccttatcgagccgagtggagcagcaaccccaagcaatctcagggttgtctgctcagaacatgacacatatagtacatcccggctccatttggcccgcgatgtagagtttgcattaccctag

SEQ ID NO: 358464 - DNA, 1986 bp, Pseudomonas aeruginosa
atggccaagctgactattaaccacatttatattgaaaacttcggtccgttccgcgagcagcagggtttcgatcttagcgtacagactaaacgtcccgttattcttattaaggctctcaatggcagcggaaagaccaccttactcaccgcactacagattggcttatatggctacaaagccattaacgtggcacggcgctcggaatatgaacagctgattaccagcctgcagcgcaaggacgctactggacctgcgcggatcgagatgcagctcagcattgaggttggcgagcatacccaggctctgacaattcgtcgcgaatggctgccgaaagagaagggatatcgcgagcagtttcgtgtatttgttgggcgccatgaagacatggtgctagccgaggactgggatgattttatcagtgggatcctgccggtagagctggttcacctatttctttttgacggtgaaaagattgaagccttggttaacccggagcgtctgccagcactgttgcgtcgggctacagaggttttcttagggttaggtggtattgatgctctggcgagtgatctaagggccgtcgagcggcgtgcaaacaagaagactcatttaggcgatgtcagcaatgaccagcatctggccgaagagtacgaattacaactcaaagagctagagcagcgcattgaaatgttgctacaacgccaagcgcacgcgagaactgaattggatgatgctcagcgtaaacttgagagcttctccgtagaggctcagcgtagtggcctaaaggcttaccagcaagctgcggaattacgcgcgcgagtggagttatgcgagcagcaacacaggcaggcgcgtgcagttctggtggctgcattagaggatccgctgctgccgttggcctggctaggacctctgtgggagcgttacaaggaacagtggcaacaggatcaggaggccaagcacgctcacttactttctgaagagtttgccaaacgtgaccagcgtattctggcggtgcttgctcgccaagtgccgaaggttgaggctgcggtggcggagctactagcggctgacttacaaagtcttcaggccgccaagcaacattcaccaatactgttgtctggtggtgatccagcggaaatcgagccacgcctccggcaggccaagcagcgctttaaagaagcgcgtgaggccgttgcggctactcagcagtctatggaaaaagcccagcacgcggttgatcagatcccagcatatgagcaacttggcatggtgtttgaggctatgcagctacacactcaatccgtatcgactgctgagtggcagttgcaggagcttaatcgtgagcttgaggaagcacgagccaaacacgcgcattgggatgttcgttataaggctgcattgtctcgtgcccgtgctgagcttaaggaaaatgcgttccagctcaaagcattggaagctgccgatcgtgccaaggtggctctggatgtcttccgcgaccgcttgttggcctctaaagcccagtggctatcagatatgatcactgcggagttcaagcagttgttgcgcaagcgcaatctgatttctcgtgttctggttgagccgcaaacttatgcagtttctattgaggacgtaaatggtcatagcttgccaatggagcgcctatccgcaggagagaggcagatcctggcggtcgctgtgctcagtgctttgattcgtgagcgtaaagggcgatttcctgtggtagtggatacgccattggcgcgcttggatcgcaaacatcgcgaggctttgatacataacttctttgccaagatttctcatcaggtgttggtactatcgacagatgaagaggtggaggggtctgtctatgatgctttggagcagcatttgaatcgggagtatgcactgacttttgatgatcaagaacgtaggagtcatgcaacggttaaggtggcgcaaatgagcctggaggttatgtcgtga

SEQ ID NO: 358465 - DNA, 750 bp, Pseudomonas aeruginosa
gtggccggcttcaacgcctacagccgcggcattgccatcggcgccgatggcaagctcaccgaccagttgaccctgggcgtggcctacagcttcctgcacactggcgtgaacagcgacaccggcaataccaccgatgtcgatggaaatgccctcaccctgtacagcggcttcgaacagggcaactacttcgtcgacgccaacctgagctatggcctcaacgacaacgagagcaagcgacgcatcgccagcaccacggccaaaggcgactacgacagccaggtcctaggggccaacgtcgtcggtggctacacctatcacctgaacgagcagttcctggtcgagccacgcctggctgcacgctatgctcgcgtcgatatcgatggttaccacgagaagggttcgtcggcggctatcaaggtggatagccaacgctacgaagtggcggagctcggcgcaggtatacgtgtggccggtgatttcccggtcggcaacggcaacctgcagccgcaggccaagctgatggcctaccatgacttcgctgccgacgaagcccagagcacgtcgacctttgtgctgggtggcacgcccttcgtgagccagggtgccaaggcggtccgcaacagctacgaagcgggtgtcggtgcagattaccacctggatgcggtcacgattggtgtcagctatgactacaccggcaagaccgacttcaacgccgacaccttcaccgccaaggtccgttacgacttctga

SEQ ID NO: 358466 - DNA, 1260 bp, Pseudomonas aeruginosa
atgctcaacaacattcgatttgatctttccgactatctcatccattttttccgggacgtcgatcagtgcagctccgaaggcatcctcttcccggagcatgtccgtttcaacaacgtggcagagtccagtgtgctggattcgctgtttctgatgcgctgtgcacttaggcacaacaaaatttttgcgacctggtcattccgaaacgacaggccaactatctatggtaggtcgccagcagtctgcttcacggatatgccactggcggcgttcgtgcagtccagcaacgaacgtctgggaaggggtgaaaatgttgggcgttacgccttcatgatcccaaaggtcgctatgttcagcattggtgcccgtcctgtgatctatggcctaagtcaggaggtttgggagcgcagagatgcccaccccttcagggttcttgagacagacgtgctacccattggtgagcagtatcgttacgtcgcctacagtatcggcgatgtcagaacaattgactggacgcatgagcgcgagtggcgttggcgctaccaaggtggtgaatcgcatttcgaaccagatggggatggcgacttggtcgagactctagcggagatgccgggattgaaccttgggaactcggctatcagtggaatgggggtactggttcagaatcatgaagatgtgtcgaaaatcgtttatgacatcctgaccttggtggacgccaatctgattgatcagtcgatgatcagctttgtgataccgctgtgtgaggtggaacagcttggaggcattcaggatccgagccgagtttccgacctgattaatgaacattctatcgacttgtcaggctatttctctatctctgaggagagagttgaagagatcaataatgaggtagatagcatcatcaggttgatcaccacgtcgggaggccatgagacaaaagaccgtgatgacggctacggaaaatcttgggtctggattccggacaacggttcggatttggtgagagctttgctttctgcaggccgcctgatcgtcagcaccgagggccgctaccttcttgatatcgccaactccgattcgttaccgcgaggtttcgaggaacactactgcaagagggttgcccaggggttagccactgaatttgaggtcaacgccacttacttcaccgttcggaacagccaaagctgcgacggcataccctactacacgggttttgacgacactgatcatcctttcttcaactgcaccaaaatatgtgactag

SEQ ID NO: 358467 - DNA, 801 bp, Pseudomonas aeruginosa
gtgacattgctgttcaccgaaaaagaatggaacgacgcgatgcctgaccttaccaactccatggccgaatatttgcggccgtaccggagcggagtcttcgagagttttacaaatgatggtgaggaatggggcgagggatggggaagcggatcatatcttcgtgtaggcgagacggtgtatgtccttaccaataagcatgtctcatcagtgatacgggacggtcgaaagctggcttatcagttcgacggccaagacgatatccgcctttttgccagagtttataacgagatttctgctccgttcgatctaggtttgcttcctgtcgctatgtctgactgggatgctgttgagcacagctccaaggcgattacggtggaccagatcaccttagctcatgttcccgtcgaatcggaagtcctcgctttctctgggttcgccggtcaaaaggtcagttttaattacaaccagcttaacagccagtgcgtttgctccttatcgaaagaaatcgacgtccctgagcatcctgacattaacccccgcttccattttgccctcgactacaatccgaatttggcgacatccgttattggaaatactggtttgccgactccgcctgggtttagcggctcgacagtctgggacacaggttttgtcagggccaaaatgatgaatgagaaatggacgcctgaaatggcgcgggtgacaggggttgtttggggctggccttcctgcgcgggctctatcatcgccacacgcgctaaatatgtgcggtcgttcctcctaggagtcgttgccctctaa

SEQ ID NO: 358468 - DNA, 372 bp, Pseudomonas aeruginosa
atgatgccgttcgacgcgcctttcacgcctgtttatgaaacccttcaacagaccgccgaaaacgtcggccttcgttgccgtcgtgctgacgatatctgggaaaaccctgcgatcattcaagatattgtctcgctgatcgaccgttcgcgcgtcgtcatctgcgattgcacaaaccgcaacccgaacgtcttctatgagatcggcatagcccataccttgggccgcgaagttattctcatcacccagaacgccaatgacataccgttcgatctccgacaccttcgctatgtgccgtacctgaataatgcagaaggccgccaagtcctaggtcaaacgcttgagcgacgcctggaagtcatcattgagggctag

SEQ ID NO: 358469 - DNA, 294 bp, Pseudomonas aeruginosa
atggtgcgcagcgccatgcgggatgtggtcgcctggaacctggcgaccaccgtagtgctctcggactacgccagcatgaaaccacacgtgcgcaacggcttgcggcacatgcttctggatcccgacgatactctggagatggcggagcagagtgaagtgcaaccatgcttccgccctggcgccggctatcataccggtgcctccttagggctgttcccggccataaacggtcatccggacgtaccgaattttggacgctcaggtgaccgttgtaccactgggggcggtcattga

SEQ ID NO: 358470 - DNA, 987 bp, Pseudomonas aeruginosa
gtgtcgaacgcaaagcgcgagtttcgaggggctgacagcattcttgcagaggacctcactagagatgccatcgccccgtttttgaacagccgtggctatatcgttattgatgatgagcgccataaaacaggaactgcagtccaacagtttatctctgtgcgcgctcctgatggccaagtgatgaagatgcgtgtccggctctgctggcgccgtggcggtcgcaaacctagtgaaaatcagtactcagctgcacagctggctgtacgtcccagaccgggagggtgggacgcgacattcgagtacctagctgagcgagaccgcctccacgatgtcactcataatctgatcctacagcgcgacggcgatgccatcatctacgcagcgctcatcccggtgaaggatttgggtccgatctggaaccgccagcgcgaggtcagtaatgagctactccgcacaggtcgtgtgggacggatgaagaagaaccatgccgagaacggctccagcccaacaatttggctccaggacgaccgatctcccgatgctcacctagtggcagatgtactctggcagtggcctagtgtgatcgatctcgccgagattcagcctcagcctcaggcgccagcagccgccatttcggtcgacgatacatacgatgattgcccggcgccggattattccgccttgggtagggacggtgctgaacgcgttgaggttacgcgatcactggtacggcgagatccccgcgtccgtcatgccgttttgaagcgtgccactgcgtgtgagcgtgctggctgtggcgagaagaggaacttccccggctttctggatgttcaccacatccttggtgtcgagaaaagtgaccgggtatataactgcgttgcgctctgcccgaactgccatcgagaggcacatttcgcacctaacgccaaagagctaaatgctgagctacttgcctacgccatgcagtaccaggacgacgtcgtgtag

SEQ ID NO: 358471 - DNA, 192 bp, Pseudomonas aeruginosa
atgacgaaacaacagaaaacagcgctgaacatggctaaattcatccagaatcagtctctgctcctgctggagaagcttaacgagcttgatctcgatgttgaggccgacctttgtgagaaactccacgatgatgcggagcatcttttccgtacactgtcctcgagactggatgaattacaggatggtaactga

SEQ ID NO: 358472 - DNA, 1218 bp, Pseudomonas aeruginosa
atgtgtataagagacagcgcggaaggccatctcggtccagcgcggctcgatgtcctgggtcttcagccaggccaggtaggacggctggcctttctcgcggaaggcggcgaggtcatcggcggacggctggatgatctgcatgcccttttccttgaggaacgccaggtcgcgctcctgctgggcagcgaccgcctcgcggttcagccgggtggcttcggcggcggcgtcgagcagggcctggcgctcctttgccgggaggctggcgagcagatcgccgttggccaccaggaactggtcggagtactggatgttggccagggtcaggtacttctgcacctggtagaggctgccgaggatgatgtaggaggtcgggttcatctggccgtcggcgacgccggtgcgcaggcccatgtacaactcggtccaggggatcggcgtgccggaggcgccgaaggcttcgtagagcgccacctggctgggatccatggcgcggaagcgcaggccctggaagtccgccgggccgtggatcggcttcttgccgttggtgaagttgaggaagccgccttcctcgaccaccgccagcagctcggtgccggtgcgctcgcggaaggcctcgcgggcggcctgccagtagctgccgctgtcgaagaaggcgtgggccgcggcggcgtccttgaacatgaagggcgtggcgctgacgtagatctccgggaacagcggggcgatcccggcgaaggaggcgatgttcaggccggggccggtcatcacctgttccatgcgctgctcctcttcgccgagcatgctgttggggtagagcttgaactgcagttcgccgccgctcttttcctcggccaggcgcttgaggttgctggcgaacaggtgcaccaggttcttctcgctgtcggcggcgccgttatagctcaggttgagggtggtggcggcctgggcgaggctgccgcccaggcccagggcggcggccagcagtccggcggcgaagcggcgggcgaggccgcggcgcggattcgtgtgcatgttgttttccttatggcagtccgaacggtcgagggatcggcggcacttcttgtcggggcgcggggccgggtgctcgcacgaaagcgaagcaacgctagccgttgtctcgttgactattcaagtccggacgtgatgcgaaaaaggcaacgcctcagcgctgcgagagcccgggcgcgtcgccactga

SEQ ID NO: 358473 - DNA, 306 bp, Pseudomonas aeruginosa; identical to SEQ ID NO: 318892

SEQ ID NO: 358474 - DNA, 321 bp, Pseudomonas aeruginosa; identical to SEQ ID NO: 358250

SEQ ID NO: 358475 - DNA, 201 bp, Pseudomonas aeruginosa; identical to SEQ ID NO: 358251

SEQ ID NO: 358476 - DNA, 1800 bp, Pseudomonas aeruginosa
atgaaagatatggcaaaaatagttcaggacctcaccgtaaaaggggatgccatagaacgcatatatggaaacttcattaatcatagatatattgttaataggcgttatcagcgtaagctggtttggactctagaagagaagcaacgattcattgattcaataatttcttgctttcctgtccctattatccttctggcagagcaaaaaaccgggcttgcgcacggagattttgaaattatcgatggcatgcagcgcttaaatgccattatgagttttatcgaaaatgaatatcctgtagatggaaaatattttgatctaaactcaatggctaccacaaaagcaatgctggatgatggcaagatagaacaacataagccagttatgtctcgtgatgtttgcgttagaattgcagcataccctgtgcctctatctatttatgagttttcaggcgatggcgaagtggatgaagtttttaggaggattaactccggaggtcggaagctttctaggcaagaactccgtatagctggatcaacaggacactttgctaacgcagtgagacagattgcatcagaagtcagaggggatgtatctgcttccgatatacttcctttgaatgaaatgaagaagatatccatcacgaatcgtgagctagtttatggcattgacgtggacgagcttttctgggtaaagcaaggcgttctaacaaaagagcaggttcgcgagtcgcgcgatgaggaaattgttgccgatataattgcctacatgcttcttgatcctaagcctgcttccagaagtgaggttcttgatgacttttttggctattctgatggggaaaatcaagagcaacgctttaattcaatagagctcgcaacacagaaaaacaccttcgaagtgatcagtacggacttcaatagagttttagaccagttaaagcttactttaaatatttctggcaaaacccttggtcagcttttatttaaagatcaaccatctagagctcctcgatactttcaagtagtgtttcttgctttccagaaattgattattgaagagaatctagagatcactgatcaagatagcttgataaaaatgcttgatggcggtggcaagaatattgctattcctgaaggcgggcgatggggggctgaggcaagatttaaatccgttgaggcattggccgggatatttagaaatgctttcggaccgtctaaaaagtatgacccagcccaagcacgctggataacaaaaatggagaatatattaaggcagtcttataccgaacagtctctatatgactttaagcagggtttcctgcgtctagatagggaaaataaatttgatgaagatagtttcaataaaatattaaaaactctcgccggaatagcaaatcatgccccaggcgcaaaggggtatgttttagttggcatcgctgacacgcttgaagatgctactagagttagagatgtgttcaaggtagaaccgataccatttgagcgcttttatattactggtgtagagcatgaagcgcacgccgtcggaaaaaatcttgacaaactgttaatggatatagtcgataagattaaacgctcaggcctatcggagccactcaaggactacgttgcaagaaatataaaatcgatacgctattatgataagactatttttgtttttgaggctcaagcccaagcggagccttcaaattttgaagggcggttctttgtaagatatgggaatagactggagagtgtcgagccagccaatttgggagagctttacagaaggttcatactgaagtaa

SEQ ID NO: 358477 - DNA, 960 bp, Pseudomonas aeruginosa
  misc_feature (853)..(862): n is a, c, g, or t
atgcctctctcggacactgcggtccgccaggctcgggccagcggcaaggcttataccctcggtgatagtcgcgggttagcactcgcgatagcggccagtggcagtaaaagctggcactttcggtacctttggcttggtaaacaaaagcgtatgtctttagggacttacccagaagtcagcctcaaggacgcgcggattcggcgagatgctgcccgggccttagtagcaaaaggtataaatccccagaaacatcgcaaacaggaacagctggtgcggcaactgaccgccgagcaaaccttccaggctgtcttcgaaaaatggcttgagtatcggcgacttagtctgaaatcaggtcgtcaaagtagccttgagcagttgcagcagattttccataacgacgtgctgcccgtcatcggaaaatgctctgtgtacgatgtgacacgtaccgacttggtgcaggtgttagctgggatcgaggatcgtaaggcgttcagcgttgcccaaaagtgcaggctctggctcaagcagttttttcgctttgccatggtcaagatcccggggcttgagcgcaatcccgcattggatttggaggccgtcgcccagccgagaccacccgtcatacataatccgtatgttcgctttgaggatttacctctggttctacagagcttgcgtgacttccacggtaaaccacaaacccgtatgggcttgcggttactactgttaacgggagtgcgtactggcgagcttcgatccgcgacaccagatcagttcgatttggaacgaggactttgggttattccagcagtaattgtgaagcagttgcaggtggcgatacgcaagcaaggcaagnnnnnnnnnngacagaggcaagaggccgcaagacgtgcctccctacgttgttccgctgtcggaccaagccatccagattattcgccatttgcttggcaaaatgcgtag

SEQ ID NO: 358478 - DNA, 1059 bp, Pseudomonas aeruginosa
atgcttcagagcggctatatcaattttttcagcgtaaataaatgtggactgtatcgtcatttcggggaaaacccagtcggtttggaattgggcgaagcacttactaagctcatgaactggaaagaagacagaaactttgaagccactaacccttgggatgtaacaaaaaagagaaacaagactcactgctactgtcatgggattcaccacgacactagtacaggagactttttcttagtgctctggaaaggtgactcggatcgaaatggcccactgtatgggataacagtaaaccccgacggttcgattgagcaagtggtcgaacagacaaaaaccaaaggtaacaaacagatgatctggggacgcccatgttattactgggtaattccagagcttaacatggtagcctcaataaaattcgataactctcgaactgactcagccatgttccaagactggataagcggctgtattaatttccgagtaccgttacctgaatatattgtctcctcgacagaaaaaggtttcacacgattcgaaataaaggacgacaagttcaaatattatttccaattcgatgtatccatgaaatcgctctcaacgtcatctgcagaaatgcaagagctggcgagaaaagtaacacaaatcgtgcggcgcgagacggtatctatcaaggaagttaacaagcggcagggcttcgcaagaatatttaaaaacttcgaagtaccatatatctctgctgaggacaactcaacacggcaagtagagttgcgcatagaggcaaagccgactgttgaagagctcgaacacattatagaaacttatgctgcggaccatgatacgaaatcgtgggaagacgtcggctttgtacttgataaacctacctctatcgtttgggctagtagatatcgcttgaccgatcatatctctatcgaggataacggccagccagttttcaaagcagatgaaatctatgctaaagttaaggagaaccgagacagatacttggctccaatcaggaaagacatgttaaaaaaacaggtcgcagcaaatgattaa

SEQ ID NO: 358479 - DNA, 1116 bp, Pseudomonas aeruginosa
atgaacaagctagggagaaacgacgaatgctggtgtggttcgggcaaaaaatttaagaaatgtcaccttggtcgcgagtcagcccagccacataaaccttgggatcttagcgctgtccacaggaaacatttctccaagaagctgtgttcagcccccgacgccttccactcacaatgctcggggtcaatcattgctgcacatactgtgccccgatcgggaagcctgaaccagatcgcagatgatggacacgttatgtctttcatgccgtctctggaggggctgatcaagcacaatggtgttttgaaacctgaaagggtgggtgtccgacgagcttctacattcagcggcttctgttccacgcatgatgatgggctttttgcgccaattgagaaggatgaattcgtagggagccaggaacagtgcttccttctggcctaccgtgcttatgcacgagagatttacactaaacgtgcggcgtcagagcaggccaagctttataaggacctggatagggggcgttcgccagatcgacagattgaaatccaggcgttcgcccacctccacggcgcaggtattgatgctgcgttgcgtgacataaagattcataaagcgcgctttgacagatgtttgacgagtggagactactcatcggtgcgctcctacatcatcgagctagaaggtccaccaccagtaatgtgtagtggtacctatgcgcctaatgtcgatttttgggggaggcagttgcaggatatggctgacctagcactggtcccagaacttatgagcgtgacctcattctttggcagagaaaaggggcagatagttttttcatggatggctgaggatgacaggtgttgtatggctctaatcaaaagcttggagcaaatcaatgacgaagatctgtcatccacgcttgtagcctatttctttgaccattttgaaaatgtttttgcctctccgtcttggtgggaaggattagggcagtcgaatcaagatgccttgatccaacgaatgatcggtgaagtaggtgtcgcattcgggctcgtgccacctagcaagtcgcctttcaaaatagcaccgtgggtcatatccaggcgctatcgagtcggcttctag

SEQ ID NO: 358480 - DNA, 699 bp, Pseudomonas aeruginosa
atgacgcaagcagcttggacgcgcgacggtcggccggtggatgcggcttccattcccggtgccgagtgggaggcgttgaaacaggtggcgcagctaggtgacttcgtgatgccgtgctgcaaggcaccggcagtactcaagacaagcatcaatggtttgcctttcttcgcccatctgtcggacgagtgcagcactgcgcccgagacaaaatggcataagtcgggcaaggccgcagtgatggccgccttaaccggcatgggtatcgagaaccgtgatgaggtaccgggccgatcaccaagcggcgacaagtgggaggctgatgttctcttctcggtttccggtcgcaccatcgtcgtcgagctgcaacgctcctaccagcacctacgcgacttcacgcgtcggcaggagcggtacgctacatcgggcattgagtgctactggctggtccgcaaagagacattcatgaccttaggaaaggccacgtcgcgcctactgttgaagcgtgatttcggcaacgtgtttccgcctggtggaatcggtactggcatgctgcccgagttgccggtggcgatgctggacaccgagggcgagcaactggttcagttcggcgcgttcaaggctgcgactgtgtctgtgtggttggcaggcatccttgatggcgcataccaatatcgcggcggctcttggaatcttggttga

SEQ ID NO: 358481 - DNA, 162 bp, Pseudomonas aeruginosa
atggccgagtacttcagagccgatccaacctatgcagcggagttgcttgctgaagtccgtcgcgatggcagcccggacgagttggctattctgttgcggcagatggacgaggcgtttgggagtgactgcaaacgttcgggctctgcgatgagtcaactatga

SEQ ID NO: 358482 - DNA, 879 bp, Pseudomonas aeruginosa
atgagtcccgagagagtcatccctttattcaccggtagacggcagcagatggacgatatagcagttaaaagtattgccagcgctcttggacgttttgctaacgccatgaggctctacggcgaggccttcatcagatatcgagagttggttgcaatcgatcaagaggaagctatccacaatctcgatcgagcatttgagcataaccttgagggctttcataccttgtatgatgtgtctcagggtttattcgattttcatggtcatcctgatagcagtttactaattgctctacgcaatgcactccatcatcgtgatcatcctttgttccacagcttgctccagatgatttggttagatgggaaaccggaacgtctccatggagcggagtatctaatagccaggcatcgagcaacaggtggtaatcctccgccgatgatgcacttgataaagttagaagatatttatgagcgcctcgatccgcgccgcgaatctgtctatcttaatcaaatgggtagggccaatgccttgcccagattcgttgcgctggaaaatggtcttgccttcgataaagtgtggggcaaagcaataaaagatcgctatcctttcaagcaggtgtatttggatatattgccgatctttaattccgctgtgtcgcgtgtttttactgcgttggctggggcaggggtgccgtttgaggggtttgatgcaaatgcctacaaatccacgtttattgacgagttgagaacagaccttcagcatttcgatttcttcggtctgcgcatgcatgagctacagatagaattaggcccgaagttcacaatccaagaggcttctataagccggggctgtacctatgaaaaggtgatggaggccgaatag

SEQ ID NO: 358483 - DNA, 813 bp, Pseudomonas aeruginosa
atgcaattcgccccagaagatgggcgggacgccacgctgaagcagctaaatgaagtcgatcaccgggttgccactggcggagaggctgtgaacgaggcggtggacttgatcgaaaagttgttcgggaagactacgcctgtaccggccagcgataacatcaaggtgcgcgctgcggatcgagccattgctaaggttgccccatttcaccggcaaatgaacgggattggcgatgccatcattatcgagacctacattgatgcgctagccgcgcgtaaagacgaggacgtgttcgccttcgtgacccacaacatccacgacttcagccaaaaaggagctgacacgcgtatccctcaccccgatttggcgccgctctttgatggtgtgagatcgcgatacgaaaccaaccttagcgcgctgcttagcgagttcgcgagcgacctgatcgaagagaccagatttgagcgcgaatacagccaagaccccaggcagctttctgagttgcttgaggcggagagcaagctgacaacgcaggtttggtacaacaggaaatggaacatcatcgctcgtgtcgaagacggtgaagaaaagctggtgtctaaagaagtttgggaccaagccaccccggaagaacgacgaaacctaatggtagatacgatttgggaaggaatgctcgccgcaatgaagagggccgaagaagagttcggcaccgaagagctggggccttggaccgacttcgagtgggggatgatcaatggcaagctgtctgccatacgctgggtgctcggcgatgagtgggacatgctcgacacatga

SEQ ID NO: 358484 - DNA, 138 bp, Pseudomonas aeruginosa
atgacgaacgaccacgaaccgcgcgtgcgagagctgtcgccggccgagatcgaggcgctacgccgggagatgagggagtctatcgaatgggcaaaagccgagttggcataccggcgcgttgtgaatgggggggagtga

SEQ ID NO: 358485 - DNA, 228 bp, Pseudomonas aeruginosa
atgatgaagacagctcaccgcatcggcgttttggccactcaactcaacgaactgcaagcctgcctcggtcgcgccagtgggcggtccagcaagaacgttacggaagcccagcgcattgcggccgagctggcttcttccctcgaagattggcaccttgagacgctgcacattcctaaagcagagcgcggctcgtaccgtgcgcagaacccctatttcgtgacgcactaa

SEQ ID NO: 358486 - DNA, 627 bp, Pseudomonas aeruginosa
atggcggtcgaggtaggcgtcgaggctggccagtggcaggcggggctgctggcgcggcggctggcgctcgctggccaggctggcgaggagcaggccggcgccctggtgggcgatcaccgggtcgttgatcgggccgctggccagccagttcaccagttggccctgggcgggcgtcagcgacagcgcctgcggtcgctcgaacagccgcctgccggcttcggcgtgttcgcccaggcccagcagcaggctgccgtcgcagggcaggtcgaggaccaggcagcggctgccggagggactcgagcaggcatgccgggcttgcgccggaaccaccgcgaaggtctgccgcaacacgcggctgccgcgcccctcgacctcgaagtcgaggcagccgctgaggcccaggaccaattgggcatggtcatggctgtggacgatctggtcgtggctgtagtggcgcagggaaaggatcgaacccatggcgaagctcccggaggcaggcgcccagtctacccgctggcgccggcgacagacagccgggccctgtcacgcaacggtcgccggcctgtcacagtcgtttcaccggcgccggccaagatcggaaaaacaccgtcggagacccgccgatga

SEQ ID NO: 358487 - DNA, 165 bp, Pseudomonas aeruginosa
atgaatgcgaaaaaaacggtgcgtttatggatcaatctgcattggaaaaggcaattaacgctgctggaggtgggcgggcactcgcacaagcaatggggcttagcccaatggctgtttcccagtggaaaaagcgcggggtgcctgctgagcgtgtgcctgctgtag

SEQ ID NO: 358488 - DNA, 519 bp, Pseudomonas aeruginosa
atgcatacccaacacatcattctcgcggctaccactctcgccgcgctgctgatcctgatcgccaccgcctatcttgctgggcgcaaggacaggaagaacgcactacagcaggcggtcggcgaagcactttacctctgccgcgcctcgcacagccaggaactgacggcgctgcatgccgacctggccaagctgcgcaccaatgcccagcgccacgaagagcaacaagcggaactgaagcgcctggagatggagctggagacacgcatcgcgaccaatcatcggcaggctgagaccgtaacgctcctccgcgaacagaacttggccgccgaagaactggacgccatccgcaccgccagtcgcctcctcagcggccacgctcgacagttccaaaagaccggcaccaccaagcgcaacgcagacgccgaggcccagcagcagctcgccgcgatcctccagcggctcgccctcacggatctggccagccagagcgcagacgccgaagcgcaggaggccgcatga

SEQ ID NO: 358489 - DNA, 546 bp, Pseudomonas aeruginosa
atgaaccggatactcgacattctgattccccgcttcatcaccgagcgggtggcgctgatcgaagcaaatgacggccatttggagattgcatgcgccctctctgacgtccggcctggcgagcgcttcgacgccattgcaacaatgcgcggcgtcaacctgctgggccgcatcatcttcccacgcatgatcggcgccccccgaccgtggccggagtacatcgaaccgctggacctcccgccctgcccgttctgcgaaggaaccccggcggtcgcggtacaaagccccttcacacctaacgaccctgtatgtcgacaggccgattacgggtgtgatgggcgcgatgtggacgcctatgtcttctgcgaatcctgcggcgcccaaggaccgcagtacgagaacgtcattttcgaagaggctgattttctgagcgcgaagatagaggccgcacgcctctggattgagcgcacggccaagcatcgccacctctacgatgccaacgccaagaacggactcacgacctacccgcgtccggagaaccgcccatga

SEQ ID NO: 358490 - DNA, 186 bp, Pseudomonas aeruginosa
atgtttcttcaactcctaaaatcgaagacagaagaagagaaggaactcacgcgactcatctcgcagcttccagatgatctttctgttgtgggccgcggcaccattgtcattaagcctaaggcagttttcgactcgcccgaattcaagactgcggtagaattcgccacaaagatcgttaaacgataa

SEQ ID NO: 358491 - DNA, 618 bp, Pseudomonas aeruginosa
atggtaggtcttgccatccatctggactgcctccgccaccgccgttgcgcccagggacaaccccagccgctccagcaggtgtccgtggcggtaatggcccaggatcgggtcgaaacacacacccttcaggcggccgacgtagttcgcgccgttcgtcacatagggctgctgcatccgccagtagggagggttctctccctccgtccggtcgtagtaggtgctctgatactgcatctggtccatcagcgctcccacgctgggaccgccaccctggatgatctctcccgagcgctggtcacgcagcgaactgaagccactcccgaaggaccagtttcggctgtaccccgttgtgttctggtacccctgggcaccgccgacggcaataaacccctgaacgccggaggcgccgctgaagctctcgtactgcccgacgtagaggccgagctggtacgcctcgctcgtgttttcgtaaccggtggattggaggacgcagaagatgaacgtctcggcgtccgcacagatctgccagtacgtcgcatggttccagtacatgtaccccaggtagatgacatgagcgtcattgctggtgggattggtgtcagccgaccaggtacgtga

SEQ ID NO: 358492 - DNA, 210 bp, Pseudomonas aeruginosa
atggcagaggttgcttattactacgtctacaaggatgccaagagtgaatggcgttggaagtttgtagcgaaaaacaccaagacaattgcggtcagctcagagagttaccacaatctggtcgattgcgagcattcgatttctcttatcaatacccaagggccaagcgctccggtcgtaggtgacgacagttttaaggctgcgcgtagataa

SEQ ID NO: 358493 - DNA, 258 bp, Pseudomonas aeruginosa
atggcgggtgccgcagaggcccgctttgatgaattcaacgagcaacgtataaaagtttacgggtatctcgtgatgcttgcgccccagtctgtaatggacgctcaggacgatcttatggaccacctactaaatataagtaatgggacggtggcatatgactggtcagaagtccgagagaaagcccttgtgctgctgaacgccgtccgagcagatatcgggatcagtaaagactcgataacctacaacggtgatctttga

SEQ ID NO: 358494 - DNA, 1638 bp, Pseudomonas aeruginosa
atgagtacatctgaaggtcacggggttttggcaaacattagtattccaaccgggcaagggaacgcggttgccgtagaggttagggcgggtaaaccagtctttatattggggcggaatggcactggaaaatctgccttggtgtttaatctctcccggcaactcggtcaaaaccttatatacatgccagggtctcgcccaagctattttgataacgaaagcctcagtctcacacctgcttcaagacgcagtctcacaagtaacttgaacgcgtggaactcgcagccagacattaggtggcgttccttttccgggacgtcatcgaatgaaaaagcaattcatgatcttcagcatgctgaaattcagtacaaaattgacgcggccaatgacataaaaagcaatggtttagaatctgaggctgttgctcggcttcaatctaatcactctccgcttgatcgtgtaaattctttgctaatgcaggcaaactttcctgttcagatgctcattgatagaggtgaattgagggctaagcaaggagggagtatatacagctacgcgaaaatgtcagatggcgaaagggcggcacttgtctttgctgcggaagtagttgcagccacttctggaaccgtttttctcatagacgagcctgaactgcacttacatccatctatcgtggtttcattgattaatgcatttttatcagagcgctcggattgcgggtttataatctgcacgcatgagcttgatcttcctgtgaatgcaaactctgcaagtatgatactggttcgggggagtcaatgggctggtgaggctgtagccttttgggacattgattttgttgaggatgccacagaaattcctgagtggttacgcgttgatttgatagggtctcgtcgaaaaatactttttattgagggtgtttctacaagtttggatcaaccattatatgcacttctatttccttcagtttcgatacgctgtcgcgaaagttgtcgagaggtaatgagggcggttgaggggttgagggccgtcgagcatttgcatcgtgctcaggcgtttggactggtcgaccacgatggtatgggaggcgagagaatgactgaattggaggcaagcggtatttaccctctaccaatttacgcagttgaaagtctttattattcgcaagcggtgctaacagccttggccgagtggcagtcgaaactttttggtattagcgtggaaaaaatgatggccgacgcatattcggctgccgtcggaattctgaaacaaaaaaacgtcgcagagcatcttgccggtcgaattgcagagcgccaaatgcgtgatcggctgctgcttgaaatcccgagtagggacgaactgataaatggcacatcgggggaggtgaacgtacgcatcccatccccgtatcctgaagaacttgacgtcatacataagatgattggcgaaggggatgttgcttccgtggtttcaagatatccggtgcgggagtcaggtgtacttggcgctcttgcgaaggggctgcatttcagcaaccgtactgactacgagcgagcagcgcttacgataattgcagcgtccgatgagcttaggtccgacctcaaaggcaggcttgggaatattcagtacgcgctggcgtaa

SEQ ID NO: 358495 - DNA, 309 bp, Pseudomonas aeruginosa
atggaggcaggcgacagacctaaagagcaacgtgaccccggagccatgaagtactgcgcaacgagcgacgacaggaccactgccgttctcgggaagatagccgaacagattccggcctatgggttcctcgctaacgtcggacaggttggctacaacgccttcggtgccgctgggactgactctcgtagagccgatcaggaatacatgacgggcgtgtttaacggccttcgcgggctcgtgcctaacgaccctttgagtcagaaactcttgctcatggtcatggaatcccaaggcgtagagattcgataa

SEQ ID NO: 358496 - DNA, 267 bp, Pseudomonas aeruginosa
atgctggttattcgattggcggggaagtggacgttaaagctggaccgccagataggcagttccggaaaacacgggatatgggcattccactgctctgaaagcactttcgcgccgtcttcgaacgacctgcggcgtactgcggcgatccttccagccgagcccaaggaaggccagacggtggacgtatcgatctgcgacaccgcgcactcgccagatggatggatcgccgtcggcgcaggcgtagcagcctacgaagcggagcgctga

SEQ ID NO: 358497 - DNA, 798 bp, Pseudomonas aeruginosa
  misc_feature (405)..(442): n is a, c, g, or t
atgtccggcgggttggcaatatgccggttcgcgtggcatgtgacaacgaggccggatgtcggcggattacgccgttggcgtcatgcgccctacgggagccgggaccaccggggcgtagggcgaataaccgcgtgcggatatccgccgtggcggaaatggcggtgtcggcggataacgccgttggcgttatgcgccctacgggaggcgggaccaccggggcgtagggcgaataaccgcttgcggttatccgccgtggcggaaatggcggtatcggtggcgtcatgcgccctacgggagtcgggaccaccggggcgtagggcgaataaccgcgtgcggttatccgccgtggcggaagtggcggtatcggcggataacgccgttggcgttatgcgccctacgggagcnnnnnnnnnnnnnnnnnnnnnnnnnnnnnnnnnnnnnnatgcgccctacgggagccgggaccaccggggcgtagggcgaataaccgcgtgcggttatccgccgtggcggaagtggcggtgtcggcggataacgccgttggcgtcatgcgccctacaggggcgggaccaccggggcgtagggcgaataaccgcgtgcggttatccgccgtggcggaggccgggtgcagcgccggagcacgtcgctgccctcaggagggcagggcgtcgccctggcggcggcgatcgcgttcgccgacccagtaggcgatcagctcacgcaattgcgacagctccaccggcttggccatgtgcccgtccatgccgaccagccgcgcgcgttccttgtgttcgctga

SEQ ID NO: 358498 - DNA, 588 bp, Pseudomonas aeruginosa
atgacgccggcctgtgtgcccctgcgcattgagaaaggggcgacgtttcgcgacgcgctgcggatcatgcagccgagccttgtgtacagaccgatcacgcagatcgcaccgaccgcgcctgtccggctgaccatccctgggcacgggttgcctggcacgtggctggcctgggctgctggtgtccagggcatgcccgagctgaaccgcgcgcgccttcggcagttgcctcatagggttgtcgctatcgacgacgacacgatcgagatcaacctgctgtcagccgttgggctggcgcctgttggcggacagttgatctaccagccacctgttgacctggctggcgccgaggtacgaatgcagatccgcgatgcgccaggcgggactgtgctgatgacgctggcgctcggctctggcctggatctcgccggcgccggaacgatctcgcgcgagatatcggcatcagctaccgcggcgctggaatggtcggcggcggtctacgacgtggacgtgacatacccggatggaacggtccatcgctactacagcgggccgatcactgtgagccatgggggagggtgcgatggatga

SEQ ID NO: 358499 - DNA, 1437 bp, Pseudomonas aeruginosa
atggctctttctcgcgaagcacggcttctgcagaacaaatggcgaactggcacaagctggccaaagcgactcgaatggatcgagcttaccggtatccgtggatggtctgggcagcgtgttgattttggcttcccggtagttgccttagtcggagaaaacggttctgggaagagcacggttttgcaggcttcggcagctgtctatcggtccgacaacgacctttatgcgtcagactttttcccagacacacccttcgagagaattacctctgctgtcatacgcttctcctatcgagaagggcaaaactcccaggtaaaaacagtgagaaagccgaccgacagatggcgcggaaaccctgaacgccctgttagacctgtggagtacatcgaccttagccgaattcaacctgtttcagctcgtgtgggttattcaaagctgctgaaggccggcgtatctgaaggcgctcacgtcccattcgatcaagccaagctattacgtctgacgcagatcgttgggaagcagtatgcgaatgcaggtatatcagttacctccgcggatgcgcgccgccagattccagttctggaggcaaatggggctcgctattctggattccatcaaggtgttggagaaatcgccgctgcggagttgctagcgtccgattacagaaggtacgggatagtacttatcgatgaaattgaaacatcgctgcatccgcgagcccagcgtcgcttaatcagagatctttgccacatcgcgagggaaaaggagcttcaaatcatcctgacgacgcattctccgtacatcctctccgaacttcccccagaagctcgcgtctatttgatggacggcgctgatgggaaaaccgtggtgactggcgtgagccccgagttcgcgatgaccaggatggatgaagagcagcacccagaatgtgatgtctatgttgaggatccgcgagcctcgacgcttgtttcagaggttctggcatctgtcgcaagagacacattgtctcgagtgaaaattatcccttatgggagcgcctcagtggggaatgcgctagggcaaatggctcatcagaatcgtttcccgcgcccttcgattgtgttcctcgatgcggatcaggctccagcgcagggatgtcatttgcttcctggagaagacgcccccgaacagttcattttcagagatcttcagcagaggcactgggaaggagtctcttcccgaattggtcgaaactcctctgaaacaattgatgcactgaatagatcgatggacttgggcgaccaccacctctgggtgtacgacgctgcggatcggctggttattggtggggatattctctggcaagccatctgttctgtttgggccaatagcatcgcaacccaagagcagaaggatgcaatcgtccttccagtgcaagaagtactagactcagcctag

SEQ ID NO: 358500 - DNA, 1059 bp, Pseudomonas aeruginosa
atgctgttccggggtgtcgtggctgagcaactgtttctcggccttcttcagggccacccgcgccatgctcgcttcgatcttcagccgtttcagccgttcgctgccgctaccggcctgcttgcgcgccctggcccgctcgatcgccgcctgcaccgggtcgaccgccgtggcgggggcggcttcctcgcgctcggcctgggcggcgcgcgccagcgcggccttctccgcgcgttgggcgcgttctgcggcccggcgctcctcgtcgcggcgcaggcgagcctggcgttgctcgaaacgctcacgggattgttcggccttcagcagcttctgccgctgctcgcggatctccgccttggacgcgcggtagtactgcaccaggggaatgctcgacgggcagacgtaggcgcaggcgccgcattcgatgcaatcgaacaggttgtgggcgagcaattgctcgtgctcgtcgcccagggcgaagaaatgcagttgttgtggcagcaggctgacggggcagacctgggcgcagtcgccgcagcggatacagggcatggccggcactggttccggcagctccgtggcatcgccggcgagcaggcagttgcaggtcttgatcagcggcaccgagagatcgggcagggcgaagcccatcatcggcccgcccatcagcacgcgttccaggcgtccctcggcgaggccggcgaacgccagcaactcgtgtaccggcgtaccgatcagcgcctcgacgttcatcggccgctccagggcgccgccggcgagggtagtgatccgcgagatcagcggccgaccgaggacgacggcatcgtgcacggcggccagggtgccgacgttctggcacaggatgccgatgtccgccggcaggccgtccgccgggacttccctgccggtgagcaactggatcagctggcgctcgccgcccgagggatagcgggtcggcagggcgacgatgcgatagggccgttcaccgagggcggcgccgagggcggcgatggcttccggtttgtcgtcctcgatgccgaccagcacctcttcggggcatag

SEQ ID NO: 358501 - DNA, 816 bp, Pseudomonas aeruginosa
atgagcctccccatccattacgcctttgaaggcaccgaagtacgcgtcgtgatgatcagcggcgagccgtggttcgttgcgagcgacgtgtgcgcagcactgaacctgcccaacactactatggccctgagccggctcgacgctgacgaacaagccctcatttcaattgagggcatctctcgcggcaacgacaaagccaacgtcgtcaacgaaccgggcctgtataccctcgtcctgggcagccgcaagcccgaagccagacgcttcaagcgctgggtaacccacgaagtgctcccggcgatccgtaagcacggcgcctacgtgatgccatcgcctgagcccacgccgaaaggccccgacaaccagatggccccgcacatcgaggccgaccggatcgtcagtgccggcagggtattcagcgcacttttccgcaccgctcggcacatgggcatgacccggcgccttgcagccacccgcgcaagccaggctgcgcagcgctccaccggggtagacctggccggggaactcggcacgagcacctggctggatagcaatgccctgccgagtccccaccgccgccaatacgagcttcagcagcgcatccgtgatcacctggaggcgaacgactggccccaggcgttcaccggtcagcagttgatcgaagccctcgacctgcccaacgacaaggccacgaagatggctgtcggccagtgcatgccgctcctcaactaccgccgcacccgactctccacccacggccgcccctggatctacaccttccagcagcacgctatcggacaggagctgccggcatga

SEQ ID NO: 358502 - DNA, 4014 bp, Pseudomonas aeruginosa
atgacagtcgaacagaaagaccaactatcggacaccccccttgagttggagaacagtacgcttgaggaaattgttgatgccttgttagcagggagtccgatcgcgttaccgcagaatgcgggacttttcgtactcgatagcgaagatgcgcgggccgcgttcaggttttatgcttcccgtactgagctgtggccacagcagaaaccgctttccagcgcggaagtggatcagttgctgcaagctcttgaacagccacttcaaatagtccgtagagcgcaaccggtcgcgccaaaaatcaatcgccccaggtggcgcattacccgggttagagtgcatcgatttgcaggtctgcatcgtcactgcggccccaacggcgagtccccagacattttgtcgctcgatctagatcgcgatatcacttgtatctggggatttaacggcgccggcaaatcagcgcttcaaagcgcgattatgtggtgcttgactggtcaggcgcttcgttcccagcacaagcctgctgcggttcatatgcccatagcattggaaatgatgggagagtctgagaatgacgatctcttgtcttccgcctccgccagcactctgtcccttcctccgattgttcctctcccatccgccgatgatctagctgcactccaggacaagcctgcctgtgacacttgggttgagctcacccttcgagagcattctgggactgagattgtggtgaagcgagagcttaagcgcggcccccggggagccatctcgacgcagtgtactggtatcgagtatctaggccttccgcagtgggcaattgaggccggaacattgatgccggcgatagctgccacaatgaggtttgacgaaaagaccacatttgcagatgcgatcgcgcagctaaccgggctaagaccactgaaggatcttggtaagcgttcagaacgcttagtgcagcgactattggtggatgaaagcgacaaagcggtgagtgatgcggaagcagcgtacaatcgttacaccgccagtatactaacctttgaagagagttggagctcacagacagaagctctcggtgtagtaccgaacctttcatatccgtcacaagagtccgagggagagagctgtagggctgccatcgagtctgcagtgtcacatctggaaacgcttcgccagcgtggacagaaggacatagatgcgattctcgccgcgtcgctgtccttggaaactaagggtcaagtagcagcgttggagaatgtccttcgggatgcgcgagagcgcctgggctctcttacaatcgcaacgcttccgtctgttgaaactcttaagcgccttggcgagatccaggacgctgatagagaagcggtattagccaagcttcaggagttgcagaatcgggctattgagcaagtggcgcggcagcagaagaaggaagaagctgctcgctggcagctgtatgcgatggtttcccaatggcatcgccgacatcacccagaaatgggcttgggcgattgtccggtctgtggttcggatctttccgaggtaccaccagatgccctgttggacaaaggcgtagctgaagctctacaaatcagcgcgcaagcgcacaatgacgctacgaagacattactagagtggcagaaagacgccgccgcagagctgctggaagctcttcccgcaagcctgcgattgttcgtagatacaaaggctcctgcgacgctcctagggctataccgcaatgcctatgtgaacgaactgctccaggacgctgcatttaacacgcaattacgtccactcaaacagaatgcagctgcagtctgggacctcgcggtccaggccaacccgatcccacttctgcctgacgtcgagatcgtcgagttgccggtcgaactccgcaataccccgctcgccactagatttgccaacctgcagactgctctatccctctcccttcatcgacagctcagtgcggatcaaatcaagcaaatctctcagcgttacttcggggcgggcacgttcgatcgagcctcagcctcgcaaggtcaggtggaaatcgcagcggctccactcaggcaccaagtgatggcgctagagcaagcagtgaccagtgccgaacccatcatctctctgctgcgccaactccgtgaaatcgaggcaatccggcagacttgggaaagggctcgcaggcggcatcagttgctgcagagagcagccgctgcagtccagcagtttactcggctaccaagtcttgttagccagcaagttgagggtctaataagactccttgatgagaggacgacagggtggctaaacgtcatctatcggcctcactacgtcggtggacctggctatatcggcctcgatccatccagagctcacgggatagggatatacgcaggttacgggggcctgcgagtaccagctaatgaggtgatgaactcttcgcacctacgggcgtgtgtatgggcgttcgtcttcagcttgtgggagcgcattcgtgatcgagcgggcgcccttgagattctgcaattagacgatcctcagacctacttcgatccgatcaacacggagaacctagcggcagtcatcccgaagctcgtcgaggcaggcatggcgcctatcattacttcaaatgataatcgtttcattgcggcgatcaaaagtcgattgcctaaactttcgacaggctcgccatcttggacgatgctccaagtgagtccgatttcctcctcgcgtcggacggtcgcactcactccggcggtcgaagaggtgattgagcgtcgtaccgtttggcgtgaagacgaggcgaatgttggtaagacccaggagttcgtggagcgagtacgacttcacattgagaaccgtctatgggacctactcgctgcagatccgatgctgctccacaaacccacgcttgctgatctgatcaaccacatcagcagtgcccgcaatcatggtgagcggcctttcaatgaggtcccgtttgagcgcttgctcgactgccaggccctgagatttggatcggagttctatcgggtcatcaacaaggcgcaccacaacttgcgagatgtcacaccattcgaggccaagatagtcgacgagtcctttgatgaggttgatcggcttcttcgcagctgtagtgcgtcttatgcgagatttatgggacgtctctcacgagaggatgaggatctgttctttgctacgcctccggcggccccggcagcaatcgtaatgcatcagcagcccatccaggtcttgggcgactttagtgctcgcacgtattccgatgccctcgctatcgaagcggagcgcaccactttttccttcgatagcctgggtgacattgcactgtttgctatccggagcgcgagcctcggtgcattggctttgcccggtcaaatcgtggcggtctcgctttcaagtgaggccagaagcggcgatcccgtcatcgcacttcacggtaccagtgtcttggctaggcgataccatgttgaccaaagcgatacatcgaagttgaccctggcttgtgaccagtcaggcagcgagcgagtcgcgccggcgcttactttgccgaggagcaaggtacggattttacccatcgttggggttctttatgacagtgtatctagagccggaggtcaggaggctcgctctgtcgaaagctgctctgtattggataggcagcttcttgctgcccgcatcattgaagacagcggataccctgttgtcaggagtggcgatcttgtcttgctggagcagatggatctacccagcggagccactctggaccgaatgaagggggacatggttgctttcgtggcttctcagcgaggggagcagtttgcctacttgaagcgcgtcggctcatcaatccaaggcagcagtttgcggatctttgaaaacgtcggaaccttcggggactcactggccgtttcctgctccgggggggacagcagcgctgcggatcatcttgagatgcaaagcatgtggagagtgcatggcgtgattagaaagtcctga

SEQ ID NO: 358503 - DNA, 834 bp, Pseudomonas aeruginosa
atgtccatggaattcctggttagcacgttcgacaaggtaagctacctacaaaacctcttggtggctcgagctacgggaaatcctgcggatccgaatgagtatctccatcttcgacgtgaactgctgagtgatcctgcagtgagcgcagcactgccagcattcgtgaggcaacatggttcccttgatactttttggacttggataaaagggaaacaccaaacatacgccgagcgtagaacgttcctttcagagcagttcaccccgctcttagactcattggagttccctcctctctcgcgtcctgctcctcctccccagatcatacagccgaacggtattggcccctcaactgcagctccatttattactccggcgccagttgttgccaggaacaagcgaaaaatattcatcgttcacggaagagatgatctcgcgagagttgaagtcagtcggtttatcgaaagcctcggtcttgaagcgatcatactgcatgagcaagccaacgcaggcatgacaatcatcgaaaaaatagagcgatataccaacgatgccgattttgcacttgtcctctatacgccatgcgatgaaggccgtggataccatgaaggaaacgctcgtccaaagaaccgcgctcgacagaatgttgtctttgagcatggctacctcatggccaagcttggtagagagaatgtctgcgctttggtgaaaggcgatattgagacaccgaatgatattagcggagtggcctatgtccttcatgaccaacatggcgcatggaagttgaaaatagttacggagcttagggcctgcggctattcaatcagcaggtggtga

SEQ ID NO: 358504 - DNA, 867 bp, Pseudomonas aeruginosa
atggctcggaagtcatccccatccccggttgttcaaccaaaggttcacttgacggcagatcagctgcagaaaggaattgaccggcttgagcaaagaatcgcggatcttgatacgtttgatctcaacacgttgaagagtgggacatctcccgaactccaagctctagagagcagtattgaagatacgttggagcgctatttcggagtaaacactactgcagccgttcgttataaagcggcgcatgagctgcattaccatcagatggtttgggtatcagggatgccagagcccaactacaaagcacacacgaagacaaatatagaagcggcgaaagcactgctaggccaagcgataaatgccttaaaagcggaccttgaagatcttggacctagccttctggcgccagcaacaaaagctagttcatcagcgagctcctctcgagtttttctcgtccatgggcacgatgaagctgtccgtgaaaccgttgcacgcttcctagagaagctcggccttcaggtaataatcctccacgagcaggccaacagtgggcgcacgattattgagaaaatcgagcacaattctgatgtgggaatggccgtggtgctgctaacgcccgacgatgttggctgcaaagcgggcggccaagtggtacctcgcgtgaggcagaatgtgctactggagcttggttactttattggtgcgctgggtcgtgacaaagtctgcgcactaagatctggaaaagtggagatacctaccgactttgccggggtagtttggacagagatgtccggcgagtggaaaaccacgctggcacgcgagttgaaacaggcgggctatgcaatcgactggaacaaggttatgggctga

SEQ ID NO: 358505 - DNA, 363 bp, Pseudomonas aeruginosa
atgagcataaagtacatcgtgaccaagccacaccgaagcgagtatcccgagccaattcaactcaaaaaaggcgatgcgctcgtcatcggggaaaggtacgaaggctccgaaggctgggaagactggttcttctgcaccacgcccggccaggcgggcggctgggttcccaaacaggtgatcgagcaatctaccgacggtacaggccatgcgttggaagactacagcgctcaagagttggacgtggatacaaacgaaatcctcgtcggattcagaacactaaatgggtgggcctggtgccaacgtctagctagtcccgaagcgggctgggtgccattggaaaatctgcacgctgccaatgtatga

SEQ ID NO: 358506 - DNA, 426 bp, Pseudomonas aeruginosa
atgaccggcagcttcaagctcacgcgcaagtgcctgtttccaacctccgccgctatccatcgtctcccaaacgacaccggcgaaatcgcttgggatttccaccgccccgcgtttgagagcacataccttgtctctgcccagtcggccaatgaagtatcccaactccaaaagcacattctgacgggctcttggctcaggcgttcctccttttacgcagccctcatcgtctggcgtaagcagaactactgcgaaaccaacgtcactgtgagcaacgactttttcgataatcgttcgcccttgattagcctgttcgtgcaagataatagcttcaagccctattcgctcaaggaatcgcgctactgtttcgcgagcgccatcatcgtgaccatgaacaataaagaccttgcgcgaaaattgggcttttaa

SEQ ID NO: 358507 - DNA, 972 bp, Pseudomonas aeruginosa
atgcagcaattcgatctcggcctgaacctttccaccaaaaaaacacgcaaacgcgaatttctggagcagatgcagcaggtggtgccttggaaggatctggtgacattggttgcaccttacgcccctgaagggcgtaaagggcggccaccgtttcccgtagagatgctgctgcgcattcacttcatgcagcagtggttcaccctcagcgacccggccatggaagaagcgttgcacgatatgccgctgtttcgggacttcgtaggcttgtcatgggacagtgccgtccccgacgagagcaccatcttgcgtttccgccatttactggagacacacaagctggccgagcaaattctgcagagggtcacggacttactggagagcaaaaagttgctgctacgcacgggcaccatcgtggatgccacgttgattgcagcgcccagctctacgaaaaacagcaccaaatcgcgtgaccctgagatgcaccagaccaagaaaggcaaccagtggtactttggtatgaaggcacatatcggcgtggatgcggattctggcttggtgcacaccgtgcggggcacatcggccaacgtcaacgatgtcgttgaagctaacagtctgctgcatgggcaagaaatcgatggatacgccgatgctggctatcagggtgcagacaaacgccccgacatgccagagccaacacccgagcgcaaattccagtggcatatcgccatgaagcgcagccagcgcaaggccctggatcctcagcagccgatatcggccatgcaagagcagctcgagcaggtgaaatccaaaatccgggccaaagtcgagcacccattcagagtcatcaaacaccagtttggtcacatcaaagttcgctaccgaggcttgagaaagaacacccagcaattgcacaccttgtttgctttggcgaacttgtggatggctcgtggccgattgctggcaaacagctaa

SEQ ID NO: 358508 - DNA, 444 bp, Pseudomonas aeruginosa
atgccgcgccgtcctatcgatgacgaaccctgtcccgttgctcgcgccgtcgatatcgtcggggatcgctggtcgctgctgatcgtgcgcgatgcgttcgatggcacgcgccgctttggcgactttcagcgcaacctgggcatggcccgcaacatcctgtccgaccgtctgcgcaaactggttgaagcgggcatccttgaaacacgtaacgcctcggatggcacggcctatcaggaatatgtgctgacgccgcagggggaaagcctgtttcccgtggtggtggcactgcgccagtggggcgaacagcatctgttcaagcgcggtgaacgccattcggtgctgattgacaagcgcacgggcaagccgattccgctcatggcacccatttccaaggatggttctgtcttagtgccggctaccaccgaagtgcaaaaggtatcgtga

SEQ ID NO: 358509 - DNA, 1362 bp, Pseudomonas aeruginosa
atggacgaattggaactgctgacccaggccgatgcgcgcggccgtcgctacaccgagggccacggccatcgccgggtgtttccttcggatgaagcgattgccgcgctgagggtcttcgacgaaccgctgcccgagcagggctggcccgctgaaaacacgctggcgctgctggacgatgtggggtcgcccgcgaccactgcatccaatggcccacgctacttcgggttcgtaatcggtgccgcgttgccagccgcagcggcggctgaaaggctgatgctggcgtgggatcaatgcgcttcgaccttcgacaactcgcccgtgtcggcgacgctggagcgcgtggctgcccgctgggtgcttgatgccttggatctgcctcgtgaaagtgcggtgggtttcggcaccagcgccacggcctgcacgctgacggccctggccgccgcgcggcgcgagttgttggcgcggctgggctgggacttcgacggccaaggcgcgcatggcgcaccggaaatccgggtggtgatttccgaactggcccatatcacggtcaagaaagcattgcgggtgctgggcttcgggttgaaccggatcgtccatgccccggtcgatgcgcaaggccgggtggatgctgcccgcctgccaccgctggatgaacgcaccatcttctgcctgcaagcgggcgaagtgagtaccggcgcgttcgatccctttgggcagatcatcccgcacgccaggacggccggtgcctgggtgcatgtggatggtgctttcggcctgtgggcgcgggcgtcgtcactgtctcatctgacccagggcattgagcaggccgatagctggacaaccgacgcgcacaaatggctgaacacgccttacgactgcgccatgaccatctgccgccatgcgcaggtgctggccgaagccatgaacagcgatgcctcctactccagcgcaagtgcagatgcgcagaagaacctgaccctggagttctcgcgcaggccgcgcggcatcccggtttgggcggcattgcgaagcctggggcgcgaaggtgtcgccgaactggtggagcggcattgcgcacaagcacgccgcatcggcgatggcctgacgcgggccggattcgaggtgctcaacacggtgacgctcaatcaggtgttgttccgctgcgccaccgacgcacagacgctggcggtgcgcgcggcggtgcagcagtccggccaagcatggttcgggggaacggtttggcagggacggcccgcgatgcgcatcagcgtatcgtcctggcgcacagaggatgcggacgttgatgtgcttcttgctctgctggcccgaacgctcaatgcccaaaggatcgccgccgcatga

SEQ ID NO: 358510 - DNA, 543 bp, Pseudomonas aeruginosa
atgaagaccgcattgagctttaccgctcgcctaccgtcggcaacagcggttttctccggtaaatggatctccttggcgatcctggtgtgctgccttgcagccgttgcgattgcgctggtctcgcagcatgtgtacgacatgcagccctgcccgtggtgtgtgctgcaaagagccatcttcctggccatggccttcgcgtgtggattggcactcgcaacgccggaacgtgtgttaccgctgttgttcaatgcgttggtgttgctgttgtcggtcgcgggagcggcggcagcgctgtggcaacacttcaaggcggccagcacactttcgtgcagtctcagccaggcggaacggtggatgtccactttggccctggatcggctcatccccgccgttttcgccccacgcacaagctgcgctgacggcgctgttgatctgctgggaattccctatgaattctggagcctggccttgttcggcgtgattggcgtcgcgcaggcagcggcgatggtcagggcatggcgttccatgcatgccagaagctga

SEQ ID NO: 358511 - DNA, 267 bp, Pseudomonas aeruginosa
atgaagcgaatgacccttttgctactggttgccgcactcactgcctgcggcccgtccgagccgccgaaaccggcagccaatgtgccgaccgtggacgaactggccgccgatcccgagcgtttgaaggaactgcgccgccagtgcaagaccgagcgccaaacgatgggcgacgtgctgtgcaaccgcgtggccgaggcgaccaacaagcgcttctttggcgacggcaaggtgccttacacgccatcggagacgccgccgaagttctga

SEQ ID NO: 358512 - DNA, 246 bp, Pseudomonas aeruginosa
atgagcacgaccaagaagctgcggctcggcccgttgcctcgccaagaaatcacgaagctgaccttcgcgtgcccggccagcctgaaatccgacctcgaccgctatgcgcagctccatgcgcaaacctatggcgaagcggtcgatacagtaacgctgatcccgcacatgctggaagccttcatggcgggggatcgggggttcaggaagggtggcgcgggcaagtccgcgccaccaaaaccaggctga

SEQ ID NO: 358513 - DNA, 1680 bp, Pseudomonas aeruginosa
atgattgaggaaattgaaaaaaatcaaccctggactagccctaacccatcaatggacgaacaaggttggccccactttagcgagcacagcctctttgaggccgcagtgggggaatcagcgcgagagcatcaagtctctcgtgaaatggcgatgatgtgcgccctaggtgccattgccacggcctgccaaggcctcgttgacgtagaaatgccaaccggacatagagtgccaacctcattgatgctcctaaccattgcggagtctggggagcgaaaaacagttacacagaactatttttttgaggccatcaccaatctaaatgatgtcgcacatcgcacaaatgaagccgccttacttcagcaaaaagttgatcatcagctgtggatcacacaaaaaaagcacctagagcgtgcatttaacaaatgcgcgacccaaggggatgaggctgctacacatgcagctttagaggcagtagctgagcacctcagagctgaaccacaaccagttcgatctggaaagtttttgtacgaagacacaaccccacaggctctcgtacagatgctctacgagaatattccacatggctgtttattaacgagcgaagcaagcagtatttttagcgggaaagccttaggagaactggacaaactcaacacgctgtgggacggcggcagcgtgaaggttgaccgaatatcaagggatagttttgtcctacagaatgctcgccttactctttcattaatggctcagccgaatgtaattaatcgattcatgagcaagcgcggcgaagaggctagaggaactggatttttagctcgattcttagtcgtaaagcctcgcacaatggctgggcaccgaacaaaccaaaaactatccaagctatctcgtaagaaagccttcaatacccgcatccaagaacttttgacttcagaatcatcatcagaaagacaagtactgcaattctcagaacaggcaaaagacttctggtttatgtgcaaccaataccttgaaaagcagatgcaggaaaacggattatattattacctcaaagatcacgcctcaaagctactagaaaacactagccgactagcagccacactgcatactttcgaacgaaaaaacaatagcgatatagaaatagatatcttcacattaaagttttgctggtattttacccaaaactgttcaaagcactttattgagcacctagccaacgaaccgcaaatcgtcacagacacaaacctccttgcgcacttcttgcttaaaaccgcttacaagcgcgaccttcactcaccagaccccgaaactgaaagcaatcgaaaatcggaccctaaccgaatcaaagctagaccagtgcaaccaggtgatctgataatcggcgtggaaactattttcacactatcccaagttaaacagtctgggccaagcgtactaagaggtcgcgctaattctgagcgactatattcagcaattgatctacttatcaagctggggcacgtcaaaagggagagaagtcacttcaagttcagagaatcaatccttcttagcaccggagagcctgaactaaaaaatggccaaatcattacaatcaaggagctaccgctattttgcgagcaggaatttgttcaagaaaataactcacctcaccatacatcgggctatcgcatcaaaattagttaa

SEQ ID NO: 358514 - DNA, 717 bp, Pseudomonas aeruginosa
atgaagaaactcatcatctgcacaatgctacccatattcctcagcctctttggccaggtagccatggctattggttaccaacacggatcgttccccgacgaactgagtccacaaggcctacccgaggcgatcccttgcagtgtcctacgggcccaccaattcactatcgaaggcaacctggcctgcatctggttgatgtccgctcggaacatcaccgaatggagcgccgagcaaaaccggaacctcaactaccccaatcgataccaagccgtatgccgtaagggtacctgccgtgcccaaggtacggtcgttggccatcaccccaaagatgagaacgtcatcctgtccatctggtactacatgggacaaagcagcgatggcaaacctgtagcctatctgaagggctttggccctgcgttcgatggcgaggcggtcagttacgcccaggccgggcagatgctcgtagagttctatgagaactcaggcattgataaccagaaggcgatccagttcgagctgagtcagcactatgacggcggctgggagcaattccaggctgacctgaatggtggaacagccagcgcaagcaccgatccagagcaatgcctaaatgcctggatcaaagccttccgtgaagacgtgggcgaggacgcgatgatagtcggcgagcaactgaatgagtggaagggctggtgcagcaaaggcaaacttccgtag

SEQ ID NO: 358515 - DNA, 354 bp, Pseudomonas aeruginosa
atgaatgttgttaccggattgaatgaagccatgattgaggaactgctgaagaacaagcggtctttcgaggtcatcggcctcagaggcaactttatggacgggatcaaactggtcgagacaaagatcgaggccctgggcatgaagtgcaggatccgaagcgacatgaaagcaagccttgcccaaggtgggcttatcggcggactcatgggcgcggcctctctgccagcgggaattgccatcggcgcgatagccgcagcagcaacggccggtcacaagttggccacctacaatcccgactacgaagtcctcaaggactatgtgaacaagaagctcacggtcacctacaagaagtaa

SEQ ID NO: 358516 - DNA, 348 bp, Pseudomonas aeruginosa
atgccgaagaacgattcaaagccgctggcggagcagattggccgtgccatcgcccgtcagcgtgtcagtcgtgatctcagccaggagaaggtcgccgagaagctcaacatcggagctgaggcggtttctcgtatcgaacgtgggctggtgatgcccaacgtggagcgcctggttgagctggccgccatctttgaatgcgaaacggccgacctgctgacagaggggagttctctgcccgcagatcaggctcgtcggctacagagtctgctgacttcgcttagcgcagaggatcggctgctggtgctggatattgtggagcgcctggtcgaacggcttgcccacaactga

SEQ ID NO: 358517 - DNA, 207 bp, Pseudomonas aeruginosa
atgacactactgagattcttgctgtgcctattcaccttcattggcgcgctggctgcagcaggcgcgctagttatcagcgtcctgctgatgctgcgttttccaccactgctggtcgctgtggtcctggcctgctggatcctctgcaagctgctgaaagcctttggcaagccgggccaaaccaacgccacaaccccttcggcgcagtga

SEQ ID NO: 358518 - DNA, 135 bp, Pseudomonas aeruginosa
atgctgctgtatctcacccataccacaggcatcctcgtgaccgagctggccttgctggagggggggggcgacgcgctctacttcgaccgcgttcccggcttgagagttgaggattggattaccccaatcgtgtaa

SEQ ID NO: 358519 - DNA, 300 bp, Pseudomonas aeruginosa; identical to SEQ ID NO: 345801

SEQ ID NO: 358520 - DNA, 969 bp, Pseudomonas aeruginosa
atggagatcgtcgcccgcctgatgattaccggtggcgaagagaaggaagatgcgcgcctgacccgtgccgatcgcagcgccgtccgccaggcgatcctggcggcggccaggacctgcgccgccgcgaaccgcacggtactgacccaagacgtgcgcgatgcgctctacgaggcctccaggagcgatggcaccgcgccagaacggcgcgcacggctggccgaaatggcggaagccatgcagatgttctgcatgggcgccgacggcgagatgttcaatcgcgaaggcacgccctggcctgaggccgaccttaccgtggtggatttcgcgacctacgcgcgcgaaggctacgccgcccagctcgggatcgcctacatctcgctgctgaacaccgtgaacaacatcgccgagcgcgaccagttcaagggccggccaatcgtcaagatcaccgatgaggggcacatcatcaccaagcacccgctgctgctgccctacgccatgaagatcaccaagatgtggcggaaattgggcgcctggttctggctcgccacccagaacatcgacgacatcccagcctccggggctccgatgctgaacatgatcgagtggtggttgtgcctgaacatgccccccgacgaagtagagaagatctccaggttccgcgagctgtcgccggcgcagaagtcgatgatgctctcggcccgcaaggaaagcggcaagttcaccgagggcgtgctcctggccaagggcaaggaatacctcgtccgtgtggttcccccgagtctctacctggccctggccatgaccgaaaacgaagaaaagaaccagcgctacaacatcatgcaagccaccggctgcgacgagctcgaggcggccttgcaggtcgcagcggatctcgacaaggtgcgcggcctgccacccttccccattgttttcccagaccaaccggcagtggagtgccaggacgaatga

SEQ ID NO: 358521 - DNA, 282 bp, Pseudomonas aeruginosa; identical to SEQ ID NO: 327655

SEQ ID NO: 358522 - DNA, 309 bp, Pseudomonas aeruginosa; identical to SEQ ID NO: 327654

SEQ ID NO: 358523 - DNA, 588 bp, Pseudomonas aeruginosa
atgccgtactggttcttcgctaacggccgacgcttctggatcgtcgtgaaagtctcgacgatctacgagtcggccggcgccggcttcatcctgccaccctgtccgccgtcgcagtatccgtacccgcttgccgtcgtgggctcctaccgtggtgacgttgcaactcgctggtcagacgtcagcgaccggcaccgaggcatcagcagcccctacgagcgaagctgctatctccgcgatcctgccgggcgctggctcggtttcactgtagacggaggggctgccaacgagtccgactacaacaatcggacgctcctcccgctgggctgcggccgttatgcgggcagcagtgacaccgtggtcaaacaactgcgggattcattcgggaagttcccgctcaaggcgctgtcgttcgtcacccgcgaaaccgagggtcgccgaaacctgggcgacttcgacggcgctttctacgtgccaacgctcaactccggcgccgaggacgtgattgtcgaggacggagtggaccacgttgttttccaaaccgcctggcgctcgggcaacccctggctctacgcgatcaggaaggactga

SEQ ID NO: 358524 - DNA, 588 bp, Pseudomonas aeruginosa
  misc_feature (432)..(432): n is a, c, g, or t
atgccgtactggttcttcgccagcggccgacgcttctgggtcgtcgtgaaagtctcgacgatctacgagtcggccggcgcaggcttcatcctgccaccctgtccaccgtcgcagtacccgtacccactcgctgtagtcgggtcgtatcgcggggacgtcgctgtgcgctggtccgatgtgagtgaccggcaccgaggcatcagcagcccctacgagcgaagctgctatctccgcgatcccgccgggcgctggctcggtttcactgtagacggaggggctgccaacgagtccgactacaacaatcggacgctcctcccgctgggctgcggccgttatgcgggcagcagtgacaccgtggtcaaacaactgcgggattcattcgggaagttcccgctcaaggcgctgtcgttcgtcacccgcgaaaccgagggncgccgaaacctgggcgacttcgacggcgctttctacgtgccaacgctcaactccggcgccgaggacgtgattgtcgaggacggagtggaccacgttgttttccaaaccgcctggcgctcgggcaacccctggctctacgcaatcaggaaggactga

SEQ ID NO: 358525 - DNA, 234 bp, Pseudomonas aeruginosa
gtggtcaaacaactgcgggattcattcgggaagttcccgctcaaggcgctgtcgttcgtcacccgcgaaaccgagggtcgccgaaacctgggcgacttcgacggcgctttctacgtgccaacgctcaactccggcgccgaggacgtgattgtcgaggacggagtggaccacgttgttttccaaaccgcctggcgctcgggcaacccctggctctacgcaatcaggaaggactga

SEQ ID NO: 358526 - DNA, 234 bp, Pseudomonas aeruginosa; identical to SEQ ID NO: 325921

SEQ ID NO: 358527 - DNA, 234 bp, Pseudomonas aeruginosa; identical to SEQ ID NO: 325921

SEQ ID NO: 358528 - DNA, 414 bp, Pseudomonas aeruginosa
atggaacgcgcaatcgatctgtcggcctggggcgagcgtccgcctgtcttcgtccagctgctcgccgctgaggtggcccgcagcagccagacgaaagccggcgaggcaatcggcatgagccgttcgaccgtcagcaccatcctcgccaaccgctacccgtcgccctcgacgatccgcgtcgagcgtcgtgtcctggccgcgctgagccgtattgagtgcccggccttgggcgaggcggtgacctcggtcgagtgcagcgagtacctccagcggccggcgccgctgaacaaccccgtcgcgatgcgctgctggaaagcgtgccgcgcctgtccacgcaacccgcataccgcccccatgaaacgagaggaacaaggccatgagaaccgcattgcccttgaaagtcttgacgcctga

SEQ ID NO: 358529 - DNA, 123 bp, Pseudomonas aeruginosa
atgtgggccggctcgagcatcggcacgctggtcatctgcacctggtcgtgcgagctggaggtgaaggctgccttcttgttgttgatcgcgtcgttggcgccgctcgctggcgtgctggtgtag

SEQ ID NO: 358530 - DNA, 597 bp, Pseudomonas aeruginosa
atgcctcatccgctcacccttttgcagatcagcggacgcggctacccgccagccccccttcggcagagcaccttgctgatcatcgatgcccaggaagagtaccgcagcggcgccctgcgcctgccaggcctcgacgccgccgccgcggagatcggcgtgctggtgcaggcggcccgcgccagcggtacgcccatcgtgcatgtacgccacctgggtatccagggcggcctgttcgatccgcaagggccgcgcggccagttcctcccggaactgcaaccggaagccggggaaaaggtcgtggagaaacgcctgcccaatgccttctccggcaccgagctgcacgacctgctgcagaaccacggccgtctcgacctgatcgtctgcggcttcatgacccattccagcgtcagcaccaccgtgcgcgcggccaaggactacggctaccgctgcaccctcgccgatagcgcctgcgccacccgcgacatacccaccctgaacggcggggtcctgagcgccgcggacctgcaacgcgccgagatcgccgccctcggcgacaacttcgcggcgatcgtcgcccaggcccgggaacttctctga

SEQ ID NO: 358531 - DNA, 1152 bp, Pseudomonas aeruginosa
gtgaccagcgcggttccctactggcgcctgtccagcttctatttcttctatttcagcctgctcggcgccacggcgccgttcctcgccctgtatttccatcacctgggcttccccagcccgcgcatcggcgagctggtggcgattcccatgctgatgcgttgcgtcgcgcccaacctgtggggctggctgggcgaccgcagcggccagcgcctggccatcgtgcgcttcggcgcggtatgcacggcgctgggcttctcgctgatcttcgtcagccacagctacgcctggctggccttggtgatggcgttgcacgcgttcttctggcacgccgtgctaccgcagttcgaggtcatcaccctggcccacctgcgcgagcgcagcgccagctacagccggattcgcctgtggggctcgatcggtttcatctgcaccgtggtcggtctcggcgcgctgttcgagcgcctgagcctggatgtctacccggcgacgctgctgggtatcatgctcggcatcgtgctgtgcagctggtgggtgcccaatgcccagccggcccatcgcgaaccgcgcgaaggcgagggcggcttcctcgcccagttgcgccagcagggcgtgctggcgttctacctgtgcgtgtgcctgatgcagctgtcccatgggccgtactacaccttcctgaccctgcacctggaatcgctgggctacagccgggcgctgatcggtctgctctgggcgctgggggtggttgccgaggtcatgttgttcctcgccatgccacgcctgctgcaacgtttcagcctgcgccaggtgctggccgcgagcttcctgctggcgtcgttgcgctggctgcttctcggcaacctggccgacagcctggcgctgctggtctttgcccagacgctgcatgccgccaccttcggcagttttcatgcggctgccatccatttcgtgcagcgtagcttcggcccgcgccagcagggtcagggccaggccctgtatgctgcgctggccggtaccggcggagccctgggcgcgctgtattccggctatagctggaacagcctgggccctgcctggaccttcgccatcgccagcctggcagccttgctggcagccgctatcatcagtacccgtttgcaagaggtgcgggcatga

SEQ ID NO: 358532 - DNA, 546 bp, Pseudomonas aeruginosa
atgagcagccttaccgtctatcacgagaaccagccggagcagccgctgaagctgctgacccatgccgaggacatcgcttcgaccctggccgaggtcggcgtccgtttcgaacgctgggaagccgccgcgcccatcgccgccggcgccagccaggacgaggtgatcgccgcctacgcccacgagatcgagcggctcaagcgcgagcgcggctacatcaccgtggacgtggtcagcctgaacagcgaccacccgcagaaggccgaattgcgcgccaagttcctcgacgagcaccgccatggcgaagacgaggtgcgcttcttcgtcgccgggcgcggcctgttcgtcctgcatatcgaggagcatgtctacgccgtgctctgcgagcgcaacgacctgatctcggtgccggccggcacccgccactggttcgacatgggcgagcacccgcatttcgtcgccgtgcgcctgttcaacaacccggagggctgggtcgcccagttcaccggcgacgacatcgccagccgcttccccctgctggaagactga

SEQ ID NO: 358533 - DNA, 678 bp, Pseudomonas aeruginosa
atgaccatcaaagccatcctcaccgacatcgaaggcaccaccagcgcggtcagcttcgttttcgacgtgctgtttccctatgccgcccggcacctgccggacttcgtccgcgaacacgccggagagaccgaggtagccgcacagttggcggcggtgcgtgccgagagcggtgaggcggacgccgatgtcgagcgggtgatcgcgatcctcctgcaatggatcgccgaggatcgcaaggcgacgccgctgaaggccctgcaaggcatggtctgggcccagggctaccgcgacggtcagttgaagggccacgtctacccggacgcggtgcaggcgctgcgcgagtggaaggcccgtgggctggacctgtacgtctattcctccggctcgatccaggcgcagaagctgatcttcggctgttccgaggccggcgacctgggctcgctgttttccggctacttcgacacaaccagcgggccgaagcgggaaagcgcctcctatgcgcggatcgccggggccatcggcctgccggccgcggaaatccttttcctttccgacgtggtgcaggagctggatgccgcgcgcgacgcgggcatgcgcacgctcggcctggcccgcgaaggcggcagcctggacggccatccgacggtggccagcttcgccgacatcctcgtggagtga

SEQ ID NO: 358534 - DNA, 192 bp, Pseudomonas aeruginosa; identical to SEQ ID NO: 323472

SEQ ID NO: 358535 - DNA, 894 bp, Pseudomonas aeruginosa
atgagccagcctacctctcccctcgtcctgcacctgccctaccagtcaccctgggaatggcgccagttccaccagcatttcgccctgcgcctgctcgccggtgtcgaaagcctgggtgacgaccactatgcccgcagcttccgggccaacggtcgcccggcctggttcgaggtgcgaccgctggcgaaacgccaggtcctggcgctgagcctcagcccgtccgcccatgccctggccgccgaactcgaggcacgggtccgccggatgttcgacctggacagcgacccggccgccatcgcccggcatttcgccggggatcccctgctcggcccgctggtggccgccaatccgggactgcgcctgccggtggccttcgatcccttcgaacaggcggtgcgcgccatcgtcggccagcaggtcacggtgaaggccgcggtgaccatcaccgggcgcctgatccagcgcctcggcgagccgctggaagatctcggctacgacggcatcagccacctgttcccgacgcccgccgcgctggcgcaagccaacctcgacggcatcggcatgcccggcaagcgggtacagacgctgcaacgcttcgccgcggcgatcgcctcgggagagctgagcctggacctggcggacggccccgaggccctggtggagcgcctctgcgcgttgcccggcatcggcccctggaccgccgaatacatagccctgcgtgccatgggcgaagccgacgccttccccgccgccgacctcggcctgctgaaatccacggtctgggggccgcaaggcatcgatgcgcgcagcctgaaggcccgcgccgaggcctggcggccttggcgcgcctacgccgcgatccacctgtggaaccactacgccgcaggcggctaa

SEQ ID NO: 358536 - DNA, 861 bp, Pseudomonas aeruginosa
atgagcgattatcaggaaactctgtaccagggctacggccagcgcttcagcatcgacaacatgctgcatgaggtgcgcaccgagcaccagcacctggtgattttcgaaaacgcccggatgggccgggtgatggcgctcgacggagtgatccagaccaccgaggccgacgagttcatctaccacgagatgctcacccacgtgccgatcctcgcccacggcgcggcccggcgcgtgctgatcatcggcggcggcgacggcggtatgctgcgcgaggtggccaagcacaagagcgtcgagcggatcaccatggtcgagatcgacggcaccgtggtcgacatgtgcaaggagttcctgcccaaccactcccagggcgccttcgacgacccgcggctgaacctggtgatcgacgacggcatgcgcttcgtggctaccacggaagaacgcttcgacgtgatcatctccgactccaccgacccgatcggccctggcgaggtgctgttctccgagaacttctaccaggcctgccggcgctgcctgaacgagggtggcatcctggtcacccagaacggcacgccgttcatgcaactggaggaagtgcgcaccaccgccgcacgtaccgacgggctgttcgccgattggcatttctaccaggcggcggtgccgacctatatcggcggcgccatgaccttcgcctggggctcgacccgcgaaggcctgcgtcgccttccgctggaaacgctgcgccagcgcttccgcgacagcggcatcgccacccgctactacaacgccgatatccacctgggcgcgtttgctctgccgcagtatgtgctgcaggccatcggcaagcaggacaacgactga

SEQ ID NO: 358537 - DNA, 870 bp, Pseudomonas aeruginosa
atgctgaccaaacgattgcgccagagcggcgtagtagtctcctgcctgctcggtagcgtcctcttcatcgccctggccttcctcggctggcaacgtttcgccccggcggccaccgtatccggctggacctaccgggtagtgctcgaggacattccccacgtcagcgccctggctcgcgacccggacggcctgctctacgtgagccaggagttgcaggacggcaagggcctggtgttccgcatcgccgccgatggcagccgcgatacggtgctcgacgggctgtccaagcccgacggcatggccagcttccgcgacggcatcgcgatcagccaggagcagggcgcctcgccggtgttctggtggcatgcccagcaggcccggccgctgttcgacggcatccaggtggagggcgtcgccagcgacggccgctacctgtacgccgccgaggatcgcgacctggacgggcggattctccgctacgacccggagtccggcggactgacggtactgcgcgagggattgcagcgctccgaaggagtggccgcctgcccggacggaagcgtcttctacacggaaaagaaacgtggccacgtcatgcgtctgcatgagggggccgaggacgaggtggtgctgaacggactgaatgcaccgagctttttgctgtgcgacagcgaaggcctgtggatcaccgaggactcgacgcataacgcgcgagccttgctgctgccgcccgacgggccgctgcaggtgatcgtacggcgcctgcgttccgcacagtccctactgcccatcgggcccggccgctacctgctggccgagcaggggcgggaccgcattctcgaaatcgaacgacagaagagcgaattgtaa

SEQ ID NO: 358538 - DNA, 2103 bp, Pseudomonas aeruginosa
atggaccaaacggaagtccgaaccacccaatcgcccccacggctgttccagcccaccatccgcagccacctggcgttcaccgcgctcagcgcgctggtgctgctggtcatgttcagcctgctgcgcctggccttgctgatctacaaccgcgaactgatcggcgcgaccccggcgagcaccttcctcgaggcgttcggcaacggcgtgcgtttcgacctgcgggtcgtcgtctatgccgtggcgccgctggtactgtcgttgttcgcggtacgcgcgatggccgctcgcggcctgttccgtacatggttgacgctgttcgccagcatcaccctgttcctcggcgtactcgaactggacttctaccgcgagttccaccagcgcctgaacagcctggtcttccagtacatgtcggaagacccgaagaccgtcatgagcatgctctggtacggcttcccggtggtccgctacctgctggcctgggccttcgccacctgggtgctgtaccgggtgttcaaggccatcgacctggcgacccgcccgagccagcgcaagccgcgcgaagacagcgtgatcgcccgcccgggcgctgccgcgccctggtacgtgcgcggcgtggtgctgttcctctgcgtgctggtctgcgtcctcgccgcccgcggcaccctgcgccagggcccgccgctgcgctggggcgatgccttcaccaccgaatccatgttcgccaaccagttgggcctgaacggcaccctgaccctggtcaaggcggccaaggagcgcttctccgaagaccgcgcgaacatctggaaggccaccctggacgacaaggtcgccctggagaccacccggcagatgttgctgacccccaacgacaagctggtggacgccgatgaggccgcggtgcgccgcgagttcaccccgccggcggcgaataccctgccgatccgcaacgtggtggtggtcctgctggaaagcttcgccggccactatgtcggcgccctgggcgcgccgggcaacatcacgccgtatttcgacaagctgtcgaaggaaggcctgctgttcacccagttcttctccaacggcacccatacccaccagggcatgttcgccaccatggcctgcttccccaacctgccgggcttcgaatacctgatgcaaaccccggagggcggccacaagttctccggcctgccgcagttgctcagcgcccgccagtacgaggacgtctacgtctacaacggcgatttcgcctgggacaaccagtccggcttcttcagcaaccagggcatgaccaccttcatcggccgcaacgactatgtcgacccggtgttctccgatccgacctggggcgtctccgaccaggacatgttcgcccgtggcaacgaggaactggacaagctggcgagcaccggcaagccgttctatgcgctgttgcagagcctctccaaccacgttccctatgcgttgccgaaggacctgccggtggagcgcgtgaccggctacggttcgctcgacgagcacctgaccgccatgcgctattccgactgggcgctgggccagttcttcgagaaggcgaagaagtcgccgtactacaaggacacccttttcgtggtggtcggcgaccatggcttcggcagccccgagcagctcaccgagatggacctgcaccgcttcaacgtgccgctgctgctgatcgcccccggcatccaggagaagttcggtacccacctgccgaccgtcggtacccaggtcgacatcgtgccgaccatcatgggcctgctcggcggcgagaccgtccaccaatgctggggccgcgacctgctgaacctgccggaaggcgacaagggcttcggcgtgatcaagccgtcgggcagcgagcagaacgtcgccatcgtctccggcaaccgcatcctggtgcggccgaaggacggtgacgtgcgcgtctacgattaccagctgggcggcgatgccaaggcggtgatcaccaaggacgtgccggaccaggccgagctgcagaagaagctggagtcgttcatccagaccgcgaccaagagcctgctggagaataccgcgggcgtggtacatgggatcccggacaaggactga

SEQ ID NO: 358539 - DNA, 1050 bp, Pseudomonas aeruginosa
atgagcgccgagaagaccgagcagcccacggcgaagaagctgcgcgacgcccgccggcaaggccaggtggtgaagagcaaggaaattgtctccagcgcgttgatcctgtcgctggtggcgctgctgatgggcttttccgactactacctggagcatctcggcaagctgctcctgctgcccgccgagtacatcgacctgccgtttcgccaggcgctggagaccatcctggagaaccttctccaggagctcctctacctgctggcgccggtcctgctggtcgcggcgctggtggtggtgctcagccatgtcggccagtacggtttcctgctcagcctcgacagcgtcaagccggacctgaagaagatcaacccggtggagggcgcgaagaagatcttctcgatccggagcctggtggagttcctcaagtcgaccctgaaggtcgccctgctctccctgctggtctggctgaccttgcagggcaacctggccagcctcctgcggattcccgcctgcgggctggactgcgtggcaccggtgagcgggctgatgctcaggcagctgatgctggtctgcgcggtcggcttcctggcgattgccgtcgccgactacgccttcgaacgccaccagcactacaagcagttgcgcatgagcaaggacgaggtgaagcgcgagtacaaggagatggagggcagtccggagatcaagagcaagcgccggcaattccatcaggaactgcaatcgagcaacctgcgcgcggatgtccggcgctcctcggtgatcgtcgccaacccgacccacgtcgccatcggcatacgctatcgacgcggcgaaacgcccctgccgctggtcaccctgaagcacaccgacgccctggccctgcgggtccggcgcatcgccgaggaagaaggaatcccggtgctgcaacgaattccgctggcacgggcgctgctgcgcgacggcaatgtcgaccagtacataccggcggacctgatccaggccaccgccgaagtcctgcgctggctggaaagccagcagacggatacgccctga

SEQ ID NO: 358540 - DNA, 789 bp, Pseudomonas aeruginosa
atgagcgtccaggacctgcagcaactgctgctgacctacagcctgctgctgccgcggatcatcagttgcttcgtggtcctaccggtgctggccaagcaaaccctgggcggcggcctggtgcgcaacggcgtggcctgctcgctggcgctgttcgcctacccgatcgtcgccggcagcctgccgccggccctcggcgcgctggacatcgccctgctgatcggcaaggaagtgctgctcggcctgctcatcggcttcgtcgccaccattcccttctgggccatggaagcgaccggcttcatcatcgacaaccagcgtggcgcggcactcgcctcgaccttcaaccccagcctgggcagccagaccagccccaccgggctgttgctgacgcagacgctgatcaccctgttcttctccggcggcgccttcctcgcgctggtcggctcgctgttcaggagctatgccagttggccggtgagcagtttcttcccgcagctcggcagccaatgggtggcattcttctacgcgcagttctcgcagatgctgatgctctgcgcgctgttcgccgcgccgctgctgatcgccatgttcctcgccgagttcggcctggcgctggtcagccgcttcgccccgtcgctgaacgtgttcatcctcgccatgccgatcaagagcctggtggccagcctgctgctggtgctctacctgggcatcctcatggagcacgcctacgatgccctgctgctcgccgtcgacccgctgcgcctgctgcgtcccgtgctggagacgccatga

SEQ ID NO: 358541 - DNA, 267 bp, Pseudomonas aeruginosa; identical to SEQ ID NO: 323465

SEQ ID NO: 358542 - DNA, 654 bp, Pseudomonas aeruginosa; identical to SEQ ID NO: 323464

SEQ ID NO: 358543 - DNA, 930 bp, Pseudomonas aeruginosa
atgaacggtacggacctcgacctgccgctcgccagccgcgccgaactggatctccagcgacgtctcgcgcgttgccgtcgccactatgtcggcaacgctttgcaagcgcgcctggacatcgcccaggccgcccccgacgtcgatctcgaactgagcctggcgtgggacggcctgcccctgcgctttctctgccaggctccggcgctggcccactggctcgcgccgaacctgcaggaggcagccttcgccagcctgccggcggccctgcaactggccttgctggagcgcgaaggcaacgtctttcccggcctggtctggtacggcctgagcccggcgcaaccacgcgctgcgatgggcctgcgtctgagcctggaacgcgacgaccagcgcctggcgctctggctcgacggcgatcccgcgacgctgctggcacgcctgccgccgcgcccctcgacgcaacgcctggccataccgctgcgcctgtcgctgcaatggcccggcctgccgctggacgccagcgagctgcgcaccctggagcccggcgacctgttgctgctgcctgccggtcatcgccccgacgcagcgctgctgggggttctcgaaggacgcccctgggcgcgctgccaacgccactccacgcaactggaactgctcgacatgcacgacaccccctccctcgccgacggcgaggacctgcacgaactcgaccaactgccgatcccggtcagcttcgaggtcggccgccgcaccctggacctgcataccctctccaccctgcagccaggctcgctgctcgatctcgacagtgccctggacggcgaagtgcgcatcctcgccaaccagcgctgcctcggtatcggcgaactggtcaggctccaggatcggctcggggtgcgcgtaacccgcctgttcggacacgacgaagcatga

SEQ ID NO: 358544 - DNA, 399 bp, Pseudomonas aeruginosa; identical to SEQ ID NO: 338412

SEQ ID NO: 358545 - DNA, 477 bp, Pseudomonas aeruginosa
atgagcctggcgctgctgttgcgcgtccgacgcctgcgcctggaccgggccgagcgcgcccagggccgccaattgctacgggttcgcgccgcggcgcaggaacacaccgagcgccaggcggcgcaacgggactaccgcgactggcgactggccgaagagcaacggctgtttctcgcctgccaggcggccatgctcgaccgccggcgcctggaagcctggcagcagcaggtagggctgctgcgggaaaaggaagccggcctggaacaggactgcgccgaggccgcgcagcgcctcgaaggggagcgcgagcgcctgcggcagtgccggcgagagctgctggaacgccagcggcaactggagaagttcgccgaactggagcgccacgtcgacgccgagcgccaggggctgcgcgaacgcagcgaggaaggcgaactggaagaattcacccgccacgagacctggccatgctcaagctga

SEQ ID NO: 358546 - DNA, 1290 bp, Pseudomonas aeruginosa
atgcgccacgccatcgaaggctgccggccgatccagatccgcgggcgggtcacccaggtcaccggaaccctgctcaaggccgtggtgcccggcgtgcgcatcggcgaactctgccagttgcgcaatcccgaccagaacctggcgctgctcgccgaggtcatcggcttccagcagcaccaggcgctgctcaccccgctcggcgagatgctcggggtttcctccaacaccgaagtcagccctaccggcggcatgcatcgcgtggcggttggcgagcacctgctcgggcaggtgctcgacggcctcggccgccccttcgacggcagcccgccggccgagccggcggcctggtatccggtctaccgggatgccccgccgccgatgagccggcgcctgataaagcggccgctatcgctgggtgtgcgcgccatcgacggcctgctgacctgcggcgaaggccagcgcatgggcatttttgctgccgccggcggcggcaagagcaccctgctggccagcctggtgcgcaatgccgaggtggatgtgacggtactcgccctggtcggcgaacgcggtcgcgaagtccgcgagttcatcgaaagcgacctcggcgaacaggggctgcgccgctcggtgctggtggtcgccacctccgaccgaccggcgatggagcgcgccaaggccggtttcgtcgccaccagcatcgccgagtatttccgcgatcagggtcgccgcgtcctgctgctgatggactcgctgacccgcttcgccagggcccagcgcgaaatcggcctggcggccggtgaaccgcccacccgccgcggctacccgccctcggtgttcgccgcgctgccacgcctgatggagcgtgccgggcaatccgagcggggctcgatcaccgcgctctacaccgtactggtggaaggcgacgacatgagcgagccggtggccgacgagacccgctcgattctcgacgggcacatcgtgctgtcgcgcaagctggccgccgccaaccactatccggccatcgacgtgctgcactcggtgagccgggtcatgaaccagatcgtcgacgacgatcagcgccatgcggccggacgcttgcgcgaatggctggcgaagtacgaggaagtcgagttgctgctgaagatcggcgaataccagaaaggccaggacagtgaagccgaccgggccatcgagaagatcgcggcgatccgccagtggctgcgccagggtacccacgaaaccagcgattacgcacaggcctgcgcgcagttgcggagcctctgcgcatga

SEQ ID NO: 358547 - DNA, 867 bp, Pseudomonas aeruginosa
atggacatcctccagagttcctccgccgcgcccctcgcgccgcgggaagcggccaacgcccccgcgcagcaggctggcggcagcttccagggcgagcgcgtccactacgtttccgtttcgcagtcgctggccgatgccgcggaagagctgaccttcgccttttccgagcgcgccgagaaatccctggccaagcgccgcctgagcgacgcccatgcgcgcctgagcgaagtccagaccatgctgcaggagtactggaagcgcattccggacctggaaagccagcagaagctcgaggcgctgatcgcccacctgggcagcggtcaactgagcagcctggcgcagctcagcgcttacctggagggcttctccagcgagatcagccagcgcttcctggcgctgtcgcgggcgcgcgacgtcctggccgggcggccggaggcgcgggcgatgctggcgctggtcgaccaggcgttgctgcggatggccgacgagcagggcctggagatcgaactcggcctgcgcatcgagccgctggccgccgaggcttccgccgccggtgtcggcgatatccaggcgctgcgcgatacctaccgtgacgcggtactcgactaccggggcctgtcggcggcctggcaggacatccaggcgcgcttcgccgcgacgccgctggagcgggtcgtggccttcctgcagaaagccctgagcgccgacctggacagtcagtcgagccggctcgatccggtgaagctggagcgggtcatgagcgacatgcacaagctgcgcgtgctcggcggcctggcggagcaggtgggggcgctctggcaggtgctggtgacgggggagcggggccatggcatacgggccttctga

SEQ ID NO: 358548 - DNA, 279 bp, Pseudomonas aeruginosa
atggcatacgggccttctgaattgaccggcgcagtcatcgccttgctcgagaagcgctgggtcggcgtcgccgaggtgcaggcgttgctcgagccgttgccgctggccgacgtcgcccggcagatccatttcttccgcgaactgaagcgtctctaccgcctgttgccggtcgaagtgttcggcgacgacgagcagcgccagaatcttttgaatgcctgccagatggcactcgacctggcgatcgagcgcgaagaggagcagcagcatggactgggttga

SEQ ID NO: 358549 - DNA, 372 bp, Pseudomonas aeruginosa
atggactgggttgagctggccgtcgcgcagttctgccaggacctgcgggtgagcgtaccggcgccgctggcgcgcgtggtgcaactggatttcgaggacagcggcaccttgcagctggaacgccatggcgaacagttgtcgctctggctggcctgtgacctggcctggcaccaggcctatcgcggcaccctgcgggcgttgcgcctgtgccatgcgcgcgcggccgggagcctgccgctgcgttgcgcctggagcggcgaatcgcgcctgctgctgtgcatcaccctggaagcccggcaggtcggcatcccgacgttgcaccaggccttgcaggcgctgcgctcggcgcgcagcgaagtgctcgccgcatga

SEQ ID NO: 358550 - DNA, 366 bp, Pseudomonas aeruginosa; identical to SEQ ID NO: 338416

SEQ ID NO: 358551 - DNA, 330 bp, Pseudomonas aeruginosa; identical to SEQ ID NO: 338417

SEQ ID NO: 358552 - DNA, 2121 bp, Pseudomonas aeruginosa
atgaacgacctgagcgggcttctcggccgggtcggcgagcgcaaggacatcctgctggtggtgttgctgctggcggtggtgttcatgatggtgctgccgctgccaccgctgctgctggacatcctcatcgccgtcaacatcaccatctccgtggtcctgctgatgatgtcggtgtacatcggctcgccgttgcagttctcggtgttcccggcggtgctgctgatcaccacgctgttccgcctggcgctgtcggtgagcaccacgcggatgatcctgctgcaggccgacgcggggcagatcgtcaacaccttcggcagcttcgtggtcggcggcaacctggtggtgggcatcatcatcttcctgatcatcaccatcgtgcagttcctggtgatcaccaagggtgccgagcgggtcgccgaggtcagcgcgcgcttttccctggatgccatgccaggcaagcagatgagcatcgacggcgacatgcgtgccggcgtgatcgatgtcaacgaggcgcgggcgcggcgcgcggtgatcgaaaaggaaagccagatgttcggctccatggacggcgcgatgaagttcgtcaagggcgacgccatcgccgggctgatcatcatcgtcgtcaacatcctcggcggcatcgccatcggcgtcacgcagaagggcctgagcaccgccgacgcgctgcaactgtacgcggtgctgaccgtcggcgatggcatggtctcgcaggtgccggcgttgctgatcgccatcaccgccgggatcatcgtcacccgggtgtcttccgacgaatcggcggacctcggcagcgacatcggcgaacaggtggtggcgcagcccaaggcgctgctgatcggcggcctgttgctggtgctgttcggcctgattcccggtttcccgaccctgaccttcctggctctcgcgctgctggttggcggcggcggctacttcatgctctggcgccagcgggcccaggccagcgccggttcccgcgacctgccggcgctgctcgcgcagggcgccggagcgccatcggccaaggcgcgtggcaaggctggcggcggcaagccgaaggccgggcgtctcgccgagcaggaagaattcgccctcaccgtgccgttgctgatcgacgtcgatgccagcctccaggaacgtctcgaggcgatgtcgctgaacgaggagctggtgcgggtacgacgcgcgttgtacctggatttcggcgtgccgttcccgggtatccacttgcgcttcaacgaagcgatgggcgatggcgaatacctggtgcagctacaggaggtcccggtcgcgcgcggatgcctgcggccgggctggttgctggtgcgcgaacgcgccgcgcagctggaactgctcgcggtcccccacgagccggcagagctgcaggtgccgggagaagaggcgagctgggtggagcaggcgcatcaggatcgcctggagcgttccggctgtgcctgcctgggcctggagcaggtgctcacctggcacctgtcccatgtgctgcgggagtacgccgaggatttcatcggcatccaggagacgcgctacctgctggagcagatggagcagggttacggcgagctggtgaaggaggcgcagcggatcgttcccctgcagcggatgaccgagattctccagcgcctggtcggcgaggacatctcgatccgcaacatgcgggcgatcctcgaggcgatggtggagtgggggcagaaggagaaggacgtggtgcagctcaccgagtacatccgcagcagcctcaagcgctacatctgctacaagtactccagcggcaacaatatccttcccgcctatctgctggaccaggcggtggaggagcagatccgcggtggcatccgccagaccagcgccggcagctacctggcccttgacccggcgataacccaggccttcctcgagcgcgtgcggcagaccgtcggcgatctcgcgcagatgcagaaccggccggtgctgatcgtttccatggatatccgccgctacgtgcgcaagctggtggagagcgactatgccgggctgccggtgctgtcctaccaggagctgacccagcagatcaacatccagccgcttggcaggatcgtgttgtga

SEQ ID NO: 358553 - DNA, 435 bp, Pseudomonas aeruginosa; identical to SEQ ID NO: 319124

SEQ ID NO: 358554 - DNA, 297 bp, Pseudomonas aeruginosa; identical to SEQ ID NO: 319123

SEQ ID NO: 358555 - DNA, 885 bp, Pseudomonas aeruginosa
atggaagtcagaaaccttaatgccgctcgcgagctgttcctggacgagctcctggccgcgtcggcggcgcctgccagtgccgagcaggaggaactgctggccctgttgcgcagcgagcggatcgtgctggcccacgccggccagccgctgagcgaggcgcaagtgctcaaggcgctcgcctggttgctcgcggccaatccgtccgcgcctccggggcagggcctcgaggtactccgcgaagtcctgcaggcacgtcggcagcccggtgcgcagtgggatctgcgcgagttcctggtgtcggcctatttcagcctgcacgggcgtctcgacgaggatgtcatcggtgtctacaaggatgtcctgcagacccaggacggcaagcgcaaggcgctgctcgacgagctcaaggcgctgaccgcggagttgaaggtctacagcgtgatccagtcgcagatcaacgccgcgctgtcggccaagcagggcatcaggatcgacgctggcggtatcgatctggtcgaccccacgctatatggctatgcggtcggcgatcccaggtggaaggacagccccgagtatgcgctgctgagcaatctggataccttcagcggcaagctgtcgatcaaggattttctcagcggctcgccgaagcagagcggggaactcaagggcctcagcgatgagtaccccttcgagaaggacaacaacccggtcggcaatttcgccaccacggtgagcgaccgctcgcgtccgctgaacgacaaggtcaacgagaagaccaccctgctcaacgacaccagctcccgctacaactcggcggtcgaggcgctcaaccgcttcatccagaaatacgacagcgtcctgcgcgacattctcagcgcgatctag

SEQ ID NO: 358556 - DNA, 507 bp, Pseudomonas aeruginosa; identical to SEQ ID NO: 338422

SEQ ID NO: 358557 - DNA, 1173 bp, Pseudomonas aeruginosa
atgaatccgataacgcttgaacgcgccggactgccctacggggtggccgacgccggggatatcccggcgctcggcaggccggtcgcgagggatgtcgagagtctgcgggtggagcgcctggcggcgccggctgcggcttccgcgagcggcacgggggtggcgctgacgccgccgtccgcagccagccagcagcgcctggaggtcgccaatcgtgcggagatcgccagcctggtgcaagcagtgggcgaggatgtcggactggcgcggcaggttgtgctggccggcgcttcgacgctgttgtccgccggcctgatgtcgccgcaggcgttcgagatcgagctggcgaaaatcaccggcgaagtcgagaaccagcagaagaaactcaagctgaccgaaatcgagcaggcgcgaaagcagaacctgcagaagatggaggacaaccagcagaagatcagggaatcggaagaagccgcgaaagaagcccagaagtccggtctggcagccaaaatctttggttggatcagtgcaatagcttcgatcatcgtcggcgcaatcatggtggcaaccggcgtcggcgcggccgcgggtgcactgatgatcgcgggcggtgtcatgggagtggtctcccagtcggtacagcaggcagccgcggacggattgatcagcaaggaagtgatggaaaagctcggcccggcactgatgggtatcgagatcgccgtcgcgctgctggcggcggtggtcagcttcggcggctcagcggtcggcgggctggccaggctgggcgcgaagatcggcggcaaggcggccgagatgaccgccagcctggcgagcaaggtcgccgacctgggcggcaagttcggcagtttggccggccaatcgctgtcgcactcgctgaaactcggcgtgcaggtttccgacctgaccctggacgtcgccaacggcgcggcccaggccactcattcgggattccaggcgaaggccgcgaaccgccaggccgacgtgcaggaatcgcgtgccgacctgaccaccctgcagggcgtgatcgagcgcctgaaggaagagctgagccgcatgctggaagcattccaggaaatcatggagcggatcttcgccatgctccaggccaagggtgaaaccctgcacaacctgtccagccgaccggcagcgatctga

SEQ ID NO: 358558 - DNA, 888 bp, Pseudomonas aeruginosa
atgatcgacacgcaatattccctggcggctacccaggccgcgatcccctccgagccgatcgctcccggcgccgccgggcgttccgtcggcacgccgcaagcggctgcggacctgccgcaggtgccggccgcgcgggccgaccgggtcgaactgaacgctccgcgccaggtgctcgatccggtgcgcatggaagcggccggcagcgagctggacagcagcgtcaagcttctgctgattctcttccgcatcgcgcagaaagcgcgcgagctgggcgtgctccagcgcgacaacgagaaccagtcgatcatccacgcgcagaaggcgcaggtggacgagatgcgcagcggcgccacgctgatgatcgccatggcggtgatcgctggcgtcggcgcattggcctcggcggtggtcggcagcctcggcgcgttgaagaacggcaaggccatcagtcaggagaagaccctgcagaagaacatcgatgggcgcaacgaactgatcgacgcgaagatgcaggcgcttggcaagacctccgacgaggatcgcaagatcgtcggcaaggtctgggcggcggaccaggtgcaggacagtgtggcgttgcgtgcggcgggccgtgccttcgagagccgcaacggcgccctgcaggtggccaacacggtgatccagtccttcgtccagatggccaacgcctcggtccaggtgcgccagggcgaatcgcaggcgagcgcccgggaaggagaggtcaacgccaccatcgggcagagccagaagcagaaggtcgaggaccagatgagcttcgatgccggcttcatgaaggacgtcctgcagctcatccagcagtacacccagagccataaccaggcctggcgtgcggcggccggagtggtctga

SEQ ID NO: 358559 - DNA, 438 bp, Pseudomonas aeruginosa
atggatttaacgagcaaggtcaaccgactgcttgccgagttcgcaggccgtatcggtttgccttccctgtccctcgacgaggagggcatggcgagcctcctgttcgacgaacaggtgggcgtcaccctgttgctgctcgccgagcgcgagcgtctgttgctggaggccgatgtggcgggcatcgatgtgctgggcgaggggatctttcgccagctcgccagcttcaaccgccattggcaccgtttcgatctgcatttcggcttcgacgagctgaccggcaaggtccagttgtatgcgcagattctcgcagcgcaactgaccctcgaatgcttcgaggcgaccttggccaatctgctcgatcacgccgagttctggcagcgcctgctgccgtgcgacagtgatcgcgaggcggtcgctgcggtcggcatgagggtttga

SEQ ID NO: 358560 - DNA, 246 bp, Pseudomonas aeruginosa
atgaaaatcgaatcgatttcgccggtgcagccgtcccaagacgctggagctgaggcggtggggcatttcgaggggcgttcggtgacccgcgcggccgttcgcggcgaggaccgttccagcgtggccgggctggcgcgctggctggcgcgcaacgtggctggcgatccgcgtagtgagcaggccttgcagcgtctcgccgacggtgacggcacgccgctggaggcgcgcacggtccggcgcaggtga

SEQ ID NO: 358561 - DNA, 414 bp, Pseudomonas aeruginosa
atgctgttgccgctggcgttgctgctcggcggttgcgtcagccagcccgcgccgatgtcgccgaaggtgacggtgggtggttcggtgggcggcgtttccctgcaggcgcgccaggcgcaactcaggctgcgcctgtatgccgtcgttcagggaaggatgcaaacgattgccgagcggcgctaccgggtgtccgggttgccgttgcgctatgcgttcgatctggaggtcgacaggttggagggcgaggcattgtacctacgcaccgagctttcctgggtgggcgtcgcggcggtccaggcgagcgcctggcagcgggtggcggcgggcgtcgatgagcgggtccggctggttcggcgcgactgttttccgaattgtacgaccgctcgcccggaagaaagatctggcaacgattga

SEQ ID NO: 358562 - DNA, 831 bp, Pseudomonas aeruginosa; identical to SEQ ID NO: 338429

SEQ ID NO: 358563 - DNA, 423 bp, Pseudomonas aeruginosa
atggatcatctgttgagcggattggccactcgcctgggccaagggccctttgttgccgatcggacgggttcgtaccacctgcgcatcgacggacagagcgtcctgttgctgcgccagggcgacgacctgctgctggaaagcccgctggagcacgcccccctggacccgcagcgcgaccagcaggggttgctgcgggcgctgttgtcgcgggtcgccagttggagccggcgctatccccaggccatcgtcctggacgcggacgggcgcctgctgttgcaggcgcggctgggcctcgacggcctcgatcccgagcgactcgaacgggccctggccgcccaggtggggctgctcgaggcgctggcgccggagctggagccgctgccccgcgggttgccgccgcaggctccggtgtggcgtccctga

SEQ ID NO: 358564 - DNA, 1803 bp, Pseudomonas aeruginosa
atgcgccgcctgctgatcggcggactgctggcgctgctgcctggcgcggtcttgcgcgcgcagccgctggactggcccagcctgccttacgactatgtggcgcagggcgaaagcctgcgcgacgtgctggccaacttcggcgccaactacgatgcctcggtgatcgtcagcgacaaggtcaacgaccaggtcagcggtcgcttcgacctggaaagcccgcaggccttcctgcagttgatggcctccctctacaacctcggctggtactacgacggcaccgtgctgtacgtattcaagaccaccgagatgcaatcgcggctggtgaggctggagcaggtcggcgaggccgagctgaagcgcgcgctgaccgccgccggtatctgggaggcgcgcttcggctggcgtgccgacccttccgggcggctggtgcacgtgtccggtccggggcgctatctcgaactggtcgagcagaccgcccaggtgctggagcagcaatacaccctgcgcagcgaaaagaccggcgacctcagcgtggagatcttcccgctgcgctatgcggtcgccgaggaccgcaagatcgagtaccgcgacgacgagatcgaggcgccgggcatcgccagcatcctctcgcgggtgctcagcgatgccaacgtggttgcggtgggcgacgagccgggcaagctgcgcccgggaccgcaatcgagccatgcggtggtccaggcggaaccgtcgctgaatgcggtggtggtgcgcgaccacaaggaccggttgcccatgtatcgccgcctgatcgaagccctcgaccggccctcggcgcggatcgaggtcggcttgtcgatcatcgacatcaatgccgagaacctcgcccagctgggcgtcgactggagcgccgggattcgcctgggcaacaacaagtcgatccagatccgcaccaccggccaggatagcgaggagggcggcggcgccggtaacggggcggtcggcagcctggtggacagtcgcgggctggatttcctgctggccaaggtcaccctgttgcagagccagggacaggcgcagatcggatcccggccgaccctgctgacccaggagaatacccaggcggtgctcgaccagagcgaaacctactatgtgcgggtcacgggcgagcgggtggccgagctgaaggcgatcacctacggcaccatgctgaaaatgacgccgcgagtggtgactctcggcgatacgccggagatcagcctcagcctgcacatcgaggacggcagccagaaacccaacagcgccggcctggacaagatccccacgatcaaccgcacggtgatcgataccatcgcccgcgtgggccatggccagagcctgctgatcggcggcatctaccgcgacgaactgagccagagccagcgcaaggtaccctggctcggcgacattccctatctcggcgcgctgttccgcactaccgcggacaccgtgcgccgctcggtgcggctgttcctcatcgagccgcggctgatcgacgatggcgtcggccattacctggcgctgaacaaccgtcgcgacctgcgcggcggcctgcttgaaatcgacgagttgtcgaaccagagcctgtcgttgcgcaagctgctcggtagcgcccgctgccaggcgctggcgccggccagggccgaacaggagcgcttgcgccaggccggccagggttcgttcctcacgccctgccggatgggtgcgcaggagggctggcgggtgaccgacggcgcctgtcccaaggacggcgcctggtgcgtcggcgcggagcgcgggaattag

SEQ ID NO: 358565 - DNA, 1299 bp, Pseudomonas aeruginosa
atggcctggaagatccgcttctacagcgggctgaaccagggcgccgaagtctcgctcggagagggccgggtggcgcttggcagcgatccgttgcaggccgacctggtgttgctcgacgagggcatcgcggcagtccacctggtgctcgaggtcgatgcccagggcgtgcgcctgctggaatgggcggagggctgcgagcctcgccaggacggccaggcgcaagtcgccggagcgatcctgcaggcgcttgccgggcagacctgcggcccgctgcgctgggcattctgcgacccgcagcggagttttcccgagcgtttccccgaagccgaggtgcagaccgcgccagtgcgccgcaagtcgtccgcccgtgccggcggggcctggctgctcggcgtcagcctggcgctggcgctgtgcctgctgggcatgctcgtcgaaccctggtcggcccgccagcacggcatggccggcgaggagcccctggcgaaggtgcgcgcctacctgcgcgagcagggcatgagcgaggtggatgtgcagcgccagggcgacagtctcctgctcggcggctacctggaggacaacgcccggcgcctggcgctgcagcgctacctcgatggcagcggcgtggactaccgactggaagcacggagcatggaagacattcgccagggcgtggatttcatcctgcagaaattcggctatcggcagatcctcagcagcaacgcggacaagcctggctgggtccggctcaacggcgaactggcggaacaggacgaacgctgggcgcggatcgacgcattgctggagtccgaggtgccgggcctgctcggggtggaaaaccaggtccgggtggccggctcgcacctgcgccgcctcgagcgcctgctggcggacgccggcctcgaccggcaactgagtttccgcgagcgcggcgagcgcatcgagttgagcggtacgctcgacgaggtccagctcagcgccttctaccgcctgcagcgcgagttccagcaggagttcggcaaccgcccgagcctggagctgctcagtcgcggcaagcgcgccagcggcgacgaactggagttcacggtgcgctcggtgtcgctggggcgggtgccctatgtagtgctcggcgacggccagaaatacccggtgggcgcctcgacatcccgcggtgtgcgaatcctcgccatcgagccggagtcgatcctggtggcccgcggcaagcagcgtttcatcatcaatctcaaaggggaggtgctccatgatgacagccttggaaacgcgactgtcggtcgctga

SEQ ID NO: 358566 - DNA, 204 bp, Pseudomonas aeruginosa; identical to SEQ ID NO: 319110

SEQ ID NO: 358567 - DNA, 258 bp, Pseudomonas aeruginosa
atggcgcagatattcaaccccaacccggggaataccctcgataccgtggccaatgccctgaaggagcaggccaacgcagcgaacaaggacgtcaacgacgcgatcaaggccttgcaggggaccgacaatgccgataacccggcgctgctggccgagctgcaacacaagatcaacaagtggtcggtcatctacaacatcaactcgacggtgacccgtgcgctgcgcgacctgatgcaaggcatcctgcagaagatctga

SEQ ID NO: 358568 - DNA, 348 bp, Pseudomonas aeruginosa; identical to SEQ ID NO: 319108

SEQ ID NO: 358569 - DNA, 432 bp, Pseudomonas aeruginosa
atgagccgcatcgacacaccgccgggattcgccgtctatccgtcggccagtccaaaggcggcgaacctgccggctgtcgatcaggtgctggctttcgagcaggccctcggcggcgagccgccggcggccggacgccgcctggccgggttggagaacggcgctctcagcgagcgcctgctgcagcgctttgcccagccgctgcaagggttggaggcggaccgcctggagctgaaggcgatgctccgtgcggaactgccgctggggcgccagcagcaaacctttctcctccagttgctcggtgcagtcgagcatgcgccgggcggcgaatacctggcgcaactggcgcgtcgcgaattgcaggtgctgatcccgctcaacggcatgctcgacaacctcgtgcgcaacagccacaaactcgacctggagtcatga

SEQ ID NO: 358570 - DNA, 339 bp, Pseudomonas aeruginosa; identical to SEQ ID NO: 319106

SEQ ID NO: 358571 - DNA, 735 bp, Pseudomonas aeruginosa
gtgaaaggtctgtcgtgcatggcgctcctggcactggtcctggcgttgggcgggtgcaaggtcgaactctataccgggatcagccagaaggaaggtaacgagatgctggcgctgttgcgttcggagggcgtttccgcggacaagcaggcggacaaggatggcaccgtgcgcctgctggtggaggaatcggatatcgccgaggcggtggaggtgctcaagcgcaagggctatccgcgggagaacttctccacgctgaaggatgtgtttcccaaggacgggctgatttcctcgcccatcgaagagcgcgcgcggctcaactacgccaaggcccaggagatttcccataccctttccgagatcgatggcgtgctggtggcgcgggtccatgtggtgctgccagaggagcgcgacggactgggcaggaagtcctcgccggcatcggcctcggtgttcatcaagcacgccgccgacgtgcaactggatgcctacgtgccgcagatcaagcaactggtgaacaacggcatcgaaggactcagctacgaccgcatcagcgtggtcctggtgccgtcggccggggtccgccaggtcccgctggcgccacgcttcgagagtgtcttctcgatccaggtggcggagcactcgcgcggacgcctgctcggtctgttcggcctgctgctggcgttgctgctggcgagcaacctggcgcagttcttctggcaccggcaacggggctga

SEQ ID NO: 358572 - DNA, 621 bp, Pseudomonas aeruginosa
atgacattgacggcctaccagttgcgcttctgcccggcccgctacatccacgagtcgcacctgcccgcggtattgctgcggttgctgccggcgctgccggactggcggcgacagagcgttctcaacgcctggctgctggagcaactggaattggactgcgcgttccgcatgcccgcgcaactgggcgggctggccctttacccgcaggcggcgctggaacggaccctgggctggctcggcgcgttgctgcacggccaggccttgcggcaggtgctggacggtgcgcgggtacggcgcatccgcgcgcagatcggcgaacagggccagcgtttctgcctggagcagctcgacctgctcatcggtcgctggccacccggctggcagcgggccttgccggaaaacccggaagaaggctatttccggcgctgcggcctggctttctggctggccgcctgtagcgatgccgactgcggtttctcgcggcgcctgcgcctgcgcctggaggccatgccggccccggcggactggaccttcgacgaacaacggcgatccctggcgcggaccctgtgcctgaaggtcgcccgacaagcgagcgatgaatgcttccatttgttgaactag

SEQ ID NO: 358573 - DNA, 645 bp, Pseudomonas aeruginosa
atgcttccatttgttgaactagacgccagtcgcgtacggctggcccccgggcaggccctgttgcgcgcccgcgactaccaggactacctcagcgccaaccgcctggtggaagcggcccgcgagcgtgccgccgaaatcgagcgcgaggcccacgaggtttaccaggagcagaagcgcctgggctgggaggccggactggaggaggcgcgtctgcgccaggccgggctgatccaggaaacgctactgcgctgcaatcgctactaccggcaggtcgatcgccagcttggcgaggtggtgctgcaggcggtgcgcaaggtgttgcgccactacgacgctgtcgagctgaccctggcggccacgcgcgaggcactggcattggtgagcaaccagaagcaggtgatcctgcacgtccagccggaacaactggccgcggtgcgcgagcaggtcgcccgggtgctcaaggatttccccgaggtgggctacctggaagtggtcggcgatgcccggctggaccagggcggttgcatcctggaaaccgagatcgggatcatcgacgcttcgctcgacagccagttggcggcgttgcaggccgcattgacggagagcgtggcgcggagcggcgaggaggaaggggacgccggttga

SEQ ID NO: 358574 - DNA, 2295 bp, Pseudomonas aeruginosa
atgaacaggctgtgtgtactggggcttctcatcgggctgagcgggagcccggcactggcggctggccagggcgaatccggcaatccgccggccaccgacaaggagcgtttcatcgccagcctgatggctcgcatgagcaacgcggaaaagatcggccagctacgcctggtcagcgtcggcgccgaccatcccaaggaagcgctgatggcggatatccgcgccggcaaggtcggcgccatattcaataccgtgacccgcccggacattcgcgccatgcaggatcaggtccgccatagccgcctgaagatcccgctgttccatgcctacgacgtggcccacgggcaccgcaccatctttcccatcagcctcggcctggccgccagctgggaccccgaggtggtcgcccgcagcgcgcggatctccgccctggaagccagcgccgacgggctcgacatgagcttctcgccgatggtcgacatcacccgcgacgcgcgctgggggcgggtctcggaaggcttcggcgaagacacctacctgacctcgctgctgtccggcgtgatggtccgtgcctaccagggctccaacctggccgccccggacagcatcatggcggcggtcaagcacttcgccctgtacggcgcggccgaaggcggccgcgactacaacaccgtggacatgagcctgccgcgcatgttccaggactacctgccgccctacaaggccgcggtggacgccggcgccggcgcggtgatggtctcgctgaacaccatcaacggcgtgcccgccaccgccaaccgctggctgctgaccgacctgttgcgccagcagtggggcttcaaggggctgaccatcagtgaccacggcgcggtgaaggaactgatcaagcacggcctcgccggcaacgagcgggacgccacgcgcctggcgatccaggccggtgtcgacatgaacatgaacgacgatctctactcgacctggctaccgaagctgctggcggccggcgagatcgaccaggccgacatcgatcgcgcctgccgcgacgtgctggcggcgaagtacgacctcggcctgttcgccgatccctaccggcgcctgggcaagccggacgacccgccgttcgacaccaacgccgagagccgcctgcaccgccaggccgcccgcgaggtggctcgcgaaggactggtcctgctgaagaaccgcgacggtctgctgccgctgaagaaacaggggcggatcgccgtgatcggccccctggccaagagccagcgcgacgtcatcggcagttggtcggcagccggcgtgccacgccaggcggtaaccgtctaccagggcctggccaatgccgtcggcgagcgtgccaccctgctctacgccaagggtgccaacgtcagtggcgaccaggcgatcctcgactacctgaacagctacaacccggaagtcgaggtcgatccgcgctccgccgaggcgatgctcgaggaggccttgcgcaccgcgcgcgacgccgacctggtggtcgccgtggtcggcgaatcgcagggcatggcccacgaggcctccagtcgcaccgacctgcgcatcccggccagccagcggcggctgctgaaggcactgaaggccaccggcaagccgctggtgctggtgctgatgaacggccgaccgctgtcgctgggctgggagcaggaaaacgccgatgcgatcctggaaacctggttcagtggcaccgaaggcggcaatgccatcgccgacgtgctgttcggcgagcacaaccccagcggcaagctgaccatgtccttcccgcgctcggtgggccaggtaccggtctactacaaccacctgaacaccggccggccgatggaccacgacaaccccggcaaatacacctcgcgctatttcgacgaagccaacggcccgctctacccgttcggctacggcctcagctacaccgagttcagtctctcgcccctgcgcctgtccagcgaacggctggcccgcggcgctaccctggaagcgcgggtcacgctcagcaacagcggcaagcgcgccggcgccacggtggtccagctttatctgcaggacccggtcgccagcctcagccgtccggtgaaggaactgcgcgggttccgcaaggtgatgctggagcccggcgaatcgcgggagatcgtcttccgcctcggcgaggcagacctgaagttctacgacagccagctcaggcacacggccgagccgggcgagttcaaggtcttcgtcggcctggattcggcgcaaaccgaaagccgcagcttcaccctgctctga

SEQ ID NO: 358575 - DNA, 2058 bp, Pseudomonas aeruginosa
atgcttatcagcagctacaaccaggttcttgtcgccttttccctgattgtggccatcctggcgtcctacaccgctctcgacatggccggccgggtgaccctggcgaaaggccgcgaggcgctctcctggctgatcggcggcgctttcgccatgggcttcggcatctggtcgatgcatttcgtcggcatgctcgccttcagcctgccgatcccgctcggctacgacctgggcctgaccctgctgtcgctgctgctggccgtcggcagttcggccttcgccctctggctggtgtgccaggcggaactcccctggcaacgcctggcgctgggcgccctgctgatgggcagcggcatcgccgccatgcactacaccgggatggccgccctgctgatgatgccggggatcgtctacgacccgctgtggctcggcctctccatcctgatcgcggtgatcgcctccggcgccgcgctgtggatcgccttccgcctgcgccatggcagccggcgcatcgtcctggtccgcgccggcgccgccctggtgatgggctgcgccatcgtcggcatgcactacaccgggatggccgccgcgcagttccccctgggcagcttctgcggcgccgccggccgaggcatcgacaacggctggctggcggtgctggtcatcgtgatcaccctggcggtgatcgccatcgccctgatcgtctcggtgctggactcgcgcctcgaggcacgtacctcggtgctcgccacctccctcgcacgagccaaccgcgagctgatccagttggccctgcacgacaacctgaccaagctgcccaaccgcatgctcctcgacgaccgcctggagcaggcgatccagcaggcgatccgcgacgatcgccggttcgccgtgctgttcatggacctggacggcttcaaggcggtcaacgatgcctacggccatcacctcggcgacctgttgctgatcgaagtcgccgagcgtatccgcgccaacgtccgcgcccaggacaccatcgcccgcctcggcggcgacgagttcgtcctgctgatcgaggcccgagagcccgccgacgccgcgaccctggccgagaagctggtgaagcggatcagccagccgtaccagatatcccgccacgaggtgcggatctcggcgagcatcggcatcgcgctctaccccggcgacgggcagacccgccacgagctgatgatcaatgccgacgcggcgatgtatcacgccaaggaccagggacggaacggctactgcttcttcgagagttcgatgaacgccaacgcccaggaacagttgcaactactgcatgacctgcgccaggccctggagcgccggcaactggtcttgcactaccagcccaaggtactggcgccgaacggaccgatgatcggcgtggaagcgctgctgcgctgggagcatccgcaacacgggctgatcacccccggccagttcctgccgctggcggaaaagaccggcctgatcgtgcagatcggcgagtgggtgctcgacgaagcctgtcggcagatgcgcctctggctggacggcggacatgcggactggaacatcgcggtgaacctttcggccctgcagttcgcccatgccggcctggtcgactcggtacgcaacgcactcctgcgccacagcctggagcccagccacctgatcctcgaggtgaccgaatcgaccgccatgcgcgatgccgatgccagcctggtgatcctcgagcagttgtcggcgatgggcgtcggcatctccatcgacgacttcggcaccggctactccagcctgctgtatctcaaacgcctgccggcgagcgaactgaagatcgaccgtggcttcatcaacgagctggcccacgacagcgacgacgccgcgatcgtctcggcgatcgtcgccctcggccgcacgctgaacctgaagatcgtcgccgagggcgtggaaaccgaggcccagcaggagttcctgacccgcctcggctgcaattcgctgcaaggcttcctgctcggcaggccgatgccggccgagcagttgctcgccagcgtcgcctga

SEQ ID NO: 358576 - DNA, 342 bp, Pseudomonas aeruginosa
atggaaaagcccttctcggatgatgtcagcgtgaatgtcctgcgtcgcatgaaagaaggcggcttcgacttcgcgcgcatccatcccatcgacttcttcgccatctttcccagtgagcgggaggcccgccaggcagcgggccagtttcgcggcgaatccctcagggcccaggtcgtcgctcgcgacgatggctcctggaacctgcaggtcagcaaggtgatgtatgccacccatgccgccatcggtgccttcgaacacgacctggaggaagtcgtggtgccgctgggcggcgtgctggacgggtggggcgtgacccaggaggtcacttcgctgcgtccgtga

SEQ ID NO: 358577 - DNA, 699 bp, Pseudomonas aeruginosa
atgagcgatattctgatcctgacccatgccgagttctgtccgccaggccatctgggtgccgtgctggcggagcgcggcctggacttccgcgtgatccgcgccgacctcggcgaactcgccggtctcgacgccgaacgcccgcgagcggtggcgatcatgggtgggccgatgagcgtcaacgacgacctgccctggttgcgcgacgaactggcgctgctgcgtcgcttcatcgagcggcgcatcccgctgatcggccattgcctcggcggccagttgctggcccgcgccctgggcgcgacggtgcggcaccagccctacaccgaaatgggctggcagcccatgcagcgggaaagccgcgacagtccatggctagccgggctgccggagcgcttctcgatcttccagtggcatggcgatgccttcgacctgccgcagggcgccgagcgcctgctgtccagcccgtggtgcgagaaccaggggttttcctggggtggtcacgtactcggcctgcaaggccatccggaaatgaccgaggaactggtgcggcgctggatcgccggctggccgcacctgctcgatccctcccagcccagccagcaatccgccgaggacatgctggccgggttgcctgccaaggttgccgggctgaatcgggtggccgagggtttctaccgtcattggctgtcgctgatcgattga

SEQ ID NO: 358578 - DNA, 1413 bp, Pseudomonas aeruginosa
atggcacgcatgttttacgacgagatgcacgatgctggcggcgaatgccgctcgcattatcgggaattcgctcgctggctggccgacacccctgaagagcaactgctgcaacgccggcgtgaagccgacctgctgttccaccgcgccggcatcaccttcaccctgtacggcgacgagcagggcaccgagcgcctgatccccttcgacaccatcccgcgcagcattcccgcggcggagtgggcgcacatcgaggccggctgcatccagcgcgtccaggcgctgaacctgttcctcgccgacctctaccacgaacagcgcatcctcaaggccggggtgattcctgccgagcaggtcctggccaacgaccagtaccaactggcgatgcagggactggacctgccgggcaacgtctacgcgcacattgccggggtcgacctggtccgcgacggcagcggcaactattacgtgctggaggacaacctgcgcacgcccagcggtgtttcctacatgctggaaaaccgcaagatgatgatgcgcctgttccccgagctgttcgtccgccagcgcgtggcgccgatcgaccactacccggacctgctgctcgacaccctaaagcgggccagtgacgtcgaatcgccgagcgtggtggtattgacgccgggacgtttcaacagcgcctacttcgaacacgccttcctcgcccgcgagatgggcgtggaactggtcgaaggcgccgatctgttcgtccgcgacgagcgggtctacatgcgcacgacggccggaccgcaaccggtggacgtgatctaccgaaggatcgacgacgccttcctcgacccgctggcgttcaacccggattcgctgctcggcgtgcccggcctgctggccgcctaccgggccggcaacctggtgctggccaacgcgatcggtaccggggtggccgacgacaagtcgatctacccctacgtgccggacatgatccgcttctacctcggcgaagacccgctgctgcacaacgtgccgacctggcaatgtcgcaagccgaaggaactggcgcacgtcctggcgcacctgccggagctggtggtgaaggagacccagggttccggcggctacggcatgctggtcggaccggcggccagccgggaagaaatcgagctgttccgcgagcgcctgaaggctcgcccggaggcctatatcgcgcaaccgacgctgtccctgtcgacctgtccgaccttcgtcgagagcggcgtcgcgccgcgccatatcgacctgcggccgttcgtcctgtcggcgccggatcgggttcgcctggtgcctggcgggctgacccgggtggcgttgcgcgaaggctcgctggtggtcaactcgtcccagggcggcggcaccaaggacacctgggtggtggaggaataa

SEQ ID NO: 358579 - DNA, 954 bp, Pseudomonas aeruginosa
atgctcagccggaccgcttccgacctgtactggatgtcgcgctacctggaacgcgcggagaacctcgcccgcatgctcgacgtcagctactcgctgtcgctgttgccgcaggaccgcaacggtggcggcctggacgaactggccatgccgctgctgatcaccggcaccctcgacgcctacctggagcgccacggcgaactggccgccgagcgcctgctgagtttcttcgccctcgacccggacaacccggcgagcatctacagctgcctggccgcagcgcgcgccagtgcccatgcggtacgcgggcggatcaccctggacatgtgggagaacatcaacgccacctggctggaaatgcgcggcatcgccgccgagggcatcctgcgctatggcatcagtcgtttctgcgaatgggtgaaggaccgctcgcacctgttccgcggcgcgaccttcgccaccagcatgcgcaacgatgcgttccgcttcatccgtctcggaaccttcatcgaacgcgccgacaataccttgcgcctgctcgatgcgcgctaccagacccagggcgaagcggcgctcgccggggcggacgagggcaccgcgcgcggctactaccagtggagcgcgctgctgcgggcgctatccgccttcgagggctacaccgagctgtaccgcgcctcgcccaacgcgcgcaacatcgccgaattgctgctgttgcgcgaggacgtgccacgttcgctgctgtcctgcatcgaggaactgagcgagatcctttccggcctgcccggcgtcaacggccggccggcgcagcgcctggccgccgagctggaggcgcgggtgcgctacaccggcatcgacgaggtgctggaacagggcctgcatacctggatcaccgactacatcctgctggttcgccagttggccaacgccattcacagctcctacctggaggccgcatga

SEQ ID NO: 358580 - DNA, 801 bp, Pseudomonas aeruginosa
atgagactctcgatcacccacgacaccacctatcgctacgaagaccgggtgcgcgccagcatccagtacctgcgcctgaccccgcaggacagcgagcgccagcacgtggtcgattggcgcctggacctgccgcgcccggcgcggccgctgcgcgatccgtacggcaacatcctgcacgtcctgaccctggacgaaccgcatgagtcggtcctgatcgccgcccacggcctggtcgagatcgacgaggagcgcgaggtggagcacgatcgccagtcgccgttgccgttcctgcgcagcacccgcctgaccggcgccgatgccgagatgcgcgccttcgccgaacgcgccatgggcggccgcaaggaccgcggcggcctgctcgacctgatgcatgcgctgcacgagcatatcctctaccagccgggggcgacccgcgtcgacagcaccgccatcgaggctttcggcgcacgcgccggggtctgccaggaccatgcgcatgccttcctcgcctgcgtccgcagccagggcgtgccggggcgctacgtctccggctacctctacaccgaggacgatacgcacctggccagccatgcctgggccgaggcctggctcggcgacggctggtacagcttcgacgtgaccaaccggctcggccgtccggagcgccatctcaagctggccgtcggcctcgactacctggatgcctgcccggtgcgcggcttgcgccgtggcggcggttgcgagcagatgcatgcgagggtgctggtcagcgcgccgctgctgcaggtgcagcaacagtga

SEQ ID NO: 358581 - DNA, 732 bp, Pseudomonas aeruginosa
atgacctactgtgtcgcgatgcacctggccgatgggttggtgttcgcctccgattcgcggaccaacgccgggatcgaccatatcgccaccttccgcaagctgttcaccttcggcacgcctggcgagcgcctgctggtggtgcagacggccggcaacctggcgacctcgcaatcggtgatcaacctgttgcagcagcgcatccgccgggacggcgccagcctgctcaacgtgccctcggtctacgacgccacggcgctggtcgccgagaccacccgcgaggtgctggcccgcgacggcggcaatctggccggcaataccgacctgagctgttccttcctggtcggcgggcagatcgccggcggaccgccggcgctgtacagcatctatccccagggcaacttcatccaggccacgccggacacgcctttcctgcaactgggcgaaagcaagtacggcaagccgatcctcgaccgcaacctgactttcgacacgccgctggagcaggccctgcgctgcgcgctggtgtcgttcgactcgaccatccgcagcaacctctcggtgggcatgccgctggacctgctggtctaccaccgcgacagcctgatcctgccggagggctaccgggtcaccgaggacgacgcctatttcagcgccatccgccgccagtggagcgccggcctgcacgacttgctggagcgcctgccgtcgccgccctcggcgtacaacatctga

SEQ ID NO: 358582 - DNA, 822 bp, Pseudomonas aeruginosa
atgcctgtcactctcccgcgcctggcgttgctaggtgccctgctcttccctgtggctgccgcctgggccgccgagctccgcctggaactgccggggggcacgcagacctggagcagcgaagaactgctcaggcatccgcaggcccgcgacctggacatcccggccgacgtcgcctaccgccggaacatgcgctaccgcgccgtgccactggcggccttgttgaaaggcgtgcatcccgaagaccatttgcaggccgtggccagcgacggcttcgccgccgagttgccggccgccccgctgctcgccgaacagggctcgcaagcctggctggcgatagaggatccgcagcgcccctggccgccgctgggcgccggcaagccgtccgccgggccgttctatctggtctggagcaaacccgaggaaaaacgcatcggtccggagcaatggcccttccaggtcgtccgcatccgctaccagtcccctctggccgaacgcttcccggccctgctgccggccgccgacgccagcgcggaggtgcgcgccggcttcgccgtgttccagaagaactgcctggcctgccaccgtctcaacggtgccggcgacgcccagttcggcccggacctgaacctgccgtacaaccccaccgagtacttccagccgcaattcctcgcccgctacatccgcgacccgcaggcgctgcggcaatggccgcaggcgaagatgccggcgttcccggaacgggtgatcgacgaccaggagttgcgccagttgatcggctacctgcgccacatggccggccgcaaggcgggcgcggccggctga

SEQ ID NO: 358583 - DNA, 888 bp, Pseudomonas aeruginosa
gtgctcgccgagttgttcgccgtgatggcgcccgtgctgttcggcgccggtgtcggttacgtctgggtccgtctcggacacgcctatccaaccgagttcgtttcgcgcatcgtgttcaacatcggttcgccatgcctgatcctcgccaccctggcgcatacccgggtggacctgcacagtttcggccggatggccctggccagcgcgctgatctgcgtctgcatggctgcgctgggctgggcggcggcgcgcctcgggcgccaggagtggcaggtgctggtgccggcctacagcttcccgaatgtcggcaacatgggcctgccggtgtgcctgtatgcgttcggcgaggcggggatgaccctggcggtggcgttctacctgatcatgtcgatcggcaacttcagcctcggcgtgttctggatgagcggcgagcgctcctggcgctcgctgctgggcaatccgatcctgctcagcgtgctgctggccttgttgttgatggggctcgacctgcaactgccacgctggatggcgaataccgtcgacctgatggccgggctgaccattccgctgatgctgatcaccctcggcgtgtccctggccagcatccgcccgcggcaactgggcaatggcttcttctatggcggcctgcgtcttctgctgggggcgctggtgggctggtcggtggcgctggcgttgcaattgccgccgctggcgcagggggtgctggtggtgcagtcgtcgatgccggtggcggtgttcaactatctctacgccttgcgcggcaatcgttcgccggatcaggtcgccagcctggtgctgtgttcgaccttgctgtcgttcgccttcattccgctgctgctgacctggtggctgcctgcgctgcgctga

SEQ ID NO: 358584 - DNA, 1206 bp, Pseudomonas aeruginosa
atgaccgacgcattcatttacgacgccgtgcgtactccccgcggcaagggcaagaaggatggcgcgctgcacagcgtcaagccggtgaacctgatggccgggctgttgcgcgcggtccagcggcgcaacgacctggataccgcccaggtcgacgatatcgtgctcggctgcgtgacgccggtgggcgaccagggcgccgacatcgccaagaccgcggcgctggtggccgactgggacgaacaggttgccggcgtgcagatcaaccgtttctgcgcctccggcctggaggcggtgaacctgggggcgatgaaggtacgctccggcttcgaggacctggtcctggtcggtggcgtcgagtccatgtcacgcgtgccgatgggctccgacggcggcgcctgggcactggatccggaaaccaacctgcacaccagcttcgtcccgcaagggatcggcgccgacctgatcgccaccctggaaggcttcagtcgcgccgatgtcgatgccttcgccctgcgctcccagcagaaggccgccaaggcccgcgccgaagggctgttcggcaagtcgctggtgccggtcgccgaccagaatggcatcgtcctgctcgaccacgatgagttcattcgcgccgactccaccctggaagggctcgccgcgctcaaaccgagtttcgagatgatggggcagatgggcttcgacgccaccgcgctgcgcaagtacagccaggtcgagcgcatcgagcacgtgcatacgccgggcaacagctcggggatcgtcgacggcgccagcgccatgctcatcggctccgaggccaagggccgcgaactgggcctgaaggcgcgggcgcggatcgtcgctaccgcggtgacctccaccgaccccaccatcatgcttaccggccccgcgccggcgacccgcaaggccctggccaaggccggcctgaaggtggaagacatcgacctgttcgaagtcaacgaggcgttcgcttcggtggtgatgaagttcatgaaggacatgggcgtggcggaaagcaaggtcaacgtcaacggcggcgccatcgccatgggccacccgctcggcgccaccggctgcatcatcctcggcacgctgctcgacgaactggagcggcgcaacctgcgctacggcctggccaccctctgcgtaggcggcggcatgggcatcgccaccatcatcgagcgcgtgtga

SEQ ID NO: 358585 - DNA, 2145 bp, Pseudomonas aeruginosa
atgactgacgctatccgttacgaaaaaggccaggacaacgtcgtcgtcctgaccatggacatgcccgggcagagcgccaacaccatgaacggtgtctaccgcgaggcgatggcgaagaccatcgcacggctggaggcggagaaagaggggatcgccggcgtggtgctgacctcggcgaagaagaccttcttcgccggcggcgatctcaacgagctgatcaaggtcaccaaggccgacgccccggccttctaccagggcatcctcgaactcaagggccaactgcggcgcctggagaccctcggcaagccggtggtcgccgcgatcaacggcgctgcgctgggcggcggctgggagatctgcctggcctgccaccaccgcatcgccctggacaatcccggcgtgcagctcggcctgccggaggtgactctcggcctgttgccgggcggcggcgggatcgtgcgcatggtgcgactgcttggcctggagaaagccctgccgtacctcgccgaaggcaagaaggtgcgtccggcggaagcgctcaaggccgggctgatccacgaactggccgacagccccgaggaaatgctggagaaggcccgcgcctggatcctcgccaacccggcggcgaagcagccctgggacagcgccggctacaagattcccggcggtacgcctgccagtcccaacgtggcgcagatgctggccatcgcaccgtcggtgctgcgcgacaagaccaagggttgcttcccggcgcccgagaagatcatgtgcgcggcagtggagggcgcccaggtcgatttcgacaccgcgcaactgatcgaggcgcgctatttcaccgagctgaccaccggccaggtggcgaagaacatgatcggcaccttctggttccagctcaacgagatcaacgccggcaagtcgcggccgcaggggtatccggtgcgggcgacgaaaaaggtcggcgtgctcggcgccgggatgatgggcgcgggcatcgcctacgtatcggcggcggccggcatcgaggtggtgctcaaggacgtctcgctggaagcggcggagaagggcaaggcttattcggccaggctgctggacaagaaggttgcgcgcgggcacctgtccgccgagaagcgcgacgccttcctcgcgcggatcgtgccgagcgtcagcgaagccgacttcgaaggctgcgacctgatcatcgaggcggtcttcgaggaccgcgcgctgaaaggcaaggtcaccgccgaggccgagaagcatgccctggccgatgcggtagtggcgtccaatacctcgaccctgccgatcaccggtctggcccaggcggtggcgcggccggagaagttcatcggcctgcacttcttcagcccggtggacaagatgccgctggtggagatcatccgcggcgaaaagaccagcgacgaaaccctggcgcgcggtttcgactacgtactgcagatcaagaaaacgccgatcgtggtcaacgacagccgcggcttcttcacctcgcgggtattcggcaccttcaccaacgaaggcatcgccatgctcggcgaaggcgtgagcgccgcgatgatcgacaaccaggcgcgccaggccggtatgccggtggggccgctggcgatttccgacgaagtctccctgagcctgatgacccacatccgcaaccagaccgcccgcgacctcgaggccgagggcaaggctctgccgacgcaccctgcgttcgccgtgatcgacctgatggtcaatgagtacaagcgcccgggcaaggcggcaggcgccggcttctacgactacccggcgaacggcaggaaacatctctgggcggaactcaagagccgcttcgagaagcccgatgcgcaaatatccgccgaggacgtacgcgaccgcctgctgttcatccaggctatcgagaccgtgcgttgcgtggaggagggggtattgcactccaccgccgacgcgaacatcggctcgatcttcggtatcggtttcgccgcctggagcgggggcgccttgcagttcatcaaccagtacggcctgaaggacttcatcgcccgcgcccaatacctggtcgaacagtacggcgagcgcttcgagccgccggcgctgttgctggagaaggcggcgaagggcgagctgttctga

SEQ ID NO: 358586 - DNA, 915 bp, Pseudomonas aeruginosa
atgaaaaagcccgatctcgccggtctcgccgccttcgtcgccatcgctcgcgaacgcagtttccgccgcgccgccgccaccctcggcgtaaccccgccgacgctcagccacaccctgcgcgaactggaaacccaggtcggtatccgcctgttcaaccgcaccactcgcaacgtctcgccgaccgaggccggcgagcacctgctggcacacctggacccggcgttcgaagacatcgccgccgcgctggacagccttaaccgctttcgcgaaacgcctcacggcctggtacgaatcaacgcaccgcgaaacgccatcggtctcgtcctcgcgccacgtttcggcgaactggcccgcgactatcccggcatcaccctggaagtggtggcggacgagggtttcgccaatatcgtcgaagccggtttcgacgccggcatccgcctcggcgaagacctccagcacggcatgcgcgccgtgcgggtcggcccggacctgcgcttggccatcgtcgccaccccggcctacttccgacggcaaggcaggccgggtagcccggaggaattgctcggccaccgttgcatcggctggcgcaaggtgtcttccggagagctgtacaaatggcaattcagcaagggtgcgaaaacgctttcggtggccgtgagcggaccgctggtcctcgacgacccgcgcctgatgctacaggcggcgctggccgatgtcgggattgccttcgccatcgaggaggaagtcgccgagcacctcgccgccggccgcctggaacgggtcctggcggattggtgcgctccctttcccggtttccatctctattatccgaaccgccgcaaccacccggcggcgttgagcgccgtgatcgacctgctgcgctaccccggcgaggaacacccaggtcccgcgtag

SEQ ID NO: 358587 - DNA, 972 bp, Pseudomonas aeruginosa
atgcagcatgtccgtcttggcaatagcggcctgaaagtctcccggctctgcctggggtgcatgacctatggcgatccggcgtggcgtccatgggtgctggacgaggaacgggcgcgtccgttcattcgcgaggcgctggaagccgggatcgacttcttcgacagtgccgatatctattccaccggcgagagtgagcggatcctcggacgcgcgctcagggacttcgcgcagcgcgaggacctggtaatcgccaccaaggcgttctttcccatgagcgacaggcccaacgcctgcggcttgtcgcgcaagcatctgcttgccagcgtggatgcctcgctgcggcggttgggtacggactacctggatctcttcgtgatccatcgcttcgatccggaaaccccgatcgaggaaacctgcgaaaccctcgacagcctggtgcgtgccggcaaggtccgttacctcggcgcctcgtcgatgccggcctggcgcttcatgaagatgctcgccttccagcgccaccacggcctggcgcaattcatctcgatgcagagccagtacaacctgatcgttcgcgaggacgaggaggacctcgtgccgctgtgccgggaagaggggatcgcgttgacgccctggtcgccgctggcgcgtgggctgctggccggagcgcgaagcgccggcacgctgcggacccggacggacgaacaggccccgcgctggtacggcggcagggaggaagtcgagtcgaccctcggcgcgttggagaaactcgccgctgcccgcgggcttccaccggcgcaactcgccctggcctggctgcttggccggaacggtgtcgccgcgccgatcgtcggcctgtccaggccgcatcacctcgaggatgccctcgcggcgctgacgctggacctcgccgaagaggagtgcgccacgctggaggcgccgctcacggtgcgcgcccggaccccgcgctggtag

SEQ ID NO: 358588 - DNA, 999 bp, Pseudomonas aeruginosa
atgatgagacgacaggcttccgtgttgctgctggtatccatggtatcggcgaccgtcttgccggttttcgcccgtgcgccgggcgagcgcgagccgtcctgcgccgcgacgagcatcgtcctgccagcgggggcccggtatcccaacggcatcgcccatgccgccgatggaacgctgtacgtcggtctggtcaccagcgggcgcatcctgcgcaagcctcccgggggcgagtgggaaaccttcttcgccggcagcccggcgatcttcgctgccaccgcgctgcggctggacgagccgcgtggcctgctctggggcaattcgccggacttcctacccgctggccggcgccggccgcatggggtgttcgccctggatctcgcgaccggtgccgtgcgccgatatctgaccctgcccggcgacgggatgggcaacgatctcgcggtggcgccggacggaacggtctacctgagcgaaacccgggatggcagcctgatgcggctgcggcccggggaaccggcgttccaggtgttgctgcgcgacagccgcctggccggccccggcggcctgggcgcggcgggcatcgtccgggtggacgacgacaccctgctggtcggcaacttcggtagcggggcgatccatgtcgtcgaaggggtcgccacgcgtccgcggctgcgcgagatggagctgccccgaacgctggagaatccggacggcatggcgctggctccggacggctcgctgatcgtgctggagaacgccatccgcagcggcgccggcaaggtgctgcggatcgccgagccgctcgctccagggcggcgcggcatcgaagtgatacgcgagggcctggagtcgccggtcaacctgaccgtcaccggacagggttgcgcctatgtcagcgagtcccgcattcgccaccgcctgttgccggggcgcgagggcgaggtgccggcgcgtttcctgatccaccggctgcccctggacgcggccgggggccgttga

SEQ ID NO: 358589 - DNA, 372 bp, Pseudomonas aeruginosa
atgttgctcaaggcagtacgtaacggactgggtcaggcgattatcctcgccgacttcgtcagccgcccccgcaagctgcagcgcagcgccgaggcccaggccgaggtcgagcgggcgctgcggaacctgtcgctctaccagttccgcgcctgtccgttctgcgtgaagacacgccgcgccatgcaccggctgaacctgccgatgcaactcaaggacgccatgaacgatccgcaggcccgccaggctttgctggaaggcggcggcaaggtcaaggtgccgtgcctgcgcatcgaggaaaacggccaggtgcgctggatgtacgaatccagcgagatcatcgcctatctggaaggtcgtttcgccaacgcctga

SEQ ID NO: 358590 - DNA, 723 bp, Pseudomonas aeruginosa
atgtcgctccgcatctgtatcctggaaaccgatatccttcgtcccgagctgatcgagcgctacgaaggctacggccggatgttccagcaactgttcgccaagcaaccgatcgccgccgaattcgtcatctacaacgtggtggaggggcgctatccggcggacgacgagcgcttcgacgcctacttggtgaccggcagcaaggccgactccttcggtcccgacccgtggatccagaccctgaagaccttcctcctggaccgctacgagcgcggcgacaagctcctcggcgtgtgtttcggccaccagttgctggccctgctgctcggtggcaaggccgagcgcgccagccagggctggggcatgggcatccaccagtaccagttgaacgaacgggccgactggatgagcccggcgctgccggacctgaccctgttgatcagccaccaggaccaggtcacccggctgccggaaaacgcgcgggtgatcgcttccagcgacttctgtccctatgccgcctacgccatcggcgaccaggtgctgtgcttccaggggcatcccgagttcgtccacgactattcccgcgaactgctcgaactgcgccagcagcacctgggcgaggaactctatcgcaagggggtcgatagcctggcgggggatcaccagggcaccgtcgtcgccgaatggatgatgcgtttcgtcgcgcgccagccgaccggcgcctga

SEQ ID NO: 358591 - DNA, 240 bp, Pseudomonas aeruginosa; identical to SEQ ID NO: 319085

SEQ ID NO: 358592 - DNA, 219 bp, Pseudomonas aeruginosa; identical to SEQ ID NO: 338457

SEQ ID NO: 358593 - DNA, 489 bp, Pseudomonas aeruginosa
atgccgaaatggattgcactttgcctgatcccgctgttggcaagctgcgccacctgccgccaggacagcgacagggaaaaactgctgtacgagaacgacatgctgcaggcgaaactgatcatcgtcgccaacgaccgcgatcgcctgccgctggcccaggccctgctggagcgcgcggcgcgcgacgaccgcagcggcgaggcggacttctaccaggccgtgctgatcgctcgccgcgacggccaggccagcgattgcgagcgcatcacccgcctcctcgaacgttccgccgagcgacgctacccgctggccaacgcgatgctctacaagatctacgccgagcccttcctgttgccgcgcgccgacattcccaaggccgagacctatcgccaggcctacgccgagctgccggtcgcgcgcagcggctacccctccttcgagcgagcccggcaggtggtcgatcgcctgctcgcgccgacttcgtcctga

SEQ ID NO: 358594 - DNA, 507 bp, Pseudomonas aeruginosa
atgattcgtgaagttgaaggtgacattctgctttccggggcccaggtgatcgcccacggcatcgcgccccaggaccatttcgacagcggcctggccctcgccttgcgcgaacgctggccgtcgatggttcgcgactaccggcatgccgcccatgccagggcgcccgagccgggcggcatctgggtctgggccggggtcgacgagcagggcaagacccagtgcatcgtcaacctgatcacccagggcatgctgcacagcggtcgcagcgccaagccgggcaaggcgagcctggaggatgtcggccatgccctgcgcgagctggcccgctatgtgcgcagcgaaggggtgagcagcctggctctgccctgcgtggcgacgggagtgggcgggctggactggtccgaggtcaagccgctggtggttcgccacctgggcgacctggagatcccggtgattctctacgaggtctatcgcaagggcgtggcggccgaggaaaagctggcctaa

SEQ ID NO: 358595 - DNA, 189 bp, Pseudomonas aeruginosa; identical to SEQ ID NO: 338460

SEQ ID NO: 358596 - DNA, 690 bp, Pseudomonas aeruginosa
atgagcgagttgatcagctaccagttcgaagacggcatcgccaccctgaccctcaacaacggcaaggtgaacgccatctccccggcggtgatcgacgccttcaaccaggctctcgaccaggccctgcaggacaaggccgtggtcatcgtcaccggccagccgggcatcctctccggaggctacgacctgaaggtcatgacctccggcccggagaatgccgtcaacctggtcgccgccggctcgaccctggctcgccgcctgctctcccatccctatccggtgatcgtcgcctgccccgggcacgcggtagccaagggcgccttcctgctgctctcggccgactaccggatcggcgtcgacgggccgttccagatcggcctgaacgaagtcgccatcggcatgaccatgcaccatgtcggcatcgaactggcccgcgatcgcctgcgcaagtcggcgttcacccgctcggtcatcaatgccgagatgttcagtccggccgctgcggtggatgccggcttcctcgacaccctggtcagcgccgaccagttgcaggaaagcgcgcgtgcagcggcccagcagttgaagaaactcaacatgaccgcgcatcgcaataccaagctcaaggtgcgcaaggcactgctggaaaccctcgaccaggcgatcgagctggacaagaagcacctgggctaa

SEQ ID NO: 358597 - DNA, 285 bp, Pseudomonas aeruginosa; identical to SEQ ID NO: 319079

SEQ ID NO: 358598 - DNA, 1077 bp, Pseudomonas aeruginosa; identical to SEQ ID NO: 319078

SEQ ID NO: 358599 - DNA, 381 bp, Pseudomonas aeruginosa
atgatggtcgggccccatttcttcctttctatcgaggtcagcagcgtgccgtccctggaactcaccgatctggacgccgaccggcagttgcttgccctggaaggggtttcgctgttggtattcaccagcgaaggctgcgcgtcgtgccgctgggcccggcgccatctccccgcgatggacctgcccatcgagcgcctgtgctgggtggacgccggccgcaatggcggcctggtggaacgctacggcgtctttcacctgccggccctgttcatggtccgcgacggccgcctccatggcgcactgaacgttccgctgcaccaggaagccttgcggggtgcggtgctggcggggtcgaccgctttacctgaggagttgccctga

SEQ ID NO: 358600 - DNA, 948 bp, Pseudomonas aeruginosa; identical to SEQ ID NO: 319076

SEQ ID NO: 358601 - DNA, 498 bp, Pseudomonas aeruginosa
atgattcgttcgattctctacgccaccgatctggggctctatgctccctatgtcctgcaacacgccctgtcgctgacccgcgcctacaacgccgagctctatgtcgtccatgtggtggagcccctcgggctgttcgccgagtcggtcctgcagacctaccttgacaccgagcgtctccaggacctgcgggcgcaagggctggacaacgtcatggaaagcatcgagaagcgggtcctggaagggtttcgcgatgaactcggcgagttgccccaggatgcggcgctggtcaagagcgtgcgggtggtgcagggcgacccgccgcagatgatcctcgatgaggcggaaaagctggccgtggacctgatcgtcgccggcagccatagccacggcacccagctcgacacgccgctgggccggactgccgcgcgtctggtgcaactggcggaggtaccggtgtacctggtgccgatgttgcagcaccgtagtcgcgacctgtag

SEQ ID NO: 358602 - DNA, 975 bp, Pseudomonas aeruginosa
atgaagcttcagcaattgcgctatatctgggaggttgcgcaccacgacctcaacgtctccgccacggcgcagagcctctatacttcgcagccgggcatcagcaagcagatccgcctgctggaggacgaactgggcgtcgaggtgttcgctcgcagcggcaagcacctgacccgggtgacgccggcgggggagcggatcatccataccgccggcgagatcctgcgcaaggtcgagagcatcaagcagatcgcccaggaattctccaacgagaagaagggcacgctgtccatcgccactacccacacccaggcgcgctatgcgctgcccaacgtgatcagcggcttcatcaagcagtacccggacgtctccctgcacatgcaccagggcacgccgatgcagatcgccgaaatggccgccgacggcaccgtcgacttcgccatcgccaccgaggcgctggagttgttcggcgacctgatcatgatgccctgctaccgctggaatcgctgcgtcatcgtgccccacgggcatccgctgaccaagctgccgaaactgaccctggaagccctggccgagcagccgatcgtcacctacgtgttcggcttcaccggccgctccaagctcgacgaagccttcagccagcgcggcctggtgcccaaggtggtattcaccgcggccgatgccgacgtgatcaagacctacgtgcggttgggcctgggggtcggcatcgtggcgcacatggcggtcgatccgaagctcgacaacgacctggtgatcctcgacgccagccacctgttcgagtccagcgtgaccaagatcggcttccgccgcggcaccttcctgcgcggcttcatgtgcgacttcatcgagaaattcgctccgcacctgacccgcgagctgctggccaaggccgtgcaatgccacaacaaggccgagctggacgagttgttcgacggcatcgaactgccggtctactga

SEQ ID NO: 358603 - DNA, 348 bp, Pseudomonas aeruginosa
atgcgcatcaccatggtcaagaaagtcctcgccaacggcgaggactgccgcaagtgcaaggaagtccggcaacgcctggaacaaggcggctacctgccacgcatccatcgcaccctggtggccgacgaacgcgacccgaacagcgcaggctggatggtcgccgcccaatatggcgtagagaccgcgccgttcttcgtggttcgccacgacgacgggcgcgaacaggtctacaccgtgttcatgagcttcctccatgaagtcctcgaaccgcgagccgagcagtccgcggacgctgatcgcgaagcgctggccaggctggccggtcgcgacaatctcgacatgctctga

SEQ ID NO: 358604 - DNA, 735 bp, Pseudomonas aeruginosa
atgagccagcctttcgaccttcccgccctcgcctccagccttgccgacaaatccccccaggacatcctgaaagccgccttcgagcacttcggcgacgagctgtggatctccttcagcggcgccgaggacgtcgtcctggtagacatggcctggaagctcaaccgcaacgtgaaggtgttcagcctcgacaccggtcgcctgcacccggaaacctatcgtttcatcgaccaggtccgcgaacactacggcatcgccatcgacgtgctttcccccgacccgcgcctgctcgaacccctggtgaaggaaaagggcctgttcagcttctaccgggacggccacggtgagtgctgcggcatccgcaagatcgaaccgctcaagcgcaagctcgccggcgtgcgcgcctgggccaccggccaacgccgcgaccagagccccggcacgcgcagccaggtggcggtgctggaaatcgacggtgccttttccacgccggaaaagccgctgtacaaattcaacccgctgtcgtccatgaccagcgaggaggtctggggctatatccgcatgctcgaactgccctacaacagcctgcacgaacgcggctatatcagcatcggctgcgaaccctgcacccgtccggtgctgcccaaccagcacgagcgcgagggccgctggtggtgggaggaagccacccacaaggagtgcgggctgcacgccggcaacctgatcagcaaggcctga

SEQ ID NO: 358605 - DNA, 618 bp, Pseudomonas aeruginosa
gtggaaattgcctgtcttgacctggaaggcgtgctggttccggaaatctggatcgcgttcgcggaaaaaaccggtatcgacgccttgaaggcgaccacccgggacattccggactacgacgtgctgatgaagcagcgcctgcgcatcctcgacgaacatggcctgaagctgggcgacatccaggaggtgatcgccaccctgaagccgctggagggggcggtggaattcgtcgactggctgcgcgagcgcttccaggtggtgatcctctccgacaccttctatgagttctcccagccgctgatgcgccagctgggcttcccgaccctgttgtgccacaagctggagatcgacgacagtgaccgggtggtcggctatcgattgcgccagaaggatcccaagcggcagtcggtgatcgccttcaagagcctctactaccgggtgatcgccgccggtgattcctacaacgacaccaccatgctttccgaggcccacgccggcatcctgttccatgccccggaaaacgtgatccgcgagtttccccagttccccgcggtgcatacctacgaagacctcaagcgcgagttcctcaaggcttccagccgttcgctgagtctgtag

SEQ ID NO: 358606 - DNA, 1362 bp, Pseudomonas aeruginosa
atgcccagttgtcatgttcaccccctgccctaccatagcgacccaagctgtctctttgccatcatccatgaggcgcccggtgcggtgatgctcgattcgggtcgccccatcgctacccgtggacgctatgaccttatgagcgcctggccattggcagaactggcgccgctgcccgacgaatcggccaaccgcttcttcgcccgcctacgcgaagcggccggaagcctgggccccgcgcagctgccagcgccgtacgaactgcccttcgccggcggtctgctgggctatttatcctacgacctgggtcggcgcatcgagcgcatcggcgaacacgcccgcgatgacctgggcctgccgctggcctccgtcggcctgtatgcctgggcgctgatcagcgaccaccaggccggcaccagccaactggtattccacccgcgattggacgagcgcgaacgccagcgcctgatcgccctgttcagcgaggaaacgcaaggcgcggccggcaacttcaagcttctgggaaaattccgacggagcatcagcgcatccgactatcggcaggcgatccgccgcatccaggactacatccaggcaggcgactgctaccaggtgaactatagccagcgcttccaggccgcttgcagcggctcgccgtggccggcctatcgcgccctgcgcgaggcctgcccgacgccgttctccggctacctgcgactggccgacggcgcgatcctcagcctgtcgccggagcgcttcctcaagctcggcaagggcaaggtggaaacccggccgatcaagggcacccgcccgcgcggcaagacccccgaggaggacatggcgctggcggcgtcgctgctggccagccccaaggaccgcgcggaaaacctgatgatcgtcgacctgctgcgcaacgacatcggacgcagttgccaacctggcagcgtacgggtaccggagctgttcgccctggaaagctatcccaacgtgcatcacctggtgagcagcgtcaccggcgaactggcgccgggcaaggacgccctcgacctgctggaaggcagcttccccggcggctcgatcaccggcgcgccgaagattcgcgccatgcagatcatcgacgaactggaaccgagccgacgcggcatctactgcggcagcctgttctacctcgacgtgcgcggcgagatggacagctcgatcgccatccgcaccctgctggtcaggaacggccaggtcagttgctggggcggcggcggcatcgtcgccgactcgcactgggaggacgagtaccaggaaaccctggacaaggtccgggtactgctggaaaccctggaagggatggccgggacagcgtccccggaatag

SEQ ID NO: 358607 - DNA, 2571 bp, Pseudomonas aeruginosa
atgttttccgcacctgccggcttcggcaagacctgcgcgctcgccgccctggccagggagcgcactgtagcagaccaggcggtggcctggctctcgcttgccgaagaagacgacgaccccgcccgtttctgccggcagctgatcgaggcgctgggcgaagccgtgccgcagcttggcgacgacgcccagacctacctgcagaacaccatgcgggtcccggtggtggcggtgatcgaaagcctgctcggcgatctcgatcgctatgcgcggccgttgctgctggtgctggacgacctgcacctggttagcaacccggacatcttcaccggcctcaaccgcctggtgcagtacgcaccgcccgggctggtcctggccctgggcacgcgttcgcagccggcgctgagcctggctacctggcgggccaagggactgttgctggaaatcggcctcgaggagctgcgcctcggcttcgaggaaacccgcgaatacctcgagcgcagcggtctctatctggacgagccctgcctgaaggcgctctatggccagaccgaaggctgggtggtgggcgtgcatctcgtcagcctgtggctgcgccagcaaccgcaggtgcaggaaatggccctgctcgacggcgacaagcaggcggtcagcgcctatctgctggcggcggtcttcgaacgcttgcctggcgacctgcaggaagcgctgctggcccttggcgttgccagccaattgagcggcgacctggccaacgccctgaccgggcgccaggacggccaggcgctgctggagcgcctggagtccatgcaattgttcctcctgccgctggatcgcgaacgccagtggtatcgcttccacctgctgttcgccgacttcctccgcaaccgcctgcgtgactccgatccggaccgtttcaagcaactgcatttcaacgccagcctgtggttcaccaaccaccacatgccgacgttcgccatcgagcatgcctgtgcggcggaagacccggagatgatcgccgcgctggtcgacggatgcggactggagctgatcaaccgcggccagctcagcctgatctaccgttggcgcaagcatgtgccggacgaaatcgccgagcgctatccgatcctggtccttaccgatgtctggtcgcgggccagcgacctcagcctgggcgaggccaaccggatcatcgacgaactgctggcgcgctggggggagagccgcggcgatgggccgatgggcgaccagtacctctccgcgctggcggtgaaggcggtggtggcgttgcagaaggacgatctggaactgtgcatcgccctggctcgccgggtcgaggtccagctcgggcagaacgctgccttcctcgaagtggcggtgttgatcaccgccgcgctggcccaggtggtccgtggccagggcgaccaggcgcggcgcctgctgggactggcgcagcagcgcaatcatttcctcgaagggcgctacctggacatgcaactggccaacgtcgaggtgatcctcgcactcgagcagggccaggtgaaacaggcgcaactgctcatcgagcggctccgccagcgcgcccggccgctgttcgagaagtccaggagcgcgctggcgctgccgaccatcaccgaggccctgaccgcctactacaggatcgagctggacgggctggaagagcgcctgggctgggcgctcgggcatgtggatgtgatcaatccgatcgatttctatgcccagggacagatctgcctggcgcgcacccagcgcctgctgggacggccgaaggaggcgctggccagcctggcggcgatgcaggccctggcctcgcgcaatcagtcgtggcgcttcttcgcccaggccatggccgaagagatcaacctgatcctccaggacagcggccccgaccgcctgaagcgcgccgagcagcggttgaagagcgtggactggaacaagatggcggcacactaccgcaacatggccttcaacccggtcaactggtcgctgggtgtgagccgcgtgcgcctgttgcaggggcgaggacatttcagcgaggcgctgcacgagatcactcagttgcgcggcaccttgcagcccggctggcacggcctgcagcgcctgcgcctggatatcctggcggcgctcagctatcagcgcctgggctaccaggaacgggccaacagcctgctcggcgaatgcctgatcaatgccgaacgggaaggggtgcgcagcctcttcatcgaggaaggcgacggtattcgccagttgctccagcaactcgaatccaccgagcgccagccggcgctacagaccttcattcgcggcctgctcggcatctggcccgggcagggcgtgcgcaagccccaggatgcgctcgaggaaggcctgacggagcgcgagcgcgaagtggtctgcctggccgcacagggcctatccaacgaagaaatcggccagcgcctgtcgctggccctggggaccgtcaaatggcatctgcacaacatctacgaaaagctcaaggtgcgcaatcgcacccaggcgatccggcgagcccgcgagctgagcctgctctga

SEQ ID NO: 358608 - DNA, 2724 bp, Pseudomonas aeruginosa
atgggccatcgcgacggtgttcccgccagcaccattccgctgttgcagaccaagctgttcccgccaggcgccggagggctgccgctgctgccccgccaggcgctgatcgaccgcctgtacgaggcccgcgggcgacgcgcgatggtgctcagcgcgccggccggcttcggcaagagcaccatcctctgccagttgcgcctgcgcctgctggagcagggcgcggcggtggcatggttgtcctgcgacgagaccgacagcgaaccgcagcgtctgatccagtacctgctggcgagcatccagcgagtggtcccggcattcggcggcaataccgccaatctgctcggcaccgacgtcgcggtgccgctggagggtatcctggatgccttcctcgccgacttgcgtcgcctggaaggccccttgtacctgttcctcgacgatttccaccgcatccgccacgccgccttgccgcatggggttcgctacctgatcgagaacctgcccgatcacgtgcgggtggtggcctcgacccgcttccgcccgcgcttcctggtcgacgagccgaccctcaagccctggaccttctgcctgagcgcggaagacctacgactttcgcgcgaggagagcgatgcgtttctcctcgacctcaaggggctggagctgggcgagcgcgagctgaagctgctgttcaagcgcaccgaaggctggatcacggcgttgcacctggcggccctggccctcagtcgcaataccgaccgggaaggtttcctccgcgggctctccgggaccgaacggaacatcgccgactacctggcggaagacgtgctggccagcctgcccgccgacctgcagctgttcctcgaccagacctcggtgctcgacgagttcaatgcggaactgtgcaatgcgctgaccgggcgtcgcgacggcctggacatgctcatgcgcctgcagaacgagcagttgttcgtcatcgccctggacgaccagcgcgaatggttccgctaccaccatctgttcgccgagttcctccaggggcggctgtcccggcatgccgatccgaccccgttgctgcatgcggcggcgcgctggtgcgaggggcgcgacctggccgaccgggcgatcaagtacgcccttcgcgcccgcgactacctgttcgccgccgagttgctggagcgccagggcgcgcgcctgatcgccggtaaccgggtgtacggcatcctcggcatgctcaacggcattcccgccgaggtgatccgcgagcatccggtgttccagatcttctacgcctggcaactggcgttcgagcaacgcttcgccgaggccgaggcgttgatcgaggaggtcagccaccgcctcttgcaggggcgcggcaaggtcatgcacttcgggctcggcgagttgctcgccgccgcccaggtgctcaaggccctggtgttgctctaccaggacaagctcgaagcctgcctgaaggtcgcccgtcactggctgtccatggttccgagcaaccagccggtgttccgcgccagcctgctctgcgtgcaggcttcggcgcatgcgctgctcggcgactacgccgaggccgccggcgccatcggttccgcgcgggaggacctgaaagtcgccgacagcgagtacctgcaggtggtgaccagcctgatcgaatccctgatctgcaaggagagtggcgatctggagcggggcagggcgatcgccgagtcggcgcgcaaccgggtcgagcaggtattcggccggcgcagccgggtcggcggccccttgtcgctggcctatgccgacctgctctacgagcaggaccggcatgccggcgtgctcgccgaactaccgctggcgacggtctggcgggatgtcgcgacgccggtggaactgctcagtcgcggccagttggtcatggccaaggcgcgcttcttctccggcgccgccgagcaggggctggcgcaactcgacgaatggctgagcggtctgctctcgcccggctacgagcgtgtctatgctcacgccatgagctgcaaggtgcagttcctgctgtggctgcgccgtccgaacgaggccgaacgggtctgcctgcaactggagcggcatcttgccgggctctccggcgagcggcacgccgacgcacagaccgccctggtcctggcggaggctcggctggcattgtccgagcgtcacgcggaacgcgcgcagagcaagctggaaagctgtctggccggctactcttccgcttaccagagggatcggcggctgcgtttgtccttgttactttctgtggcgtattggcagaaaggtaacagcgaaaaagccatcggcctgttcctcgccacgctcgaggaagcctggaatctcggctaccgccggctgttccaggacgacgcgttgtggctgttgccgatgtgggaaagctggagggaagcggaacccaagcgtgccgcggcctggcaggggctggccgacctgctccgcgaacagtgccggaagctctccgtggacccggaaagtttcgatgaaaatcaggatgttagccatcgcgaacgggaaatcctgcggctggtggcggcgggcttgtcgaaccgcgatatcgcgcaggcggtgcacctgtcggaagccaccatcaagtggcacctgcacaacctgttcgccaagctgggtgtgaagagcagaacgcaagccgtactaaagggtaaaagcctgggactgctgagcgaggcgtga

SEQ ID NO: 358609 - DNA, 438 bp, Pseudomonas aeruginosa; identical to SEQ ID NO: 319067

SEQ ID NO: 358610 - DNA, 762 bp, Pseudomonas aeruginosa; identical to SEQ ID NO: 319066

SEQ ID NO: 358611 - DNA, 1026 bp, Pseudomonas aeruginosa; identical to SEQ ID NO: 319065

SEQ ID NO: 358612 - DNA, 1599 bp, Pseudomonas aeruginosa
atgaagatgcgcattgcgccgctctggctggcgctggcaggggtgtgcctggcctggattccgccggccggcgcgcagatggccaacgacctgaccatcggcaacccgaaagccatggccctcggcaacgccgtgaccgccgacgagaccggcatcgattcggtgcactacaacccggcggcgctgaccaggatgaagggccgccaggcgaccgtgaagctgctcaccggggtgatggacatccgcgccggcttcaaggcgccgccgaactacggcgaaggcaccttcggcctgcgcgacgacccggtcgccaacagccacagccggaccctgaccccgaccatgtacctgcccggtctcggcggcatgaccgacgtgccgttgctggtggcgccgctggccgggatctcgatcaacccgccgggctccaagttcaccttcgccaccaacgtctacaccccgcaagcgctgggctacagccgcgattccgatagcgatccggcgcgctaccagggacgcgaggtgtcgttgcagcggctcacctacttctcgccgaccctggcctaccaggtcaacgacgagctgtcggtcggcctgtcggtgggtttctcccaccaggcagtagcgttgaacgaggatttccgggcgccgaaccagttgctcgggctgttgcagcagaccaaggagatcggttgcctgccgggaatgcaggagatcctcgaggtgttcttcaacgtctgcggcggcaatatcggtccgttccagaacctggccaatatcgacctggacatgcaacagtcgctttcgcccagcttcaacctcggcgtgctctgggagcccaccgactggttcgcctggggcgcgacctaccagagcgagtcgcggatgaagctcaagggcaagtaccgggtcgactacggccagggctggcagggtttctggaccggggtgcacaagtcgctcggcggtgcgatcctcggccagatgttcccctacgggaacgtcgacgaagagcatggcaacgccacgatgaacatggtctatccggatgccttctccaccggcgtgaagctgcgcccgttcaagaagtggcaattcaacttcgacctgaaatggaacggctacagcgactggaacgagttcaagatcgagttcgaccgcgagctcgacctgctgcgcatcgccaagtacctcgactcgaaggacgccaccagccacagcatcaccctcgaccgcggctaccgcgatacctggagctgggccatgggcgtgcagtacgacgtcaacgaccgtttgcagctgcgcgccggctacgaataccggccttcggcgatccccaagggccaggcggatattctggtgccgatcggcgatgccaatctctacggcctggggctgggctaccagtgggacaaggacacggtgatcgatgtcggtttcaactacttcgtcaccaagcagagcgtcaaggccgataccagctgcaacctgaactgcaccgggctcgacaacctggtgtacaacccttacgcgggactggacgtggacaccacggtgaaagcctatattttcgccatgacctaccgtacgaccttctga

SEQ ID NO: 358613 - DNA, 1191 bp, Pseudomonas aeruginosa
atgatgcgcgcatccatcgtactttgcgtcttctccctggcgctgccggcatcttcgccgggctgggcctccggcgggcgctacctgacctgggtggacgacaatggcggggtgcacaacaccttcgtcgacggccagttcgaccgccagcagcgccaggcgcgacagcgcatcggccagagcgaccaggcgcgggtgctgaacaaggcggacaacgccacgcagtggccggggaacagcagcggaggggagagcaagcgtcgctactacacctggatcgatgccaacggcaacgtgcagaacagcttctatgccggcgcccaggtcgccggccagcgcgccgactacgtcctgcccaacggcgagcactccgccgaatacatcgacgccgaggccttcgagggcaagggtttcgttcgcagcgagaacggcagtccctactacacctgggtggacgagaagggccgcatgcacaactcgcagatcccgcccgaggagcgcgcggcgcgcttcaagcgggaggccgcgccttcgtcgcagatcgccttcaccgagggccggcagatcgagttcaagcagcgtccggcggcgttgcctgggctggatggcgccggccagcagagcgatgcgctgaaggctttgctcaagggcaccgagataaccatcgacgatctctaccaggacctgcaacggcgctgctgcgagcagatcgccgagagcgacttcaccgaactggatgccgacgaaccgcgctacgaggagttgaaccgcttctcgccgagcttcgactttcccatgggcaggagcttctacgcggcgatccggctgccgcgctcccagggggtctacggcctgcgcatccgcagtttcgccaatcgccaggtggtctacccgtcgctgctgttcctcgacgagcacaagcggccgacccggctggtcagcgacgcggtgtacaagctgaacccggaaacctggtatcgctacgctttcatcgagggtacggtgccggtgcgggccaatcgcggcgagcgctacgtgctgctgctgaccaccgacgaggaccgctcgctgcaaaccctcgacaacaagccgttcaagcgtccgctacagggcctggcggtgaacgaggcgggtatgcaggtgcatgagcacgcccggcagggcggcttcgagctggccgtggtgcgttga

SEQ ID NO: 358614 - DNA, 984 bp, Pseudomonas aeruginosa
atgtcgatctggaagacctggaaagacctgaccgcgaaaggcgtgatgggcatcaaccgacgcaatgccgattacgtcctgaagtacaacaagcggcacctgtatccggtggtggacgacaagatcatcaccaaggaacgcgcgctcgaggccggcatccacgtgccggagatgtacggcatcatcgagaccgagaaaggcatcgacaagctcaacgagatcatcggcgagcacaacgatttcgtcatcaagccggcgcagggcgccggcggcgacggcatcatggtgatcgccgaccgcttcgagggccgctacaagaccgtgtcggggaagatcgtcagccacgaggagatcgagcaccacatctcgagcatcctctccggcctctactccctcggcggtcatcgcgaccgcgtactgatcgagtaccgggtgacccccgaccagatcttcaagagcatcagctacgaaggtgtgccggacatccgcatcatcgtgctgatgggctacccggtgatggccatgttgcgcctgccgacccggcagtcgggcggcaaggccaacctgcaccagggcgccatcggcgtgggcgtcgacctggccaccggtgtcaccctgcgcggcacctggctgaacaacaagatcgccaagcacccggacaccaccaacgcggtggacggcgtgcaactgccgaactgggacggcttcatgaagctggcggccggttgctacgagttgtcgggcctcggctacatcggcgtggacatggttctcgaccaggagaaaggcccgctgatcctcgaactcaacgcccgcccgggcctgaacatccagatcgccaacgacagcggcctggtgcaccgctgccacgccgtcgaggcgcgactggaagaactcaaggcgaaaggcatcgaagagtccgcggaagagcgcgtacgcttctcccagcagctgttcggccacgtccagcagcaccagggctga

SEQ ID NO: 358615 - DNA, 1527 bp, Pseudomonas aeruginosa
atgcgctctctcaacctgcatctgaaagtcctgatcgccatcctgctgaccctgggtgtggcgatcaccgcctatcagattttcgtccagggtattcccgttaccgaagccgaaaccgatgacctctggaacatcgatgccaaggtcgacttcgtcgccacgccgaaaaccccggtcaaggtgcagatgttcgttccgccgttgagccaggactacgtcagcctcaacgaaagcttcgtctccaacaattacggcgtcagcatcaatcgcgccgacggcaatcgcaaggtgacctggtccgcccgccgcgccaacggcaagcagaccctgtactaccgcctggtgctgaccaagcgctacaccggcgagaagaccaaggagaaaggcccgatcttccgcgacagcctgcccctggaaggcccggagaagatcgccgcagaagccctgctggcccccattcgccagcactcggccgacgtcgagaccttcgtcagcgaagccatcaagcgcgccaacaacggcaacgacgacaacgtcaagctgctgatggccggcgacaccagcctggaaaagaaagcgcatatcgtcgagaccctgctgtccatcgcccacgtgccgatggagcgggtccataccatccgcctggtcgccgacctgcaacagagcccggaactgtggctgcgcagcttcaacggcgagaactggctgtatttcaacgtggtcaccggcgaacagggcctgccctccgatcgcctgatctggtggcttggcgatgagccgctgatgaccatcgacggcggcaagaaggcccaggtcagcttcagcctgaacagcagcgagatgaacgccatccgcctggccaagctgtccgacgagaacaccgaggcggccttcctcgagtactccctgtacggcctgccgctgtccacccagcagaccttccagatcatgatcatgatcccgatcggcgtgctggtgatcctgatcctgcgcaacctgatcggcctgcagaccctcggcaccttcaccccggtgctgatcgccctggccttccgcgagaccggcctgcaatggggtatcgccctgttcaccgtgatcaccgccctgggcctgtcgctgcgctcctatctcgagcacctgaagctgcagatgctgccgcgcctctcggtggtgctgaccttcgtggtggtgatgatcgcggtgatcagcctgttcagccacaagctcggcttcgagagcggcctgtcgatcgccctgttcccgatggtgatcctgaccatgaccatcgaacgcctgtcgatcacctgggaagagcgcggcggcggccatgcgatgaaggtggccatcggcacccttttcgcggcatcgctggcgcacatcctcatgcgcatcccggaactggtgtacttcatcttcaccttcccggccgtgctgctgatcctggtcgccttcatgctcgccatgggccgctaccgcggctaccgcctgaccgagctgttccgcttcaaggccctgctcaaggactga

SEQ ID NO: 358616 - DNA, 540 bp, Pseudomonas aeruginosa; identical to SEQ ID NO: 338481

SEQ ID NO: 358617 - DNA, 819 bp, Pseudomonas aeruginosa; identical to SEQ ID NO: 319059

SEQ ID NO: 358618 - DNA, 2376 bp, Pseudomonas aeruginosa
ttggtagagtacgtagtttccctcgataagctcggcgtccatgatgtagagcatgtggggggcaagaacgcatccctcggcgagatgatcagcaacctggccggtgccggcgtttccgtacccggcggatttgccaccaccgcccaggcctaccgtgacttcctcgagcagagtggcctcaacgaccgtatccacgcggccctggacgccctggacgtcgacgacgtcaacgccctggccaagaccggcgcgcagatccgccagtgggtgatggaagccgagttcccggcccgtctcgacagcgagatccgccaggccttcgccgccctggccaacggcaacgacaacctcgccgtggcagtgcgttcctccgctaccgccgaagaccttccggacgcctcgttcgccggccagcaggaaaccttcctcaatatccgcggcgtggacaatgtgatccgcgcagcaaaagaggtcttcgcctccctgttcaacgaccgcgccatcgcctaccgcgtgcaccagggcttcgatcacaagctggtcgccttgtccgccggcgtgcagcgcatggtccgctcggaaaccggcaccgccggggtgatgttcaccctggacaccgaatccggcttccgcgacgtggtcttcatcaccggtgcctacggcctgggcgagaccgtggtccagggcgcggtgaaccccgacgagttctacgtccacaagccgaccctggaagccgggcgtccggccatcctgcgccgcaacctgggtagcaaggcgatcaagatgatctacggcgacgaagccaaggccggtcgctcggtcaaggtggtggacgtcgatcgcgccgatcgcgcccgcttcgccctgagcgacgccgaggtcaccgagctggccaagcaggccatgatcatcgagaagcactatggccgcccgatggacatcgaatgggccaaggacggtgacgacggcaagctgtacatcgtccaggcacgcccggaaaccgtgaagagccgcgccagcgccacggtcatggagcgctacctgctgaaagagaaggggaccgtcctggtggaagggcgtgccatcggccagcgcatcggtgccggtccggtcaaggtgatcaacgacgtgtcggaaatggacaaggtccaaccgggtgacgtcctggtctccgacatgaccgacccggactgggagccggtgatgaagcgcgccagcgccatcgtcaccaaccgcggcgggcgtacctgccacgcggcgatcatcgctcgcgaactgggcatcccggcggtggtcggttgcggcaacgccacccagatcctgcaggatggccagggggtgaccgtttcctgtgccgaaggcgataccggcttcatcttcgaaggcgaactcggtttcgatgtgcgcaagaactcggtcgacgccatgcccgaccttccgttcaagatcatgatgaacgtcggcaatcccgatcgcgctttcgatttcgcccagttgccgaacgaaggcgtgggcctggcccgcctcgaattcatcatcaaccgcatgatcggcgtgcaccccaaggcattgctgaacttcgccggcctgccggcggacatcaaggaaagcgtggagaagcgcatcgccggctatcccgatccggtcggcttctacgtcgagaagctggtggaaggcatcagcaccctggccgcggcgttctggccgaagaaggtcatcgtgcgcctgtccgacttcaagtccaatgagtacgccaacctgatcggcggcaagctctacgagccggaagaagagaacccgatgctcggcttccgtggcgcctcgcgctacatcagcgagtcgttccgcgactgcttcgagctggagtgccgtgcgctgaagaaggtccgcaacgaaatgggcctgaccaacgtcgagatcatggtgcccttcgtgcgcaccctgggcgaggcgagccaggtggtcgagctgctggccgggaacggcctgaagcgcggcgagaacggccttaaggtcatcatgatgtgcgaactgccgtcgaacgccctgctggccgacgagttcctcgagttcttcgatggcttctccatcggttccaacgacctgacccagctgaccctgggcctggatcgcgattccggcatcgttgcccacctgttcgacgagcgcaatccggcggtgaagaagctgctggccaacgccatcgctgcctgcaacaaggccggcaagtacatcggcatctgcggccagggtccgtcggaccacccggacctggcccgctggctgatggagcagggcatcgagagcgtctcgttgaaccccgactcggtgctggatacctggttcttcctcgccgaggggcaagaccaggcctga

SEQ ID NO: 358619 - DNA, 1011 bp, Pseudomonas aeruginosa
atgcaaagcagtagtcgcctctttcctgtcgccctggtcagcgccgaattgcgcgccgaccttaccgaagacatctaccgcctgaagcccggcaacagccccgatgccagcgtcgagctagtcgtaacccggctcggacagcaggccgccggcgagcggcgcggaccgcctgtgatcctcctgcacgggagtttttccaaccgccgcttctggtactcgccgcgtgcgctcggactaggtccttacctggcgcgggcggggttcgatgtctggctgccggaaatgcgcggccatggcctgtcgattcgcaacgatggttaccgggacaaccgggtcgccgactacgcgcgctacgacctgccggcgctggcctccttcatccacgagcagtgcgggcagccggcgcactggattggccactccctcggtggggtggtgctggcggcggggctgggcgggggctacctggaccaggcacggatcgcttccgtggcgttgttcggtagccaggtcagcaccgcgcactggctgttcaggttgcccatggcaggcatcctcgcgcgcctgctgctgcgccgcgtcgacgcgctatccggaagccgttggcggcagggcccggaagacgagccggtcggcgtggcgctggaggtcctgcgttggcatgggctgttcggccgcttcggcgagccgggcaacgactggtggaaggggctcgccgcagtcgacgtgccgctattggcggtcgccggggctggggaccggcaggacccgtcctgggcctgtcgcaagttgttcgagcagttcgcctcgtccgagcgcgaatacctgttgctcggacgcgaggctggctacgccgaggactacgggcatatcgagatgctgatcggcaaggcggcccagctagaggtctggcccttggtggagcgctggctgcgccagcgatcgccggcgggcgacgaatccgcgtggagcgaggcgctagacgtatcggaagccggaatcagcggctaa

SEQ ID NO: 358620 - DNA, 489 bp, Pseudomonas aeruginosa; identical to SEQ ID NO: 319056

SEQ ID NO: 358621 - DNA, 999 bp, Pseudomonas aeruginosa
atgcaagcgtacgagtcgggtgacgagcgcggcctgatctatggctacgtcctcaacgggcgcggcggcggacgccgtgtcggacgcaaccagatagcggtgctcgacctgctgccggaggaaagtctttggctgcactgggaccgcggcgtaccggaggcacaggcctggctgcgggattccgcggggctcagcgagttcgcctgcgatctgctgctggaggaggcgacccgcccccgtttgctcgatctcggggccgaaagcctgctggtgttcctccgtggagtgaacctgaatccgggcgcggagccggaagacatggtttcgctgcgggtattcgccgacgcgcgccgggtgatctcgctgcgcctgcggccgctgaaggcggtggccgatctgctcgaggacctggaggcggggaaagggccgaagacagcatccgaggtcgtgtactacctcgcgcactacctgaccgatcgcgtcgacacgctgatcagcgggatagccgaccagctcgatgctgtcgaggagctggtcgaggcggacgagcgcgccagtcccgaccagcaccagttgcgtaccctgcgccgccggtcggcggggttgcggcgctacctggcgccgcagcgggacatctactcgcaactggcgcgctacaagctgtcctggttcgtcgaggacgacgccgattactggaacgagctgaacaaccggctgacgcggaatctcgaagaactcgagttgatacgggagcgcatcagcgtcctgcaggaagccgagtcgcggcgaatcaccgaacggatgaaccgcaccatgtatctccttggtataatcaccggctttttcctgccgatgagcttcgtcaccggcctgctgggaatcaatgtcggcggcattccaggggcggatgcaccgcatgggttctggctggcctgcctgctgatcggcggggtcgccaccttccagtggtgggtatttcgtcggctgcgctggctctga

SEQ ID NO: 358622 - DNA, 249 bp, Pseudomonas aeruginosa
atgcacgatccgttcgaagagtccctgcgggacctgctcaaggcttcggctccccagccggacgacgacgcgcgtctgggacgggtgctgaagaccgccaatcgccaggtcggtgccggtgacctgttcagcctcatggggcactggctgcaggcgctgatgatcggcatcaacaacggttcgccgcatctggcgccggtttcccgtatttccgcgaaaaacgcatcttctgctgacaaggctgagtga

SEQ ID NO: 358623 - DNA, 825 bp, Pseudomonas aeruginosa; identical to SEQ ID NO: 319053

SEQ ID NO: 358624 - DNA, 498 bp, Pseudomonas aeruginosa
gtgacgcgcgcctatgaagaattgatgcggcgttaccagcgcacgctgttcaacgtctgtgcccgctacctgggcaacgaccgcgacgcggacgacgtgtgccaggaggtgatgctgaaagttttgtacgggttgaagaactttgagggcaagtcgaagttcaaaacgtggctatatagcatcacgtacaacgagtgcatcacgcagtaccgcaaggagcgccgcaagcgccgattgatggatgcgctcagcctcgacccgctggaggaggcttccgaggagaagtcgccgaaggttgaggagcggggcggattggatcgttggctcgtccatgtcaatccgatagatcgggagattctggttcttcgcttcgtcgcggaactggagtttcaggagatagcggatatcatgcacatgggtctgagtgcgacgaaaatgcgctacaagcgggcactggaccgcctgcgcgaaaagttttcagatgcgaccgaaacatag

SEQ ID NO: 358625 - DNA, 1053 bp, Pseudomonas aeruginosa; identical to SEQ ID NO: 319051

SEQ ID NO: 358626 - DNA, 327 bp, Pseudomonas aeruginosa
atgaactggctggatatctgctccctcgatgaaatcaacccgctgggctcgcgcgtggtcgccggcccgaaaggcgacatcgccatcttccgcgccgccgacgaccaggtcttcgccctcgatgaccgctgcccgcacaagggcggcccgctgtcccagggcctgatctacggcaagcgagtggcctgtccgttgcacaactggcagatcgaactggagagcggcgaagccgtggccccggaccagggctgcgcccatcgccacccggtgcgggtggagaacggacgggtgctgctcggcctggacagcgtggcgctgtgcgcctga

SEQ ID NO: 358627 - DNA, 2451 bp, Pseudomonas aeruginosa
atgaagaagatcaagctggtgatggtcggcaacggcatggccggggtccgtaccctggaagaactgctcaagctcaactcggacttctacgacatcacggtgttcggcgccgagccccatcccaactacaaccgcatcctgctgtccccggtgctggccggcgagcagaccttcgaggaaatcgtcctcaacgacctcaactggtatgcggaaaacggcatcaagctcctcctcgaccgcaaggtggtgcagatcgaccgggtccgccgcagggtggtcgccgcggacggcagcgaggccgagtacgaccgcctgctgctggccaccggctcggtccccttcatcctgccgatacccggcaatcgcctgcagggcgtgatcggctaccgcgacatcgccgacacccaggccatgatcgactgcgcccggacccacagccacgcggtggtgatcggcggcggcctgctcggcctggaggcggccaacggcctcaagcaacgcggcatggacgtgaccgtcgtgcacctctccgactggctgctggaacgccaactggaccgcaccgccggcaaactcctgcaaggcgcgctggaagcccgcggcatccgcttccgcctgaacacccagacccaggaactgatggacaacggcagcggccgggtctgtgccgtgcagttcaacgacggcgacgtgattcccgccgacctggtggtaatggccgccggcatccgccccaataccgagctggccgaaagcgcgggcatcccctgcaaccgcggcatcctggtcaacgacaccctgcagacctacgacccacgcatctatgcggtcggcgaatgcgccaaccaccgtggcatcgcctacggcctggttgcgccgctgttcgagcaggccaaggtctgcgccaaccacctggctcatctcggctacgcccgctaccagggctcggtgacctcgaccaagctcaaggtgactggtatcgacctgttctccgccggcgacttcatcggcggcgaaggcagcgagaccatcaccctttccgaccccatcggcggcgtctacaagaagctggtaatcaaggacgatgtactggtcggcgcctgtctctacggcgacaccgccgacggcggctggtacttccggcagatccgcgagaaccacaacgtcgcgcagatccgcgaccacctgatgttcggcgagaacgccctcggcgatgtcggccaccagggccagaacagcgccgcgagcatgcccgacacggccgaagtatgcggctgcaacggcgtctgcaagggcaccatcgtcaaggccatacaagaacacggcctgttcagcgtcgacgaagtcaagaaacacaccaaggccgccagctcctgtggctcctgcgcgggattggtggaacagatcctgatcagcaccgtcggcggcgccgccgacgtcaagccgaagagcgagaaggccatctgcggctgcagcgacctcaaccacgggcagatccgcaaggccattcgcgaacaccggctgaccagtctcgacgccgccatgcgcttcatggactggaagaccccgaacggctgtgccacctgccgcccggccctgaactactacctgatctcgacctggccgggagaagccaaggacgatccgcagtcgcgcctgatcaacgaacgcgcccacgccaacatccagaaggacggcacctactcggtggtaccgcggatgtggggcggcgtgaccaacgccgccgagttgcggcgcatcgccgacgtcgccgacaagtaccaggtgccgatggtcaaggtcaccggcggccagcgcatcgacctgctgggggtgaagaaggacgacctgccggccatctggaaagacctcgacatgccctccggacatgcctacggcaaatccatccgcaccgtgaagacctgcgtcggcagcgaattctgccgcttcggcacgcagaactcgacgcagctgggcatcgatctggaacacgacctgttcaacatgtggtcgccgcacaaggtcaagctggcggtctccggctgcccgcgcaattgcgccgaggccgggatcaaggacgtcggcatcatcggcgtggactccggctgggagatgtacatcggcggcaacggcgggatcaagaccgaggtcgcggagttcttcgtcaagctcaagaccgccgaagaggtgcgcgaatacaacggcgccttcctccagctctaccgcgaggaagccttctacctggagcgcacggtgcattacctgcagcgggtcggcatggagcacatccgcaaggcggtggtcgaggacgcggaaaaccgcaaggcgctcaacgaccgcctgcaattcgccctgtccttcgagcaggacccatggaagcagcgcatcgaacagccgcaattgaagaaggagttcgaacggattccgctcaagcaactggaaaacgtctga

SEQ ID NO: 358628 - DNA, 1596 bp, Pseudomonas aeruginosa
gtggtcaccccggcgccggccctggccgccagcaagggacacctgctggccatcgccgacggtgtcagccagtgcgccgatggcggcctggcggcgcgcagcagcctgcaagcgctggccctggattactatgcgactccggaaacctgggccatcgtgcagtccctggaccgcctgctgctggcgcagaaccgctggctacaggccaacggcggcggccagccgctgctcaccaccctcaccgccctggtgctgcgcggcacccgctacaccctggcccacgtcggcgattgccgggcctacctgtggcgcgacggcgagttgctccggcagaccagcgaccacgtctgggaacagccgcacatgcaacacgtgctgacccgcgccctgggactggaccagcatctggtggtcgactatctggaaggcgatctggagcccggcagccagtggctactggtcagcgacggcgtctgggcgacgctgggcgacagcggcatccgcagcatcctgcgcaacgccgaagagccgcagcgcagcgccgaggccctggttcgcgccgcccacctggcaggcagccaggacaacgccagcgccctgctggtgcgcgtggaagccgtgcccgcaggcagcctcggcgacgccctcgcgcaactgggccactggccactgccgccaccgctgaagcccgaccagctcttcgaaggctggcgggtccggcagttgctcggcgaatcccgccagtccctgctctaccgggtcgaggatggccagggccaaccctggctgctgaagacccttcccgccgcacgtgccgacgatccgctggcaacccaggccctgctgctcgaggaatggttcctgcgccgcgtccagggccggcatttccccgagctgcacggattggcgcaacgccagcatctgtattacctgatgcgcgagcaccccggagagactctcgccgagcgcttgcgcaaccatggcccgctgtcgctgccggagtggctggggctggccaaccagctgctgcgcgggcttggccagttgcatcgacgcaacctgctgcaccgcgacctcaagccggaaaatctccacctcggccgcgacggcgagctgcgcctgctggatttcggcctggcctggtgtccgggattgtcgcgcgaagacccccatctgctaccgggtacgcccagctacctggcgccggagtgcttctccggcacctcgccctcggtgcgccaggatctctacgccaccggcgtctgcctctaccaggcgctgaccgggcgctatccctatggcgagatcgaagccttccagcacccgcgcttcggtcgccccgtcccgcccagccgctatcgccccgacctgccggcctggatcgacgacctgctgctgcgcgccgtcgcctgcgaccccgcacagcgcttcgagaccgccgaggaatggctgctctcgctgcaacagggagaagcgttgccggtcgcggcgccccgcccattgctggagcgcgaaccgctgcagacctggcgcgccatcgccctgctgtccctggccgccaacctggcgctactcctggtctggctgaagggctga

SEQ ID NO: 358629 - DNA, 1212 bp, Pseudomonas aeruginosa
atgaacaacagcttctggaaggccggccatgcgccgaccctgttcgcggcgtttctctatttcgacctgagcttcatggtctggtacgtgctcggcccgctgggggtgcagattgccggcgacctgcaactgagcacccagcagcgcgcgatgatggtcgccacgccgatcctcgccggcgccgtactgcgcttcctgctcggcctgctggccgatcgctggtcgccgaagagcgccggcatcctcgcccaggtcatcgtcatcgccgccctcgcggccgcctggctgctgggcgtgaacagctatgcgcaggcactgctgctggggttgttcctcggcttcgccggggcatccttcgccgtggccctgccgctcgcatcgcaatggtacccgccgcaacaccagggcaaggccatgggcatcgccggcgcgggcaactccggcaccgtgctcgccgccctcttcgcccccggcctggccgccgcgttcggctggaacaacgtgttcggcttcgccctgctgccgctcgtcctgaccctcctggtgttcgccatggtcgcgcgcaacgccccgcagcggccggcgcccaaggccatgggcgattacctgaaagccctcggcgaccgcgacagctggtggttcatgttcttctacagcgtcaccttcggcggcttcctcggcctggccagcaccctgcccggctatttccacgaccagtacggcctgaacccggtgaccgccggctactacaccgccgcctgcgtcttcgccggcagcctgatgcgcccgctcggtggcgccctcgccgatcgcatcggcggcatccgcagcctgctgatggtgtacaccctggccgccatctgcatcgccgcggtcggtttccacttgtccagcgcgatggccgccctcggcctgttcgtggtcgccatgctcagtctcggtgccggcaatggcgcggtgttccagttggtaccgcagcgcttccacaaggaaatcggcgtgatgaccgggctgatcggcatggccggcggcatcggcggcttctgcctgactgccggcctcggcgcgatcaagcaaagcaccggcgactaccagctcggcctgtggctgttcgccagtctcggcgtgctggcctggttcggcctccacggggtgaagcggcgctggcgcaccacctggggctcggccgcggtcaccgccgcgcgggtctga

SEQ ID NO: 358630 - DNA, 579 bp, Pseudomonas aeruginosa
atgctgcgtatcctgctgatcgacgacacgccgaagaaagtcggacgcctcagggccgccctgctcgagagcggtttcgaagtggtggacgagtcggggctgaccatcgacctgccggctcgcgtcgaagcgctgcgtcccgacgtgatcctgatcgacacggagtctcccggccgcgacgtgatggagcaggtctgcctggtcagccgcgaccagccgcgcccgatcgtgatgttcaccgacgagcacgatccgggagtgatgcgccgcgctatccagtccggggtcagcgcctacatcgtcgaaggcatccaggccagccgcctgcaaccgatcctcgacgtcgccatggcgcgcttcgagagcgaccaggcgctgcgcgctcaactgcaggcgcgcgaggcgcagctggccgagcgcaagcgcatcgagctggccaagggcctgctgatgaagatgaagcattgcggcgaggaggaggcctacacgctgatgcggcgccaggccatgagccgccagcagaagctgatccaggtcgccgagcagatcatcgccatgcacgacatgctcggcggctga

SEQ ID NO: 358631 - DNA, 1209 bp, Pseudomonas aeruginosa
atgacagacagagcgatacgcagccaggcctgggccggcggttccgacgcaccggaaaagagcgccctggacatcggtttcatggcgctgaccgattcggcctcgctgatcgtggccgccacccagggcttcgcccagccctacggcctcacgctcaatctcaggcgccaaccgtcctgggccaccttgcgcgacaagctgctcagcggcgagctggatgccgcgcagtgcctgtacgggctggtctacggcgtccagctcggcctcggcggcagcgcggcaagcgagatggcggtgctcatgggactgtgccagaacggccaggcgatcaatctttccgaaccgctgaagcaggctggcgtgaccagtgcggaggcactgctccggcatcggcgccagaatggtgcacgcctgaccctggcgcagacctttcccaccggtacccacgcgctctggctgaactactggctggcgagcatcggtctgcatccgctgcacgacgtgcacagcgtggtggttccaccggcgcagatggtcggccatctccaggccgggcgcatcgacgggttctgcgccggcggcccctggggcgccctggccgtggaccagggccagggcttcaccatcgccaccagccaggcgatctggccggaccacccggaaaaggtcctcggcactacccgcgccttcgtcgacgcctacccgaacaccgcccgcgcgctggtcatggcggtcctcgacgccagccgcttcatcgaacagaacgccgagaaccgcctgggcaccgcgcaactgatcagcggccgcgactatgtcgacgctccgctcggcgcgatccagccgcgcttcttcggccgctaccaggacggcctcggcaacgcctggcaggacccgcatccgctgcgtttctacgccgacggcgaagtcaaccggccctggctctcggatggcatgtggttcatgacccaattccgccgctggggcctgctgcgcgaagacccggactacctgggcatcgcccgcagggtccagcagaccgcgctgtaccgcgatgccgcgacggcccttggcctgtgcctggacggcgccgacatgcgccgctcgacactgatcgacgggcgcacctgggacggcagcgaccccgccggctacgcccgcagcttcccgatccacgccctggccgaaaccggccagggcatcgacctctga

SEQ ID NO: 358632 - DNA, 2610 bp, Pseudomonas aeruginosa
gtgcttgaagcctaccgcaaacacgtagaagagcgtgccgcccagggtgtcgtgccccaaccgctgaacgccgaacagaccgcaggcctggtcgagctgctgaagaacccgccggccggcgaagaagaattcctccttgacctgatcaccaaccgcgtaccgccgggcgtcgacgaagccgcctacgtcaaggccggtttcctttccgccatcgtcaagggcgaagccacctccccccttatcgacaagcaacgtgccgccgagctgctgggcaccatgcagggcggctacaacatcgccaccctggtcgagctgctggacgacgccgaactggccaacaccgccgccgaacagctgaagcacaccctgctgatgttcgacgccttccacgacgtcgccgagcgcgccaagaagggcaatgccgcggccaagtccgtgctgcaatcctgggccgatggcgagtggttcaaggccaagccggaagtcccggaaaagctgactctcaccgtattcaaggtccccggcgaaaccaacaccgacgacctctccccggcccccgacgcctggtcgcgcccggacatcccgctgcacgccctggccatgctgaagatggcccgcgacggcatcgagccggtccagccgggttcggtcggtccgctaaagcagatcgaagcggtcaaggccaagggcttcccggtcgcctacgtcggcgacgtggtcggcaccggttcctcgcgcaaatccgccaccaactcggtgctgtggttcttcggcgacgacattccgttcgtgccgaacaagcgtgccggcggcttctgcttcggcaccaagatcgcaccgatcttctacaacaccatggaagatgccggcgccctgccgatcgagttcgactgcaccaacctggccatgggcgacgtcatcgacgtatacccctatgaaggcaaggtcgttcgccacgacagcggcgaagtggtcaccaccttcgagctgaagaccccggtcctgctcgacgaagtccgcgccggcggccgtatcccgctgatcgtcggccgtggcctgaccgagaaggcccgcgccgagctgggcctgggcgcctccgacctgttccgcaagccggaagcaccggccgatagcggcaagggcttcaccctggcgcagaaaatggtcggccgcgcctgcggtctgccggaaggccagggcgtgcgcccgggcacctactgcgaaccgaagatgaccaccgtcggttcccaggacaccaccggcccgatgacccgcgacgaactgaaggacctcgcctgcctcggcttctccgccgacctggtgatgcagtccttctgccacaccgcggcctatccgaagccgatcgacgtcaagacccaccacaccctgcccgacttcatcatgacccgtggcggcgtgtcgctgcgtccgggcgacggcatcatccacagctggctgaaccgcatgctgctgcccgataccgttggtaccggcggcgactcgcacacccgcttcccgatcggcatctcgttcccggccggctccggcctggtggccttcgccgccgccaccggcgtgatgccgctggacatgccggagtcggtgctggtgcgcttcaagggcaagctgcaaccgggcatcaccctgcgtgacctggtccatgcgatcccttactacgcgatccagcagggcctgctgaccgtcgagaagaagggcaagaagaacatcttctccggccgcatcctcgagatcgaaggcctcaacgacctgaccgtggagcaggccttcgagctgtccgacgcctcggccgagcgttccgccgccggctgcaccatcaagctgccggaacaggcgatcgccgagtacctgaagtccaacatcaccctgctgcgctggatgatcggcgaaggctacggcgacccgcgcaccctggagcgtcgcgcccaggcgatggaagcctggctggccaagccggagctgctggaagccgacaaggacgccgagtacgccgcggtgatcgagatcgacctggccgacgtcaaggagccggtgctctgcgcgccgaacgatccggacgacgcgcgtctgctgtcgagcgtacagggccgcaagatcgatgaagtgttcatcggctcctgcatgaccaacatcggtcacttccgcgccgccggcaagctgctggacaaggtcaagggcggcatcccgacccgtctgtggctggctccgccgaccaagatggacgcccaccagctgaccgaggaaggctactacggcatctacggcaaggctggcgcgcgcatggaaatgccgggctgctcgctgtgcatgggcaaccaggctcgcgtccagaccggttccaccgtggtctccacttcgacccgtaacttcccgaaccgtctgggcgatgccaccgatgtgttcctggcatcggccgagctggcggcggtctcctcgatcctcggcaaactgccgaccgtggaggagtacatggcctacgcgaaggacatcgacagcatggctgccgacgtctaccgctacctgagcttcgaccagatcgccgagttccgcgaagcggctgcgaacgccaagatcccggtcgtccaggcctga

SEQ ID NO: 358633 - DNA, 468 bp, Pseudomonas aeruginosa; identical to SEQ ID NO: 350184

SEQ ID NO: 358634 - DNA, 864 bp, Pseudomonas aeruginosa
atgcaagccattcgcagcatcctcgtggtgattgaaccggaccagctggaaggtctcgccctgaaacgggcacaactgatcgccggcgtgacccagtcgcacctgcacctgctggtctgcgagaagcgccgcgaccacagcgccgctctcaacgacctggcccaggagctgcgcgaggaaggctacagcgtctcgaccaaccaggcctggaaggactccctgcaccagaccatcatcgccgagcaacaggccgaaggctgcgggctgatcatcaagcagcactttcccgacaacccgctgaaaaaggccatcctcaccccggacgactggaagctgctgcgcttcgcgccctgtccggtactgatgaccaagaccgcccggccctggacgggaggaaagatcctcgccgcggtcgacgtcggcaacaacgacggcgagcaccgctccctgcacgccgggatcatcagccatgcctacgacatcgccggcctggccaaggccacgctgcacgtgatcagcgcccacccctcgccgatgctctcctccgccgacccgaccttccagctcagcgaaaccatcgaggcccgctatcgcgaggcctgccgcaccttccaggccgagtacggtttcagcgacgaacaattgcacatcgaggaaggtccggccgacgtgctgatcccgcgcaccgcgcagaagctcgacgcggtggtcaccgtgatcggcaccgtggcgcgcaccgggttgtccggcgcgctgatcggcaataccgcggaagtcgtgctggataccctggaaagcgacgtgctggtgttgaagccggacgacatcatcgcccacctggaggagctggccagcaaggagtga

SEQ ID NO: 358635 - DNA, 612 bp, Pseudomonas aeruginosa
atgttgcccgagatcgaccaattccttgcctgttccactcccgccgcctgggtcgaggcggccctggagcgccaggacgtcatgctgctggaccacaaggcctgcgagatgaaggccgcggcgacggcgatgcaactgatcggcaagtactccggccgcctggacctggtgaacaagatgagccgcctggcgcgcgaggagctgcgccacttcgagcaggtgctggcgatcctgaagaaacgcggtatcccggtggtcaatgtcagcgcctcccgctacgcctcggcgctgcgcgacctggtgcgcaagcaggagccgcagcggctgaccgatacgctggtggtcggcgccttcatcgaggcgcgttcctgcgagcgcttcgccgccctggtgccgcacctggacgcggagctggcgaaattctacggcggtttgctgaagtccgagtcgcggcatttccaggactacctgaagctggcctaccagtacggcgacgaggccgacgtggagcgcacgatcgaggtggtgcgggccaaggaggccgagctgatcagcagtccggacaacgaattccgcttccacagcggcctcccggtggacctggtggcctga

SEQ ID NO: 358636 - DNA, 1332 bp, Pseudomonas aeruginosa
gtgatcatctcgaagggaaacctgatcaagttcgtcgccgcccccctcggcgtgctcgccctcggcttcggcctgttcaacggcgtgttcttctataacgaagccggcttcatgacccacgtaaggaccatcttcggcgacgagaagatcgtcgatgacgtcggctacgcgaccaagtggttcggtcgcgccaccacctggaagaaggccatcagcgtgcagtccgtgctggtcatggacgataacgacaccaatccggacaacgacggcctcggcgccaccatcgaggctttcccgatcgtgttcctcggcaacgtcgacgccaaggtcgaatcttccgcgcgctttcgcctgcccggcggcgagccgttcctgaagatggcccaggaataccgcaacccggacaatttcatccgcaccgcactggtgccggcgatcaaggaaaccctccaggccaccgcttcgctgatgagcgccgacgactactacgccggagcccgcagcgaattcgccgccgagttcgagaaccagctcaacgacggcctgtacctgatcaagcgcaaggaagtccgcgggccgcgcggcgccattccgcaccagaccgcgatcctccaggccggcaccgagcagggagcgttcggcgacaacaacgccagccagttcgtcaccgagaaggtcaccgatgccaagggcatcccggtacgcaagcaacagcagttccgcaagttcggcgtcgaggtggtggaagcgcggatcaccaacgtcgatcccaacccgcagtacaagcagcgcatggtcaaggtccagcaggcgctcgccgagctggcggtggcgcggcagaaccgcctgaaggaagaagaggaaaagctgttggtcaccgcccgcggcgagaaggaagtcgaggccaagcgccaggaaaccctgcgcgaccagatcgaacgcaccacccaggcggaaaccgacaagcaattggcggtgatcaacgccgagcgcgagaagcagcgcgccgagatcgagaagcagaccgccgaactgctgcgcgacaaggccacggtgaccgcccaggccaccaagatcaccgccgacgccgaggcttacgcccgcgaagcggtgatcaaggcggacggcgcgttgcagccgaagctcgacgcgctaatcgcgatcaacaaggtctgggccgaagccgccgcccaggcccccgtccccagcgtaatgatgggcgccggcgccaatggcgcggcgagccgccaggacgagatcggccagctgatgggcgttctggcgaccaaggccgcccgcgacctggccctcgacctcaaggtcaaggactga

SEQ ID NO: 358637 - DNA, 723 bp, Pseudomonas aeruginosa; identical to SEQ ID NO: 338501

SEQ ID NO: 358638 - DNA, 498 bp, Pseudomonas aeruginosa; identical to SEQ ID NO: 319036

SEQ ID NO: 358639 - DNA, 1671 bp, Pseudomonas aeruginosa
atgagcaagccagagaccaccgccgccccgaacttcctgcgccagatcgttcaagccgacctggatgccggcaagcacgcgaagatcgtcacccgtttccccccggagcccaacggttacctgcacatcggccacgccaagtcgatctgcctgaacttcggcctggcccaggaattcgctggcgattgccatctgcgcttcgatgacaccaacccggccaaggaagaccaggagtacatcgatgccatcgaggccgacatcaagtggctgggcttccagtggtccggcgaggtctgctatgcctccaactatttcgaccagttgcatgcctgggccatcgagctgatcaaggccggcaaggcgttcgtctgcgacctcggtcccgaggaaatgcgcgaataccgcggcaccctcaccgagccgggccgcaacagcccttaccgtgaccgttcggtggaggagaacctcgacctgttcgcccgcatgaaggccggtgagttccccgacggcgcccgttcgctgcgggcgaagatcgacatgggttcgccgaacatgaacctgcgcgacccgatcctgtaccgcatccgccatgcgcatcaccaccagaccggcgacaagtggtgcatctacccgagctacgacttcacccacggtcagtcggacgccatcgagggcatcacccattcgatctgcaccctggaattcgaagaccatcgtccgctctacgagtggttcctggccaacctgccggtgcctgcgcaaccgcgccagtacgaattctcccggctcaacctgaactacaccgtgaccagcaagcgcaagctcaagcaactggtcgacgaaggccatgtcagcggctgggacgatccgcggatgtcgaccctgtccggctatcgccgccgcggctataccccggagtcgatccgcaacttctgcgagatgatcggggtgaaccgcgccagcggcgtggtcgacatcggcatgctcgagttcagcatccgcgaccacctggacgccaccgcgccgcgtgccatgtgcgtgctgaaaccgctcaaggtggtgatcaccaactaccccgaagggcaggtggagaacctcgagttgccgcgtcatccgaaggaagacatgggagtgcgcgtactgccgttcggtcgcgagctgttcatcgatgccggtgacttcgaggaagtcccgccggccggctacaagcgcctgatccccggtggcgaggtgcgtctgcgcggcagctacgtgatccgtgccgacgaagcgatcaaggatgccgacggcaatatcgtcgaactgcgctgcagctacgatccggacaccctgggcaagaacccggaaggccgcaaggtcaagggcgtgatccactgggtgccggccgagggcagcgtcgagtgcgaagtgcgcctgtacgatcggctgttccgctcggccaatccggagaaggcggaagagggcggcagcttcctcgacaacatcaacgccgactccctgcaggtactggccggctgtcgcgccgagccgtcgctgggccaggcgaacccggaggatcgcttccagttcgagcgcgaaggctatttcgtcgccgacctgaaggactccaggccgggcaagccggtgttcaaccgtaccgtcaccctgcgtgactcctggggacagggctga

SEQ ID NO: 358640 - DNA, 1383 bp, Pseudomonas aeruginosa
gtgctgcagatctacaacacgctgagcaagaccaaagaagtcttcacgccgctggtcggcaaccaggtacgcatgtacgtgtgcggcatgaccgtgtacgactactgccatctgggccacggccgcagcatggtggcgttcgacgtgatcacccgctggttgcgccaccgtggctacgacctgacgtacgtgcgcaacatcaccgatatcgatgacaagatcatcaatcgcgccaacgagaacggcgagccgttcgatgtgctgaccgagcgcatgatcgcggcgatgcacgaggacgaggcccggctgaacatcctcaagccggaccaggagccacgcgccaccgatcacatcgccggcatgcacgcgatgatccagatcctgatcgacaagggctatgcctacgcgccgggcaacggtgacgtgtactaccgggtcggcaagttcgctggctacggcaagttgtcgcggcggcgggtcgaggacctgcgcatcggtgcgcggatcgagccgggcgaagcgaaggaggatccgctcgatttcgtgctctggaagggcgccaagcctggcgaaccgagctggtcgtcgccctggggcgaggggcgcccgggctggcacatcgaatgctcggtgatgtccacctgctgcctgggcgattccttcgacatccatggcggtggcaacgacctggagttccctcatcacgagaacgagatcgcccagagcgaggccgcgaccggcaagccctacgccaagtcctggctgcactgcgggatgatcaccatcaacggcgagaagatgtccaagtcgctgggcaatttcttcaccatccgcgaagtgctggagaaatatcaccccgaagtggtgcgttacctgctgatcgccagccattaccgcagtccgatcaactactcggaggagaacctgcgcgaggccaaggcggccctggaccgtttctacaacgcgctcaaggggctgcccgaggcggcgccggcggaagcggcggagtatgtcgagcgcttcgccgcggcgatggacgacgacttcaataccgcgggtgcctgctcggtgctgttcgagctggcgcgggaggtcaatcgtctgcgcgaaagcgacctgtcggcggcggccgcgctggccgcgcgcctgaagcagttggctggcctgctgggggtgctgcaactggagccggaagccttcctgcaggcgggcgccgagggcaaggtcgatgcggccgaggtcgaggcgctgatccaggcgcgcctggaggcgcgggcggcgaagaactgggcggagtccgaccggattcgcgatcggctcaccgccatgggcgtagtgctggaggatggcaagggcggcactacctggcgcctggccgactga

SEQ ID NO: 358641 - DNA, 855 bp, Pseudomonas aeruginosa
atgaccgcacaactgatcgacggcaaagcgatcgccgccaaccttcgccagcagatagcccaacgcgtgaccgagcgccgccagcaaggcctgcgcgttcccggcctggcggtgatcctggtcggcaccgatccggcctctcaggtctatgtggcgcacaagcgcaaggactgcgaggaagtcggctttctctcccaggcctacgatcttcccgccgaaaccagccaggacgacctgctggccctgatcgaccgcctgaacgacgatcccgccatcgacggcatcctggtccagctacccctgcccgcccacctggacgcctccctgctgctggagcgcatccacccggacaaggacgtggacggtttccatccctacaacatcggccgcctggcccagcgcatgcccctcctgcgcccctgcaccccgaaaggcatcatgaccctgctcgccagcaccggcgccgacctgtacggcatggatgcggtcgtggtcggcgcctcgaacatcgtcggccgccccatggctctggagttgctgctgggtggctgcaccgtcaccgtgacccaccgcttcacccgcgacctggccgaccatgtgtcgcgcgccgacctggtggtggtcgctgccggcaagccgggactggtcaagggcgagtggatcaaggaaggcgccatcgtcatcgacgtcggcatcaaccgccaggccgacggccgcctggtcggcgacgtggaatacgaagtggcagcgcaacgcgccagctggatcaccccggtgccgggcggcgtcgggccgatgacccgcgcctgcctactggaaaataccctgcacgccgccgaacacctgcacgactga

SEQ ID NO: 358642 - DNA, 222 bp, Pseudomonas aeruginosa; identical to SEQ ID NO: 328487

SEQ ID NO: 358643 - DNA, 129 bp, Pseudomonas aeruginosa
atgttcaccgccttcgccttccgcggccgccaaccttataccgttcgccggaacacagcccagggcgcgaccttgcgcccgaaactggcgaaccggccggatgcgccggcttccgccgggaagtcctga

SEQ ID NO: 358644 - DNA, 1287 bp, Pseudomonas aeruginosa
atgctgcgcctgttcctgcgcctctacctgctactggccctggggttcgccgccgcgatcttcgtggtcgaccatgtcatcgacgcgttctacgacagcatcgtcgagaactatcaccgcgacgccgttcgcggccaggcctattcgctggtggaaaagctggccccgctggaccaggccggacgccagcgacagctcgaagactggcgtccccactacgggctcgagctgagcctgacggatgccaggcaggcgaagctgacgcaggaagagcaggccctcctcgacaagaacctgctggtggtacgcgaggacttcacggaattcatcagccgcatcgacgcgggcccgcagctgctcgacatcaagctgccgccggaaccctcgctgaccccactattcaccgtgctggcctacatcctgctcggcgtgctggtcggcatcgccctgctggtatgggtccgcccgcactggcgcgacctcgagaccctgcgcctggccgcgcaacgcttcggcgacggcgacctgtcatcgcgcacgcgcattttccgacgctccgacatccgcaccctggcccagcacttcaaccagatggccgaccgcatcgaaagtctgatcagcaaccagcgtgaactgaccaacgcggtatcccacgaattgcgcacgccgatctcccgcctgtccttcgaactcgagcaattgaacaagcaggtcgacgccgaagtacgccacgacctgatagaggacatgcgcgccgacctcggcgaactggaggaaatggtctccgaactgctgacctacgcccgcctggagcacggcaacgtcgggagccaccgggaaatcgtcgacgccgcgagctggctggatagcgtcgtcgccgacgtcgccctggaagccgaagccgccggagtcacctgcgagatcagcgcctgccaggtcgaacagatccgcatcgagcctcgcttcatggcgcgcgcagtgatcaacctgctgcgcaacgccattcgccacgcacactcgcgcgtcgaaatcaccctcctcgatcaaggcgacagctgtcagatacgggtcaacgacgacggccccgggataccggcggacgcccggcagaagatcttcgaacccttttcgcgcctggacgacagccgcgatcgcagcaccggcggcttcggcctgggcctggcgatcgtccgccgggtcgcgcaatggcacggcggctatgcggaagcgctggaaacgccgcagggaggcgcctccttccgcctgacctgggagcgaccccgttga

SEQ ID NO: 358645 - DNA, 708 bp, Pseudomonas aeruginosa
atggactgccctaccctcagcaaggtattgctcgtcgaagacgaccagaagctcgcccgcctgattgccagcttcctttcccagcatggtttcgaagtgcgccaggtgcatcgcggtgatgccgcgttcgccgctttcctcgacttcaagccgcaagtggtggttctcgacctcatgctccccggacagaatggtctgcaggtgtgccgggagatccgccgggtcgcgaacctgccgatcctcatactcaccgcccaggaggacgatcttgatcacatcctcggcctggagtccggcgccgacgactacgtgatcaagccgatcgagccaccggtgctgctcgcccgcctgcgcgccctgatgcgccggcacgcgccccttcccgcctccccggaaagcctgacattcggcaagctgaacatcgaccgacggcggcgcgaagcggaactcgaaggcctcggcatcgaactgaccacgatggagttcgagctgctctggctgctggccagccaggcaggggaaatactttcccgcgacgagatcctcaaccagatccgcggcatcggcttcgacggcctgaaccgcagcgtcgacgtctgcatcagcaagctgcgcaataaactgaaggacaatccgcgcgagccggtccggatcaagaccgtctggggcaagggctacctgttcaacccgctgggctgggagctctga

SEQ ID NO: 358646 - DNA, 1269 bp, Pseudomonas aeruginosa
atgaccgttggtgtgcctgccgagcgtatcgagaccgaagtcaacaagcgtctgcagcagaccgcccgtcgtgccaagattccaggtttccgccccggcaaggtgccgatgagtgtcattcgtcagcgctacgaagcttccgcgcgccaggaagccatgggcgatctgatccaggaaaccttctacgaagccgtggtcgagcagaagctgaatccggccggttcgccgtcggtagagcccaagtccttcgagaaaggcaaggacctggaatacatcgcaaccttcgaagtcttcccggaatttaccgtttccggcctggaagacatcaaggtcgagcgcctgcaggccgaagtttccgatgctgatgtcgacaacatgctcgatgtcctgcgcaagcagaacacccgtttcgaagtggtcgagcgtgccgcccagaacgatgaccagttgaacatcgacttcgtcggcaagatcgacggcgaagccttcgccggcggttccgccaagggcaccctgctggtgctgggctccggtcgcatgatcgccggcttcgaagaagggctggtgggggcgaaggccggtgaagagcgcgtgctcaacctgaccttccccgaggactaccagaacctggacctggccaacaaggctgccgagttcaccgttaccgtcaatagcgtagccgagcccaagctgccggaactgaacgaagagttcttcgctctgttcggcgtgaaggaaaccggtctcgatggcttccgcgccgaagtgcagaagaacatggagcgcgagctgcgccaggcgatcaagtccaaggtcaagaaccaggtcatggaaggtctgctgcaggccaacccgatcgaagtgcccaaggccctgatcggcaacgaagtgaaccgtctgcgcgtgcaggccgtccagcagttcggtggcaacatcaagcctgaccaactgccggccgagctgttcgaagagcaggccaagcgccgtgtggtgctgggcctgatcgtcgccgaagtggtcaagcagcacgagctgaaggccgacgaaggtcgcgttcgcgaaatgatcgaggaaatggcctcggcctaccaggagcccgagcaggtcgtcgcctggtacttcaagaacgagccccagctgaacgaagtccgttctgttgtactggaagaacaagtcgtagatactgtcctgcaaaaggccactgtgaccgataagcaggtatcctacgaagaagcggtcaagccggccgaagctccgcaagcggcctga

SEQ ID NO: 358647 - DNA, 642 bp, Pseudomonas aeruginosa
atgtctcgcaactcttttattccgcacgttcccgatatccaggccgccggtggcctggtgcccatggtggtggagcagtccgcccgcggcgagcgcgcctacgacatctattcgcgcctgctgaaggagcggatcatcttcctggtcggccaggtcgaggactacatggccaacctggtggttgcccagttgctgttcctggaggctgaaaatcccgagaaggacattcatctctacatcaactcgccgggtggttcggtgactgccgggatgtccatctacgacaccatgcagttcatcaagcccaacgtctcgaccacctgtatcggccaggcgtgcagcatgggtgccctgctgcttgcgggcggtgccgccggcaagcgctactgcctgccgcattcgcggatgatgatccaccagccgctgggcggtttccagggccaggcctcggatatcgagatccatgccaaggaaatcctcttcatcaaggagcgtctgaaccagatcctggcgcaccacaccggccagcccctggacgtcattgcccgcgataccgatcgtgaccgcttcatgagcggtgacgaagccgtcaagtatggcctgatcgacaaggtcatgacccagcgcgacctggccgtctaa

SEQ ID NO: 358648 - DNA, 1281 bp, Pseudomonas aeruginosa
atgactgatacccgcaacggcgaggacaacggcaagctgctgtattgctccttctgcggcaagagccagcacgaagtgcgcaagttgattgccggcccctcggtctttatctgcgacgagtgtgtcgacctgtgcaatgacatcatccgcgaggaggtgcaggaagcgcaggcggaaagtagtgggcacaaacttccggcgccgaaagagatccgcaccatcctcgatcagtacgtgatcgggcaggagcgggccaagaaggttctggcggtagcggtatacaaccactacaagcgcctcaaccagcgtgacaagaaggacgatatcgagctcggcaagagcaacattctgatgatcggcccaaccggctcgggcaagaccctgctggccgagaccctcgcacgtctgctgaacgtgccgttcaccatcgccgatgcgaccacgctgacggaagcgggctacgtgggcgaggatgtcgagaacatcatccagaagctcttgcagaagtgcgattacgatgtggagaaggcccagatgggcatcgtctacatcgacgagatcgacaagatctcccggaaatcggacaacccctccatcactcgcgacgtttccggcgagggtgtgcagcaggccctgctgaagctcatcgagggcaccgttgcctcggtaccgccgcagggcggtcgcaagcatccgcagcaggagttcctgcaggtcgatacgcgcaacatcctgttcatctgcggcggcgctttcgccggtctggagcgggtcatccagaaccgttccgcgcgcggcggcatcggtttcaatgccgaagtgcgcagtcaggagatgggcaagaaggtcggcgaggcgttcaaggaagtcgaaccggaagatctcgtcaagttcggtcttattcccgagtttgtagggcgtttgccggtgatcgcgactcttgatgagctcgacgaggctgcgctcatgcagatcctgaccgagccgaagaacgctctcaccaagcagtacgccaagctgttcgaaatggaaggcgtcgatctcgaattccgtccggacgcactcaaggcggttgcccgcaaggcgctcgaacgcaagaccggtgcacgtggcttgcgttcaattctcgaaggtatccttctcgataccatgtacgagattccctcccagcaggatgtcagcaaggtggtcatcgatgagagtgtcatcgatggctcgtcgcaacccctgatgatctacgagaacagcgaaaagccagccaaggctgcgcctgaggcatga

SEQ ID NO: 358649 - DNA, 2397 bp, Pseudomonas aeruginosa
atgaaaacactcgtcgaactgcccttgctgccgctacgtgacgtggtggtgtacccgcacatggtcatcccgttgttcgtcggtcgggaaaagtccatcgaggccctggaggcagcgatgaccggcgacaagcaaatcctcctgctggcgcagaaaaaccccgcggacgatgatccgggcgaagatggcctgtaccgcatgggtacggtcgctaccgtgctgcagttgctcaagctgccggatggcaccgtcaaggtgctggtcgaaggcgagcagcgcggccaggtcgagcgcttcatcgaggaggaagggcacattcgtgccgcggtccaggccatcgacgacgccaatgtcggcgagcgcgaggccgaggtcttcactcgcagcctgctgagccagttcgagcaatacgtccagttgggcaagaaagtccccgccgaggtgctttcctcgctgaacagcatcgacgagccgagcaggctggtcgataccatggccgcgcacatggcgctgaagatcgagcagaagcaggacatcctggagatcaccgacctgtcgtcgcgggtcgagcatgtcctggcgctgctggatgccgagatcgacctgctgcaggtggaaaagcgtatccgcggccgggtcaagaagcagatggagcgcagccagcgcgagtactacctgaatgagcagatgaaggccattcagaaggaactcggcgatatcgacgaagggcacaacgaagtcgaggagctgaagaagcgcatcgacgctgccggcctgaccaaggaggcgcacaccaaggccactgccgagctgaacaagctcaagcagatgtcgccgatgtcggcggaagccaccgtggtgcgttcctacatagactggctgctgaacgtgccgtggaaggccgagagcaaggtgcgccatgatctcgccaaggcggaagacatcctcgatgccgaccattatggcctggaagaggtcaaggagcgcattctcgagtatctcgccgtgcaaaagcgggtgaagaagctcaagggcccggtcctttgcctggtgggaccgcccggcgtgggcaagacctccctggccgaatccatcgcccgcgccaccaatcgcaagttcgtgcgcatggcgctcggcggcgtgcgtgacgaggccgagatccgcggtcaccgtcgtacctatatcggctccatgccgggccgcctgatccagaagatgaccaaggtcggcgtgcgcaacccgctgttcctcctcgacgaaatcgacaagatgggcagcgacatgcgcggggatcccgcctcggcgctgctcgaggtgctcgacccggagcagaaccacaacttcaacgatcactacctggaagtcgactacgacctgtccgacgtgatgttcctctgcaccgcgaactcgatgaacatcccggcgcccctgctggatcggatggaagtcatccgcctgccgggctacaccgaggacgagaaggtcaatatcgccgccaagtacctgattccgaagcaggtccaggccaacggcctgaagaagggcgagctgaccttcgaggaaggcgccctgcgcgacatcattcgctactacacccgcgaagccggggtgcgcagcctcgagcggcagatcgccaaggtctgccgcaaggcggtgaaggagcatgccaagctcaagcgtatccaggcggtggtgtccagcgagacgctggagaactacctcggcgtgcgcaagttccgttatggcctcgccgaacagcaggaccagatcggccaggtgaccgggctggcctggacccaggtcggcggcgagctgcttaccatcgaggcggccgtggtacccggcaagggccagttgaccaagaccggatcgctgggcgacgtgatggcggaatcgatcaccgcggcgttgaccgtggtgcgcagccgcgcccagagcctaggaatcgcggcggacttccacgagaagcgcgacatccatatccacgttccggaaggcgctacgccgaaggatggcccgagcgcaggtatcggcatgtgcacggcgctggtttcggcgatcacgcagatcccggtgcgcgccgacgtggcaatgaccggggagatcaccctgcgtgggcaggtgctggcgatcggcgggctgaaagaaaaacttttggcggcgcaccgcggcgggatcaagacggtgatcattcccgaggaaaatgttcgcgacctgaaggaaattccggacaatattaagagtgatctggttattaaaccggttaaatggattgacgaagtcctgcaaattgcgctgcaatacgccccggagcccttgcccgatgcggctccggagatggttgcaaaggatgaaaaacgcgagcctgattccaaggagcgaattagcacgcattag

SEQ ID NO: 358650 - DNA, 273 bp, Pseudomonas aeruginosa; identical to SEQ ID NO: 319023

SEQ ID NO: 358651 - DNA, 1866 bp, Pseudomonas aeruginosa
atgctgcagaacatcagggataattcccagggctggatcgccaagaccatcattggcgtgatcatcgttctcctgtcgctgaccggcttcgacgcgatcatccgggccaccgaccactccaacgtggccgccaaggtcaacggcgacgatatcagtctcaatgaagtccaacaggccgtggacatgcagcgtcgccagctgctgcaacgcctgggcaaggatttcgatccatccatgctggatgacaagctgctcaaggaagcggccctgaaggggctgatcgagcgtaccctgctgctccaggccgccaaggacgacaagttcgccttctccgaccaggcgctggaccagttgatcctgcaaactcccgagttccaggtcgacggcaagttcaacgcggatcgcttcgaccaggtcatccgccagatgaactacagccgcatgcagttccgccagatgctcggccaggaaatgctcatcggccagcttcgcgccggcctggcgggcaccggtttcgtcaccgacaacgaattgcagtccttcgctcgcctcgagaagcagacccgcgacttcgccaccctggcgatcaaggccgacgcctccaagagcagcgtgagcgacgacgaggtgaaggccttctacgaaggccacaagagcgagttcatgactcccgagcaggtggtcgtcgaatacgtggagctgaagaagtcctccttcttcgaccaggtcaaggtgaagcaggaagacctcgaggcgctgtaccagaaggaaatcgccaacctttccgagcagcgcgatgccgcacacatcctgatcgaggtgaacgacaaggtcggcgacgagcaggccaaggcgaagatcgacgagatcaaggctcgcctggccaagggcgaggatttcgccgcgctggccaaggagttctcccaggatatcggctcggccgccaccggcggcgacctgggctacgccggtcgcggcgtgtacgaccccgcgttcgaggaggcgctgtatgcgctgaagcaaggtgaggtatccgccccggtgaagactccgtacggctaccacctgatcaagctgctgggcgtgcaggcgccggaagtaccgagcctggaaagcctcaagccgaagctcgaggacgaactgaagaaacagatggtcgagcagcgcttcgtcgaggctaccaaggacctggaaagctccgcctacgaagccgccgacctgagccagccggcgcaggaaatgggcctgaaggtccagaccagccagccgttcggacgttcggggggcgacggcatcgctgccaaccgccagatcgtgcagaccgcgttcagccccgaggtgctggaagaagcggccaacagtggcgccatcgagctggatccggacaccgtggtggtgctgcgggtcaaggaacataacaagccgaaggagcatccgctggagcaggtcgcggcgaacatccgcgagcgcctggccgccgaaaaggccgccgaggaggcgcagaagcgtggcgaggccctgattgcagagctgcgtgaaggccgtacctcttccgcagcgggtgagtcgtggaaagtggtcgaggcggcctcccgcggccaggaaggcgtcgatccgaaactgctccaggcggtgttccgcatgcagcgtccggaggccaaggacaagccttcgctctctggcgtgaccctggccaatggcgattacgtggtgatccgcctgaatggcgtcagcgagccggaggaggctatctccgacgacgagaaggccatgtaccgccgcttcctggcttcgcgcagcggacaggcagacttcgccgccttccgccgtcagttgcaggacaaggcggaagtcgagaaatactga

SEQ ID NO: 358652 - DNA, 798 bp, Pseudomonas aeruginosa
atgggatttctcacaggaaaacgcgccctgatcgtcggagtcgccagcaagctctccatcgcttccggcatcgccgccgccatgcaccgggaaggcgccgaactggccttcacctaccagaacgacaagctcaggggccgggtggaggagttcgccagtggctggggctcgcggccggagctgtgcttcccctgtgacgtggccgacgacagccagatcgaagcggtgttcgccgccttgggcaagcactgggacggcctggacatcatcgtccactccgtcggattcgctccaggcgatcagctcgacggcgacttcaccgcggtgaccacccgcgagggcttccgcatcgcccacgacatcagcgcctacagcttcatcgccctggccaaggccggacgggaaatgatgaagggccgcaacggcagcctgctgaccctctcctacctgggcgccgaacggaccatgccgaactacaacgtaatgggcatggccaaggccagcctggaggccggggtccgctacctggccggcagcctgggcgcggaaggcacccgggtcaatgcggtttccgccgggccgatccgaacgctcgccgcctccgggatcaagagtttccgcaagatgctggccgccaacgagcggcagacgccgctgcggcgcaacgtcaccatcgaggaagtcggcaatgccggcgccttcctctgttcggacctggccagcggtatcagtggcgagatcctctacgtcgatggcggcttcaacactaccgccatgggcccgctggacgacgactga

SEQ ID NO: 358653 - DNA, 1611 bp, Pseudomonas aeruginosa
atgagcgagaacattctggaaatccgcgacctcgccgtcgaattcctctccggcgagcaacgccagcgggtggtcgaaggcgtcagcttcgacatccgccagggcgagaccctggccctggtcggcgaaagcggctcgggcaagtcggtgaccgcccactcgatcctgcgcctgctgccctactccgtcgccagccacccagcaggcagcatccactaccagggcgaggatctgctcaagctcccggaacggcgcctgcgcgggatccgcggcaaccgcatcgccatggtcttccaggaacccatgacctcgctcaatccgctgcataccatcgagaagcagctcgccgaggtcctcgccctgcacaagggcctgggtggcgccaaggccagcgcgagaattctcgaactgctcgagctggtcggcatccccgagccggccaagcgcctgaaagcctatccacacgaactctccggcggccagcggcagcgggtgatgatcgccatggccctggcctgcgagccgcaactgctgatcgccgacgaaccgaccaccgcgctcgacgtcaccgtccagttgaagatcctcgatctgctcaaggacctgcaggcacgcctgggcatgtccctgctgctgatcacccacgacctcaacctggtccggcgcatcgcccaccgcgtctgcgtcatgcaacaagggcggatcgtcgagcaggcttcctgccaggaactcttcgcagccccgcgacacccctatacccgcgagctgctcaacgccgagcccagcggtgcgccggcgagcaacccgcccggtgaaaccctgttggcggtggacgacctgcgggtctggttcccgatccgcaaaggcgtgttccgccgcaccgtggaccacgtcaaggcggtcgacggggtcaatttcgaactaccccgcgggcagacgctgggcatcgttggcgaaagcggctcgggcaagtcgacccttggcctggcaatcctgcggctgctggaaagccagggcggcatccgcttcgaaggcacccggctggacggtctcgcgcaacatgacgtgcgcccgctgcgccgcgagatgcaggtggtgttccaggacccgtatggcagcctcagcccacgcatgtgtgtcggcgagatcgtcggcgaaggcctgcgcatccataggatcggcagcgaggccgaacaggagcaggcgatcatcgacgcgctggtggaggtcgggctcgatccgcagacccgctaccgttacccccacgaattctccggcggccagcgccagcgcatcgccatcgcccgggcactggtgctgaaaccggcactgatcctgctcgacgaaccgacctcggcgctcgaccgcaccgtgcagcgccaggtcgtggaattgctgcggcaactgcagggcaagtacaacctcacctacctgttcatcagccacgacctggcggtagtcaaggcgctcagccaccagctgatggtggttcgacatggcaaggtagtggaacagggcagcgccgaagcggttttcgcctcgccgcaacatccctatacgcagcaattgctggaggctgccttcatggccccggcaagcgcggaaaactga

SEQ ID NO: 358654 - DNA, 1020 bp, Pseudomonas aeruginosa
atgcgcctgtctcccatcaaccagcgccgctgggcccgcttcaagagcaacaagcgtggctggtggtcgctctggctgttcctcatcctgttcgtcggcagcctcggcgccgaactgatcgccaacgacaaaccgctggtcgtgcattacgacggcggctggtatttcccggtcttcaaacgctacccggaaaccaccttcggcggcgaattccccctggaagccaactacaagagcccctacatcagccaactgatcgccgagaaggacggctgggtgctttggccgccgatcccctacagctacgacaccatcaactacgagctgaaggttcccgcccccgccccgccgtcggcggaaaactggctgggcaccgacgaccaggcccgcgacgtgctcgcccgggtgatctacggcttccgcgtgtcgatcctcttcgctctgaccctgaccgtgctcagttctctgatcggcgtcaccgtcggcgccctgcaaggctactacggtggctgggtcgacctgctcggccagcgtttcctggaagtctggtcggggctgccggtgctctacctgctgatcatcctggccagcttcgtccagccgaacttctggtggctgctgggcatcatgctgctgttttcctggatgagcctggtggacgtggtccgcgccgagttcctccgcgggcgcaacctggaatacgtccgcgccgcccgggccctcggcatgcgcaacagcgccatcatgttccgtcacatcctgccgaatgcgatgatctcgaccctgaccttcatgccgttcatcctcaccggcgccatcggcaccctcacctccctggacttcctcggcttcggcctgccgcccggcgcgccgtcgctgggcgagttggtcgcccagggcaagtccaacctccaggcaccctggctgggcatttccgccttcgtggtgctggcggtcatgctgagcctgctggtgttcatcggcgaagccgcccgcgacgctttcgacccgaggaaatga

SEQ ID NO: 358655 - DNA, 1083 bp, Pseudomonas aeruginosa
atgctctcctatatcctgcggcgcctgctgctgatcgtccctaccctgttcggcatcctgctgatcaacttcatcatcatccaggccgctcccggcggtccggtggagcagatgatcgccaagctggaaggcttcgacgccgcttccggcggcgccaccgggcgcatctccggcggcggcggcgaagtcgccgtggccggctcgcaataccgcggcgcgcaaggcctggacccggagctggtgaaagagatcgagcgcatgtacggcttcgacaagtcggcccccgagcgcttcatgatcatgctgaagaactacctgcacctggacttcgggcagagcttcttccgcgacgccaaggtcaccgacctgatcatcgagaaattgccggtgtcgatctcgctcgggctctggagcacgctgatcatgtacctggtgtcgatcccgctggggatcgccaaggcggtccgccatggcagcgtcttcgacatctggaccagctcggcgatcatcgtcggctacgccattcccgccttcctcttcgccatcctgctggtggtgctgttcgccggcggcagctactgggactggttccccctgcgcggcctgacctcgaacaacttcgaccagctcagcctcggcggcaaggtgctcgactatttctggcacctggccttgccggtaaccgccctggtgatcggcaacttcgccaccatcacgctgctgaccaagaacagcttcctcgacgagatcggcaagcaatacgtggtcaccgcccgcgccaagggcctgaccgaacgccgcgtgctctacgggcacgtattccgcaacgccatgctgctggtgattgccggcctgccggctgcgctgctggggatcttcttcaccggttcgctgttgatcgaggtgatcttctccctcgacggcctcggcctgctcagcttcgaagcggcgatgaaccgcgactacccggtggtcttcggcacgctgttcatcttcaccctgttcgggctggtcatgaagctgatcagcgatatcgtctacaccctggtcgatccgcgcatcgacttcgagaaccgggagtaa

SEQ ID NO: 358656 - DNA, 1848 bp, Pseudomonas aeruginosa
atgatccgtccccgcttcacccctctgctggcagccctgctgctcggctgctgcggcccgctcctcgccgccccgaaacatgcactgacgctctacgatgagcctccgaagtatcccgccgatttcaagcatttcgactacgtgaatccggatgcgccaaaaggcggcatcctccgccaggccgacttcggcggcttcgacagcctcaacccgttcatcggcaagggcgtctcggccccttcgctgggcctgatctacgacaccctggccttccagtcgcaggacgagccgttcaccgaatacggcctgctcgcggagaagatcgagaaggcaccggacaacagctacgtgcgcttctacctgcgcccccaggcccgtttcagcgatggcacgccggtcaccgccgaagacgtggtgttcaccttcgagacgctggtgagcaagggcgacccgatgtaccgcaactactatgcggacgtcgacaaggtggtcgccgaggacaagcttcgcgtgcgcttcgacttcaagcacgccggcaaccgcgaactgccgctgatcctcgggcagatcgcgatcctgccgaaacactggtgggccgaccgcgacttttccaagaccggcatggaaatcccggtaggcagcggtccctaccgcatcgccaaggtcgatccgggacgctccatcagctacgagcgagtcaaggactggtgggccaaggaccttccggtctcccgcggactctataacttcgacaccatcaccatcgactcctatcgcgacatgtcggtcgccctggaagccttcaaggccggccagtacgacgtcaacctcgaatattcggcgaaggactgggccaccggctacgagtcgccggcattgcgcgacgggcgcttcatcaaggccagcatccacaaccacaacccggtggggatgcagggcttcgccttcaatatccgccgcccggtgttccaggaccgccgggtacgccaggcgatcagcctgctgttcgacttcgaatggtcgaacaagcagctgttcttcagctcctacaagcgcaccaacagctatttcgagaactcggagatggccgcccaccagttgcccagcgaagccgagctgaagatcctcgaaccgctgcgcggcaagattcccgacgaggccttcgaccaggtcttccagaatccggtcaatgacggcagcggggtgatccgcgagcagcggcgcaaggcctaccagttgctcaccgaggccggctacaggatcgagaacaaccgcatggtaggtcccgacggccagccactgagcttcgagttcatgctgttccaggccaacatggaacgggtcatcctgccgttcaagcgcaacctggccgaacttggcatcgacatgcagatccgtcgcgtcgacgtctcgcagttcgtcaaccgcctgcgctcgcgggatttcgacatgacctcggcgacctggccgcaatccaactcgccaggcaacgaacagcgagagttctggcattccagcagcgccgacaaggccggcagccgcaacttcatcggcctcaaggacccggccatcgacagcctggtggaaagcctgatccagtccgactcgcggcaaagcctgatcgaccatacccgcgccctcgaccgcgtactgtcgtggggctactacgtggttcccaactactacgtcgatacctggcgggtcgcctactggaaccgtttcggccggccgaaggtgacgccactctacgactggggcctgatgacctggtggcagaccagcgacaaggcgctgccgagcaaggcgcaagccgaagccacgcaagacgccgagccggaacgggagtaa

SEQ ID NO: 358657 - DNA, 1830 bp, Pseudomonas aeruginosa
atgcgtcgcctctccttcctgatcctcggcctggccgtgagcctgcccagcttcgccgcgattacccagagccatggttatgcccaattcggcacgctcaagtatccggccaatttccagcacttcgactggaccaatcccgacgcccccaaaggcggcaccttgcgcctgatggcctcgggcagcttcgacacgctcaacccctacaccctgaaaggcaccagcccgatcggcaccggcgatttcctccagtacggcgtcaatgagctgaacgaaccattgatggtgggcaccggcctgtacgacccgtccggcgacgaaccagcctccagctatggcctgatcgcgaagagcgtggaatacgcggaaaaccgcagctgggtggtattcaacctgcggccggaagcacgcttccacgacggcaggccgatcaccgccagcgacgtggccttttcctatcgcaccctggtcaagcaggggcacccgatgtaccgcacctacctgcaggaggtgaagcgggtcgatatcctcacctcccaccgggtgcgtttcgtcctgcggcgctccggcaacccgctgctgatcctgcgcctgggcgagcttccggtgctgccgcagcattactggaaggatcgcgacttccgcgccaccaccttcaccgcgccgctgggcagcggtccctatcgcatcgtcgaggtcgatcccgggcgccgcctggtgttcgaacgcgtgaagggctggtggggcgaaaaactgccggtgaaccgcggcaaatacaatttcgaccgggtcgtggtggacttctaccgggacaacggcgtcgccttcgaagccttcaaggccggcgagttcgacttctacatcgagcaccaggcgaagaactggctgaacaactatcgcttccccgcggttctgcgcggcgatgtgatccgcacggaaatcccgcaccaaatccccagccagacccaggcgttgttcatgaacacccgtcgcgccgtgttcaaggagcgcgcgctacgccaggcgctgggcgagatgttcgacttcgaatggaccaatcgtgccctcttcagcaattcctacctgcgctcgcgcagctactacccgaacagcgaattcgccgccagcggcgtcccggagggccaggaatggctgtacctgtcgccgtaccgcaagcaattgccggcgcagttgttcaaacagccgttcagcctgccgaccaccgaggggcgcggcattccccgtgaaaccctcaggcatgcactcggtctactggccgatgccggctggaagctgtccggcgaccgactgctgaataaaaagggcgaaccgctgcgcttcgaaatcctgctggtcaatccgagcctggagcgtattctccagccctatcgcgaaaacctcgccagcatcggcatcgacgcgcgcctgcgcaccgtcgaccgcgcccaatacaagcagcgcctggaccagttcgactacgacatgatcctcatgaccctgccgcagaccctcagtcccggcctggaacagtggcagtacttccactccagccaggtgaaggtcaagggcagcaagaattacgcgggcatcgccaacccggtggtcgacgccatgctcaaccgcctgctcggcgcccacagccgcgacgaacaggtcgccgccgcgcgcgccctggaccggaccttgctctggcagtactacagcattcccaactggtacctcaattcgcaccgtctggcgtaccgcaaccgcttcgccttcgtcgccaccccgccctacaccctgggcctgcgtgcgtggtggcagaaaaacctggagacgtcccgatga

SEQ ID NO: 358658 - DNA, 777 bp, Pseudomonas aeruginosa
atgatacagatcgacgccctgcccgccttcaacgacaactacatctggctgttgcaagatgcgacaagccgtcgctgcgcggtggtcgaccccggcgatgccaagccggtggaagcctggctggccgcccatcccgactggcggttgagcgatatcctggtgacccaccaccatcacgaccacgtcggcggcgtcgcggccctgaaggaactgaccggcgcgcgggttctcggcccggccaacgagaagatcccggcccgcgacctggcgctggaagacggcgaacgggtcgaggtgctcggcctggtcttcgagatcttccacgtgcccggccataccctcggccatatcgcctactaccacccggcggagacgccgctgctgttctgcggcgacaccctgttcgccgccggctgcggccgtctcttcgaaggcaccccggcgcagatgcatcattccctggcgcgactggccgcgctgccggccaacacccgggtctactgcacccacgagtacacgctgagcaacctgcgcttcgcgctggcggtggagcccgacaacgcggcgctgcgggaacgcttcgaggaagcgacccggctgcgcgaacgggaccgcatcaccctgccgtcggaaatctcgctggaattgtcgaccaatccatttcttcgcgtttcggaaaattctgttaagaaaaaagccgaccagcggagcggccagcaaaaccgcaccccggaggaggttttcgccgtcctgagggcctggaaggaccagttctga

SEQ ID NO: 358659 - DNA, 762 bp, Pseudomonas aeruginosa; identical to SEQ ID NO: 319013

SEQ ID NO: 358660 - DNA, 447 bp, Pseudomonas aeruginosa
atgacagataaagaacaggtagtgatctataccgacggcgcctgcaagggcaaccctgggcgcggcggctggggggcgttgctcctctacaagggcgccgagcgagagctttggggcggcgagccggacaccaccaacaaccgcatggagctgatggcggcgatccaggcgctggcggcactcaagcgttcctgtccgatccgtctgatcaccgactcggaatacgtgatgcgcggcatcaccgaatggttgccgaactggaagaagcgcggctggaagaccgccagcaagcagccggtcaagaatgccgacctctggcaggccctggatgaacaggtcgcccggcaccaggtggagtggcagtgggtccgcgggcataccggcgatcccggcaacgagcgggccgaccagttggccaaccgtggcgtcgccgaattgccgcgctga

SEQ ID NO: 358661 - DNA, 741 bp, Pseudomonas aeruginosa
atgcgtagcgtcgtactggataccgaaaccaccggcatgccggtgaccgatggtcaccggatcatcgagatcggctgtgtcgagctggaggggcgccgcctgaccggtcgccacttccacgtctacctgcaacccgatcgcgaggtcgacgaaggggcgatcgccgtccacggcatcaccaacgaatacctgaaggacaagccgcgcttccgcgaggtcgccaacgatttcttcgaattcatccgcggcgcccagttgatcatccacaacgcggcgttcgatatcggcttcatcaacaacgagttcgccctgctgggccagcaggaccgctcggacgtgaccgagtactgctcggtgctggataccctgctgatggcccgcgagcgccatccgggccagcgcaacaacctcgatgcgttgtgcaagcgctacggcgtggacaactccggtcgcgacctgcacggcgcgttgctcgacgccgagatcctcgccgacgtctacctggcgatgaccggcggccagaccagcctgtcgctggccggcagcggcgcggaaggcgacggcagcggccggccgatggtcagcccgatccgtcggctcgatccggcgcgggtcgccaccccggtgctgcgcgccaacgccgaagagctggctgcgcatgcggcgcggctggcggtgatcgagaagtcggcaggtggtccgtcactctgggcgcaactggaggcgccggtcggcgaatag

SEQ ID NO: 358662 - DNA, 390 bp, Pseudomonas aeruginosa
atgcgcagcgcttatcggatcgtcagcgatcactatgcggcctctagccgtggggacctcgccggaatgctggcggacatggacgaacgcaccgaatggacggaaatggccggtttcccgctggccggcacctatgtcggcgcggccgccatcggcgccggtgtgttccaggccttgcagcgggactgggagggcttcagggtcgagatcgagcgcctgatcgacggcggcgacagcgtggtcaccgtcggtcgatatgcagcgacccaccgtcgcagcggcaagtcgttcgaagcgcgtgtggcacacgtatggacggtagaggacggcaggatccgccgtttcgagcagttctgcgacaccttgctggtggaccgggcgacacgctga

SEQ ID NO: 358663 - DNA, 2256 bp, Pseudomonas aeruginosa
atgtataaagacctcaaatttcccgtcctcatcgtccatcgcgacatcaaggccgacaccgttgccggcgaacgcgtgcggggcatcgcccacgaactggagcaggacggcttcagcattctctccaccgccagctccgccgaggggcgcatcgtcgcttccacccaccacggcctggcctgcattctggtcgccgccgaaggtgccggggaaaaccagcgcctgctgcaggatgtggtcgaactgatccgcgtggcccgcgtgcgggcgccgcaattgccgatcttcgccctcggcgagcaggtgaccatcgagaacgcgccggccgagtccatggccgacctgcaccagttgcgcggcatcctctacctgttcgaagacaccgtgccgttcctcgcccgccaggtcgcccgggcggcgcgcaactacctggccgggctgctgccgccattcttccgtgcgctggtcgagcacaccgcgcagtccaactattcctggcatacgccgggccacggcggcggtgtcgcctatcgcaagagtccggtgggacaggcgttccaccagttcttcggggagaacacgctgcgttccgacctgtcggtctcggtccccgagctgggatcgctgctcgaccataccggccccctggccgaggccgaggaccgtgccgcgcgcaatttcggcgccgaccataccttcttcgtgatcaatggcacttccaccgcgaacaagatcgtctggcactccatggtcggtcgcgaagacctggtgctggtggaccgcaactgccacaagtcgatcctccactcgatcatcatgaccggggcgataccgctctacctgactccggaacgcaacgaactggggatcatcgggccgatcccgctgagcgaattcagcaaggagtcgatcgccgcgaagatcgccgccagcccgctggcgcgcggccgcgagccgaaggtgaagctggcggtggtgaccaactccacctacgacggcctgtgctacaacgccgagctgatcaagcagaccctcggcgacagcgtcgaggtgttgcacttcgacgaggcttggtacgcctatgccgcgttccacgagttctacgacggacgctatggcatgggcacctcgcgcagcgaggagggacccctggtgttcgccacccactccacgcacaagatgctcgccgccttcagccaggcctcgatgatccacgtgcaggatggcgggacccggaagctggacgtggcgcgcttcaacgaagccttcatgatgcacatctcgacctcgccgcagtacggcatcatcgcttcgctggacgtggcttcggcgatgatggaagggcccgccgggcgttcgctgatccaggagaccttcgacgaggccctcagcttccgccgggccctggccaacgtacggcagaacctggaccggaacgactggtggttcggcgtctggcagccggagcaggtggagggcaccgatcaggtcggcacccatgattgggtgctggagccgagcgccgactggcacggcttcggcgatatcgccgaagactacgtgctgctcgatccgatcaaggtcaccctgaccaccccgggcttgagcgccggcggcaagctcagcgagcaggggattccggctgccatcgtcagccgcttcctctgggagcgcgggctggtggtggagaaaaccggtctctactccttcctggtgctgttctcgatgggcatcaccaagggcaagtggagcaccctggtcaccgaactgctcgaattcaagcgctgttacgacgccaacctgccgctgctcgacgtcttgccctccgtggcccaggccggcggcaagcgctacaacggagtgggcctgcgcgacctcagcgacgccatgcacgccagctaccgcgacaacgccacggcgaaggccatgaagcgcatgtacacggtgctgccggaggtcgcgatgcggccgtccgaggcctacgacaagctggtgcgcggcgaggtcgaggcggtaccgatcgctcggttggaagggcgcatcgcggccgtcatgctggtaccctatccgccgggtatcccgctgatcatgccgggtgagcgcttcaccgaggcgacccgctcgatcctcgactatctcgagttcgcgcggaccttcgagcgcgccttccctggtttcgactccgatgtgcatggcctgcagcatcaggacggaccgtccgggcgctgctataccgttgaatgcataaaggaatga

SEQ ID NO: 358664 - DNA, 1356 bp, Pseudomonas aeruginosa
atggcggggggagagaaggccggcaagcgcggcatggggttctggacctgcagcgcgctggtgatcggcaacatggtcggttcgggagtcttcctgcttccctccagcctggcggcgttcggcgggctcagcctgttcggctggctggtgtcgagcaccggcgcggtgctgctggcgctgaccttcgcccgcctggcgcgggtcaaccccggcgccggcggcccctacgcctatacccgcgacggtttcggcagcttcgccggctacctgtgcgcctggacctactggaaagccgcctggatcggcaacgcggcgatcgccgtgaccctggtcggctacctgcgggtattcatcccggcgctggcggatccgctgctgatggtcagcgtggccatcgccgcgatctggctgtgcaccctgatcaacctgcgaggcatcggcaccttcagcgtggtgcagaacctgctgaccatcctcaagctgctgccgttgttgctggtcggtatcctcggctggttccacttcaatcccgagcacctggcgatcccggcgcgcagcgagctgccgaacatgggctatgcccaggcgatcgccaccaccgcggcgctgaccctgtggtcgttcatcggcctggagtcggccaccgtgccggccgacgacgtcgaggacccgcgccgcaccattccccgtgcgaccctgttcggcacgctggccgcggcggccctctacatcctctcgatcactgcggtgcagggcctgatgccgccggaggtgctggcccgctccacctcgccgttcgccgacgcggcgcggatcctgatgggcgactggggctactacctggtggctgccggggcggtcatcgcctgcctgggcgcgctcaatggctgggtcctgttgcagggccagatcccggtggctccggcgcgcgacgggctgttcccggagtcgctcggccagctcaacaagaacggcgcgccggcccacggcctgctggcctcggggctgctggtgacggcgctggtgatggtcgacgggcatggcgacctggtcgatgtgttcaacgtgatcatcctgctcggcaccatgaccggggtggtcccctacgcgttctgcaccgccgcgctgttgcaactgctggcggtgcgaccggacgagttctcgccgcgttcacgccggcaattgctggtgatcggctcgctgggcttcgcctactcgctatgggcgctgtatggcaccggccagcaggcgatcttctggggcttcctggtgctgatggccggtatcccaatgtacacctggcggcaatggcgcaaccaggtcaacggagtgccgacgctcaaagccaatgactga

SEQ ID NO: 358665 - DNA, 1503 bp, Pseudomonas aeruginosa
gtgagcagtcccctgagccaggctttcgcacagaacttcctcgggcattcgccgcgctggtacaagctgacggtgctcgccttcctcttgctcaaccccctgctgctatggctggccgggccggtgacaagcgcctgggtgctggtcggcgagttcatcttcaccctggccatggcgctgaaatgctatccgctacagccgggtggcctgttagtgctggaggcgctgctgcttggcctggctacccccgaggcgctctatgcggaattgcagcacaacttcccggtgctcctgctgctgatgttcatggtcgccggcatctacttcatgaaggacctgctgctcctgctgttttcccgcctgctgctcggcgtgcgctcgaagaccctgctatcgctcctgttctgcctgctggccgccctcctctcggccttcctcgacgccctcaccgtgaccgccgtggtgatcagcgtggcggtggcattctttgccgtgtatcaccgggtcgcttcggggcagcgcgccagcgaggactacgatcccgccaccgaccgccaggtccccgagctgcaccgggcccatctcgaggaattccgcgccttcctccgcagcctgctcatgcacgcggcggtcggcaccgcgctgggcggcgtctgcaccctggtgggagagccgcagaacctgctgatcggccacgaggccggctggcatttcgtcgagttcttccgccaggtcgcgccggtatccatgccggtactggcggccggcctgctgacctgcgtgctgctggagaagagccgccgcttcggctatggcgcccagttgccggcggcggtgcgccaggtgctcgccgagtacgccgccagcgaaagccgcaaacgcggagcgcagcagaaggccgcgctgctggtgcaggccctggcggcgctggtactgatcgtcgggctggccctgcatgtcgccgaggtcggcctgatcggcctgttggtgatcgtgctgatcactgccttcaccggcgtcaccgacgaacaccagatcggccgcgccttccaggaggccctgccgttcactgcgctgctggtggtgttcttcgcggtggtcgcggtgatccaccagcagcacctgttcaccccgatcatccaggcggtgctggcgctgccggcggaacgccagccgggcatgctgttcatcgccaacggcctgctctcggcgatcagcgacaacgtattcgtcgccaccatctacatcaccgaggtgaaacaggcgctggatgccggccacatgagccgcgagcatttcgataccctggcggtggcgatcaataccggcaccaacctgcccagcgtagcgacgcccaacggccaggcggcgttcctcttcctgctgacctcctccatcgccccgctggtgcgcctgtcgtacggccgcatggtctggatggcgctaccctacaccctggtgatgggcggcctgggctggtgggcggtcagtcattggctttga

SEQ ID NO: 358666 - DNA, 813 bp, Pseudomonas aeruginosa; identical to SEQ ID NO: 319006

SEQ ID NO: 358667 - DNA, 1689 bp, Pseudomonas aeruginosa
atggtcacaggagccacgtccctcagtctggtgcgcgacgagttgttcgccaccatggaacaggccgaacagggtcttgagcagttcattgccgagcggcagaacggcagcctgctgcagcacgccgtcgaatgcctgcaacagatccgcggcaccctcaacctgatcgagctggccggcgccgagctgctggcccaggaagccctgcagctggcgaccgacattcccaccggcgtcagcgaggagcgcgacggccagctggcagccctgggcaacgccctgtacgtgctgcgccgctacctggagaacgtcgaggccaatcgccaggagatccccgagctgctcttgccggcgatcaacgaagtgcgctgtgccgcagggcagccggcgctgccggaaagcttcttcttcagcgcccgcctggatatcccgcggccgccgagcactgccatcgaccacctgccttccgaagccgaactgggcgaggaaagccggcggatgcgccacatgtaccagatcggcctgctcggcctgatccgcgaacagaacctttatcccagcctcaagctgatgggccgcgcgctggcgcgcctcgacagtctgcacggcggggtggcccgttcgcggctgtgctggatcggcgccgcggcgatcgagtcgatcgtcgatggccaactgttgccgcgcaagtcgcgcaagcaactgttctcgcgcatcgaccgcgagctcaagcaattgctgatcggcccggcctacgaggcgccgcgccatctgctcaaggaactgctttacctagtggcgctgtccgacggccagggcccgcgttcgcgcgaggtccgcgaactgcatgggctggcgccgctgccgttcaccgaccacctgctggaagaggaatcgcagcgcctgtccggccccggccagtcggtgatgcgttcgctgtccacggcgatccgcgaggaactcgccggggtcaaggacatgctcgacctgatcgagcgcggcgtggcccagccggatagcctgaccaacctgcatgcgcaactgggcaagctgagcaagaccctcggcatggtcggcctgaactcggccggcaccgccctgcagacccagctacccaccgtggccgcctgggctgccagcggcgtcgccgattcgccgccggcgttgctgcgcctggccgatgcggtgctctacgtggaaagcatggtcggcaacctcgagcgcggcgagcgccgcatcatccggccgactccggcggagcccgggcaggaagccgatgcgttcgccgtgcaccagttggccgaggcgcgcatcgtggtgatcgaggaggccaaggccggcctggccctggccaagcgtgcgatcaccgcgtacctggaatccaatggcgacaagctcaacctggccaacgtcccggccagcctgcaggcggtccggggcggtctctggttcctcggtcaggagcgcgccgcgctgctggtcggcggctgcgccgactacatccagcagcgcatgatcgagaccgcgcagatgccttcggagcagatgctggaaaccctcgccgacgccctgaccagtctcgaatactatctcgagggcggtgccgtgctgcgtccgcagggccagccggacgtcctcgacctggccagcgccagcgtcaaggcgctcggactgccggtggccgcctga

SEQ ID NO: 358668 - DNA, 837 bp, Pseudomonas aeruginosa
atggccggcgagttccgctggcaggcaggtcggccggctaccgcccaggtcggcggctgggtgctcgcgcactgtcagcagcgcttcctccaggacgacaacggcctgctgttcccccgcgaatggctgaagcgccaggaactcccgctgctcgccgaacatggggtcggccattggcagggcgagccggtctacgtgctggaactggacgagccgatcgagctgccgggcatggcctgggcgccgttgcggcagttcatgctgcacggcgatttcgatcagttctgcatgctcggctatgccagccagatcggcatctgggcacgtcacaaccggttctgcggcaattgcggcacacgcatgcaggcgcaggaccacgagcgggtgatgcagtgtccgcagtgcgggctgcaccagtacccgcgcctgtcgccgagcatgatcgtcctggtgacccggggcgacgaggtgttgctggcgcgctcgccgcgcttcgtgccgggggtctacagtaccctggccggcttcgtcgaggccggcgagtcggttgagcagtgcgtggtccgcgaggtgcgcgaagaggtcggggtggaggtcgccaatctcgaatacatcggcagccagaactggccgttcccgcattcgctgatgctcggtttccacgccgagtacgtgtccggcgagatcgtcccgcaggaagacgagatcgaggacgcccaatggttctccctcgatgccttgccgccgctaccggcgcagcgctcgatcgcccggcacctgatcgacctgtacctggcgcgccgctcaggcgccgctgaaccagtgctgccaggctag

SEQ ID NO: 358669 - DNA, 780 bp, Pseudomonas aeruginosa
atgcccttcgaactcgcgatagaccccagcaccctgatcatcctggccgtggtggcctttctcgccggcttcatcgacgccatcgccggcggcggcggcctgttgaccatccctgcgctgctcaccgccggggtcccgccgcacctggcgctgggtaccaacaagctgagctcgaccttcggtgcggcgaccgccagctacaccttctaccggcgcaagctgttccatcccgggaaatggcgcaacggtctgctcgccaccgcgatcggcgccgccataggcgcctgggcggctcacctgctgcccgccgagtggctgaaccggatgctcccggtggtggtattcacctgcggcctctacatgctcttcggcggcacgccgaaggcgccgctggacgccgatgcgccgctcggacgcaagcgccagtggccgcagggcctcgccctgggcttctacgacggcgtggcgggaccgggcaccggagcgttctggaccgtcagctcgctgctcatgtacccgctggacctggtccgcgccagcggtgtggcgcggagcatgaacttcgtcagcaacatagtggcgctggcggtgttcatcgcctccggccaggtgatctggttgctcggcctgtgcatgggtgcgtcgctgatggtcggcgcctatttcggcgcgcgcactgccatcggcggcggggcgaagttcattcgcccggtgttcatcctggtggtcctggcgctgaccgcgcggctagcctggcagcactggttcagcggcgcctga

SEQ ID NO: 358670 - DNA, 645 bp, Pseudomonas aeruginosa
atgcagtacgacggtctggcctgggcattcgcgttactggccttgctggccgccctggtcgcggtgcgcatcctcttcgaacgcacctggttcctcggctggctgcgcggcacctgcggcttggccttcgtcgccgtggcggcgctgctgctggtgctcgcctgggacctgcgcagctattcgctgctcaagcccgagcagccgatggccaccctgagcttccaggccgaagggccgcagcgctaccgggtgctgatccatgagggcgccaacgagcgcagcgtggtgctggacggcgaactctggcaactggacgcgcggattttccgctggaaggggctggccgcgttgatcggtctggcgccgggctatcgcctcgacgcgctcagcggccgcttcctggctctcgagcagcagtcccggggccgccgcctgggcttgtcgcagagtccgctgggggtcgatctctggcgctggctgcgggccggcgagcacgacctgttcctgttcgagccgctggcggggcgggtgactttcctgccgatggcggacaaggcggtgttcgcggtgaactacggcgtcgccgggctgcttgccgagccgatgaacctggcggccgaggaggcgctcagggactggcgctag

SEQ ID NO: 358671 - DNA, 906 bp, Pseudomonas aeruginosa
atggccgacttacgccagttccgccagttcgtcgcggttgccgaggagctgagcttccgccgcgccgctgagcgcctgcacatggcccagccaccgctgaccactgcgatccggcggctggaagaagaagtcggcgccagcctgctggagcgtgacaaccgtatccaccgcctgacgccggcaggccgcgcgttcctcgacgaagcccggcgcaccctggcccaggccgaacgcaccctggcggccgcgcgcagcgccgccagcggacgcagaacgttgcgcctggcgttcgtcgacagcaccatcaatattctgctaccgcgcatactccaggcgttccgccaccagcatggcgcgctggacttccagctccaggaagacaccaccgcggggcaactggaggcgttgcgcgaagaccgcatcgatgccggcctgatcgtcctgccggtcgaccgccagcccggcctgtacacacatctactggtggacggcgacatgcgcgtggcattgcccgaagggcatcggctggcactccatgcgcgcctgcgcctggaacaactggccggagaaccctggctgctgtttccacggcactatgggccgggcatgcacgacctgatcgtcgccgcctgcgcggcagccggcttcgtcccggaggtggtgcaggaggcgcggcagatgcagaccatcgccgggctggtggccggcggcatcggcgtcgcgctagtgccttcgctgctacaaccgttgcgcccgccgggggtcacctttcgtcccctgcaagggcggcgggcgcgaattccctatcggctggcgctggcctaccgcacgccgtcggaactcatcgaacgctttcgcgaaaccgcccaggcgatcgccgccgccccggcttttcgcatggcctag

SEQ ID NO: 358672 - DNA, 762 bp, Pseudomonas aeruginosa
atgcacactcattctccaatcccccgtaccgccctggtcaccggcggctcgtcgggcatcggcctggccatcgcccggcgccttcggcaacagggttatcggatcgccctggtggcccgtgattcccagcgcctgcaacgcgctgccgccgagttgggcggtgtgccctggatggccgccgaactttcccgccgcgaagctgtcgaggcggtggccgcctgggttggcgacaccttccaggggctcgacgtgctggtgaacaacgccgggttcacccgaaagatcgccgccaccactccgctggctgaggccgagcgggaatgggatgcgctgctggacggcaacctgaaaagcgcgttcctcatgtcgctggcggtgttgccgcatttcgcggaagagggcgggcggatcatccatatcggatcgatcgctgcgcagaccggtagcggcagtcctggtgcgctgggctatgcggcagccaaggccggcctgcatggcttcggcgtggccctggcgcgggaactcggttcgcgcgggatcacggtgaacagcgtggcgccgggttacatcgccgacacccggttctttcccggcggcctcgatccgcaacgggtcgccgccatcgtcggcgagaccccgctgggcaggaccggccgggtcgaggacatcgccgcggcggtggcctggctggcctcgcccgaggcggggttcgtcaccggaacggtggtgtcggtgaacggtggctggcgggtcggcaactga

SEQ ID NO: 358673 - DNA, 768 bp, Pseudomonas aeruginosa
atgtccaagacccacctgttcgacctcgacggcaagatcgccttcgtttccggcgccagccgcggcatcggcgaggcgatagccaagctgctggcccagcaaggcgcccacgtgatcgtctcgagccgcaagatcgatggctgccaggcggtcgccgacgcgatcaccgcggagggcggcaaggccaccgcgatcgcctgccacatcggcgagatggagcagatccagaacgtcttcgcacagatccgcgagcagttcggccgcctcgacatcctggtcaacaacgccgccaccaacccgcagttctgcaacgtactggaaaccgacctcggcgccttccagaagaccgtcgacgtcaacatccgcggctactacttcatgtccatcgagggcggcaagctgatgaaggaacacggcggcggcagcatcatcaacgtggcctcgatcaacggcgtatcgcccggcgagttccagggcatctactcggtgaccaaggccgccgtgatcagcatgaccaaggtcttcgccaaggaatgcgcgcagttcggcatccgctgcaacgccctcctgccagggttgaccgacaccaagttcgcttcggcgctggtgaagaacgacgcgatccgcaacctcgccctgcagcgcatcccgctcaagcgcgtggccgagccgagcgaaatggcaggcgccgtactctacctggctagcgaagcgtccagctacaccaccggcgtggcgctgaacgtcgacggcggcttcctttcctga

SEQ ID NO: 358674 - DNA, 1071 bp, Pseudomonas aeruginosa
atgtcgctgaccgaccaatccactcgcatccgcgccggcgaagaactcgacgccgccgtcatcgacccgtacctgaaagcccatatccccggcctcgaaggcaccccgaagatcagccagttccccggtggcgcgtccaacctgacctacctgatcgagtatccgcgccaggagttcgtcctgcgtcgcccgccattcggccacaaggccaagtcggcccacgacatgggccgcgaataccgcatcctgaaccagttgaacgcaggcttcccctactgcccgaaagcctacctctactgcaccgacgagtcggtgatcggcgccgagttctacgtcatggaacgggtcaagggcatcatcctgcgcgccgaactgccgccagagctgaatctcgacgaacaacagacccgcagcctgtgcaagagcttcatcgacaagttcgtcgaactgcacaacgtcgactacgccgcctgcggactggccgacctgggccgcccggacggctacgtgcagcgccagatcgccggctggaccgaccgctacgagaaggccctgacccccgacgcgccgctctgggaaccggtcaaggcctggctcaaggacaagcagccggccgatcaccacaagccgggcatcgtgcacaacgactaccgcttcgacaacgtgatcctcgacccggaaaacccgatgcagatcatcggcgtgctggactgggaactggccaccctcggcgatccgctgatggacctcggcaataccctcgcctactgggtggaagccggcgacccggctccggtgcagctgacccgccgccagcccagccacctgccgggcatgctgacccgccgggagttcgccgactactacgccgagcgggccgggatcccgccgatcgacaacctggacttctactacacctatggcctgttccgtcttgccggtatcgtccagcagatctactaccgctactaccacgggcagacccaggacaagcgtttcgcccagttcgtgcagatgaacaagctgctggagcagatgagcctgcaggccatcgagcgctcccgcctgtaa

SEQ ID NO: 358675 - DNA, 315 bp, Pseudomonas aeruginosa; identical to SEQ ID NO: 338539

SEQ ID NO: 358676 - DNA, 711 bp, Pseudomonas aeruginosa
gtgggcagcatctacctgattcgacatggccaggcgtcgttcggtgccgacgactacgacgtgctgtcgccgaccggcatccgccaggcggaaatcctcggcgaccacctgctgaacctcggcgtccgtttcgaccgcgtcctcagcggcggcttgcgccgccagcagcacaccgcccgcgccgccctcgaacgcctggagtcctccgggctggccacgccggagctggaagtcgatccggcgttcaacgaattcgaagccgacgcggtgatccgcgcgcacctgccggacctgctcgatgagcagccggaagccttgcacatccttcgccatgcggccgagcatcgggccgagttccagcgcctgttctccaccatcatcgcgcgctgggtttccggcaaccatgagaaagatgggctggaaagctggcaggaattcctcgataaggtccatgacggtcttcgtcgtctgctggcgcaggccagcggcaaggacagggtcgccgtgttcacctccggcggtaccattaccgccctgctccaactgatcgtcggcgttccgccgctcaaggccttcgagctgaactggcagatcgtcaatacctcgctgactcgcctgaaattccgcggcgaggaagtgtccctggcttccttcaacagtcacgtgcacctggaactgttgaaggcgccggaactcatcacctatcgatga

SEQ ID NO: 358677 - DNA, 1026 bp, Pseudomonas aeruginosa
gtggagttcattgccgaatatgcgggctttctggccaggaccgtgaccgtgctggcggcgatcatcgtggtgctggtggtgatcgtcgccctgcgcggccgcggccggcgcggcgcaggcgggcacctcgacgtgcagaagctcaacgatttctacaaggacctgcgcgagcgggtccgccacagcgtcctcgacaaggccagcctcaaggccttgcgcaaggaggagagcaaggcggcgaagcaggcgaagaaacatcctgaacagaagtcgcgggtctacgtgctcgatttcgacggcgacatcaaggccacggctaccgagcaactgcgtcacgaagtgactgcggtgctgagcatggcgggcaaggacgacgaggtggtgctgcgcctggaaagcggcggtggcatggtccatggctacggcctggcggcctcgcaactggcgcgcatccgccaggccggcgtgccgctgaccgtgtgcgtcgacaaggtggcggccagcggcggctacatgatggcctgcatcggcgatcggatcctttccgcgcccttcgccatcctcggctcgatcggcgtggtggcgcagttgcccaacgtccaccggctgttgaagaagcacgatattgacttcgaggtgcttaccgccggcgaatacaagcgtacgctgacggtattcggcgagaacaccgagaagggccgggaaaagttccaggaggacctggaggtgacccacgaactgttcaagaacttcgtggcccactaccggccgcaactgaacatggacgagatcgccaccggcgaggtctggctgggccaggccgcactgggcaagctgctggtggacgaactcaagaccagcgacgagtacctggccgagcaggccagggagcgcgatgtctaccaggtgcaattcgtcgagcgcaagagcctgcaggaacgcgtcggcctggccgccagcgtggttatcgaccgcgtgctggtgacctggtgggggcggctcaaccagcagaagttctggcaatag

SEQ ID NO: 358678 - DNA, 993 bp, Pseudomonas aeruginosa
atggctgtattcaaggcgttgtgggtgacggaagcgccccacggcgtttacgaaacgcaggtggtcgagcgcgataccggcgacctgccggcgggcgacgtactgatccgcgtgcagtattcctcgctgaactacaaggatgcgctgtccgccagcggcaaccgcggggtgacccgcaagtacccgcatacccccggcatcgatgccgccggtgtggtcgccgagtcctcggtggccgagttcgcggccggcgacgaggtgatcgtcaccggctacgacctgggcatgaacaccgccggtggtttcggccagtacatccgcgtgcccgcggcctgggtgatcaagcgcccgcaaggcctgagcctgcgcgaggcgatgatcctcggcaccgccggcctgaccgcggcgctctgcgtcgaaaagctggagcgcagcggcctgcgccccgaccatggctcggtgctggtgaccggcgccagcggcggggtcggcagtatcgccgtggaactgctggccaagctcggctacaccgtggcggccgccaccggcaagctggagcaggccgagttcctcaaccgcctgggggccaagcagatcctcgatcgcgccaccgtggccgatggcgtcgacaagccgttgctcaaggaacagtgggccggcgcggtggacaccgtcggcggcgacatcctcttcaacgtggtcaagtcgttgcagtacggcggcagcgtcgcctgctgcggcctgaccgccggcgccggcttcaaggcctcggtgctgccgttcatcctgcgcggggtcaacctgctcggggtggactcggtggagctgccgctggtggtcaaggcatccatgtgggacaagctgtcgctgcaatggaagctcgacaacctcgaagaggtggcgcgcgagatcgccctcgaagagctgccgggggcgatcaaccagatcctcgccggcaagctggtcggccgggtgctggtcaacctcggctga

SEQ ID NO: 358679 - DNA, 876 bp, Pseudomonas aeruginosa
atgaaccctccgcaaccacgcctcatcgataacggcaacggccatccgctggccagccattggtaccggcctgccggggagccgcgcggctatctcctgatcgtcccggcgatgggagtggaacagcgcttctacgcgtccttcgccgcctggctggcagagcgcggctacctggccatcaccttcgactacctgggcatggggcaatcgcgcaacggctcgctgcgcggtctcgaggtcgatgtgctgggctgggcccgtcatgactgcagcgccatgctcgccgccgcgctcgccgagagcgggagcaagcccctgtactggatcggccatagcctgggcggccagatcctgcccttcgtcgaagggcgcgagcgtatcgatagggtcttcagcatcgccagcggcagtggctactggaaggaaaacagcccgcggttgcgcaacaaggtctggttgttctggtacctcgtcgcgcccctgctgacgccgctgctcggctattttcccgggcgccgcctgggcatggtcggcgacctgccgcgcggggtgatcgaacaatggcgacgctggtgcctgcatccgcagtacgccctcgcggatggcgaggccatccgccgcgccttctccgccgtacgcacgcccatcgtgtcgctgtcgttcaccgacgatgaaatgatgtcccgacgcagcatcgagtcgctgctgggcttctaccgcgaagcgccgaaaaccgcctggcgcatcgctcccgaggaaatcggcgcccgccacatcggccatttcggcttcttccggccgcagttcgccgaatcgctatgggcgggctacctgttgccggagctgggctccggcaacgccctcagccgaggttga

SEQ ID NO: 358680 - DNA, 582 bp, Pseudomonas aeruginosa
atgggccgttcttcccgcaaagacgagattctccaggccgccctggcctgcttcagcgagcatggcgtagacgccaccaccatcgagatgatccgcgaccgttccggagcgagcatcggtagcctctaccaccatttcggcaacaaggaacgcatccatggcgaactctacctggccgggatcggccagtacgcggcgttgctcgaagccggcttcgccagggcgcgcagcgccgaggaaacggtcaggttgctggtcaccagctacatcgactgggtcgtggcgaatcccgactgggcacgcttcatcctgcacagccgcgggcgggtggaggcgggggagctgggcgagcgcctgcgggccgacaaccaggcgcacttcgcacggatccatgcggcgctggcgggatatcgggccgagggcctgttccgcgagatgccggacgactgctttgcttcggtggtgatcggcccggcccacgaccttgcccgccagtggctggccgggcgaacccgggtggcgttggccgactgtcgcgaactgctggcgcaggtggcctgggacagcgtgcgggcggcctga

SEQ ID NO: 358681 - DNA, 498 bp, Pseudomonas aeruginosa
atgcagcgaatcattaaggaccgccaggtggtcgacgaccgctggcacttgctgcccaaggacgcgaccctggaaagcgtacccaacagcgacgacgtgatcatcccgctggccctgtggctcgagcacggcccggccctgcgcggccgcgacggcggcctgggggtctggctggacgcggacgaggagccggaaagcatcgccggcgacctcgacaggttccaggtggtcgcggtgaacttccccgcgtttaccgatggccgcggcttcagcagcgcgcgcctgctgcgcgagcgctacggctacaagggcgagatccgcgcgatcggcgacgtgctgcgcgaccagttgttcttcatgcgccgctgcggcttcgacgcctatgccatccgtgccgaccgcagcccggaagacgccctggccagcctggacgacttcagcgaggtctaccagacctcggtggagcagccgctaccgctgttccgccgccgcggctga

SEQ ID NO: 358682 - DNA, 1659 bp, Pseudomonas aeruginosa
atgtacgtatacgacgagtacgaccaacggatcgtcgaggaccgcgtcaagcagttccgcgaccagacccgccgttacctggcgggtgaattgaccggtgaggagttccgcccgctgcgcctgcagaacggtctctatatccagcgctatgccccgatgctgcgcatcgccgttccctatggcctgctctcctcgcgccaactgcgcaagctggcgcagatcgcccgcgactacgacaagggctacgcccacatcagcacccggcagaacgtgcagttcaactggccggagctggaagacgtgccggaaatcctcgccgagctggccaccgtgcagatgcacgcgattcagaccagcggcaactgcatccgcaacaccaccaccgaccagttcgccggcgtcgcccgcgacgagctggtggacccgcgcccctggtgcgagatcatccgccaatggtcgaccttccaccccgagttcgcccacctgccgcgcaagttcaagatcgcggtgaacggcgcggtgagcgaccgtgccgccatcgaagtgcacgacatcggcctggaggcggtgaagaacgaggccggcgagctcggcttccgcgtctcggtcggcggcggcctgggccgaactcccatcgtcggcagcttcatcaatgaattcctgccctggcagcacctgctcggctacctggatgccatcctgcgcgtctacaaccgctatggccggcgcgacaacaagtacaaggcgcggatcaagatcctggtcaaggcgctgaccccggaagtcttcgccgagcgcgtcgaggccgaatgggccaacctcaaggacggaccgagcaccctcaccgaggcggaagtccagcgcgtcgccgcgcatttcgtcgatccggcctacaagaccctcgacgacctcgacgagtccctcgcccggctcgacgcggagcaccccggcttcgcccgctggcgcgcacgcaacaccttcgcccacaagaagcccggctacgtcgccgtgacgctctcgctgaagcccaccggcaccgcgccgggagacgtcaccgacaaacagctggaggccatcgccgatctcgccgaccgctacagcttcggcgaggtgcgcaacagccataatcagaacatcattctcgccgacgtcgagcagggcgaactcttcgccctctggggcgaactgcgcgaactgggcttcgccacccccaacgtcggcctgctgaccgacatcatctgctgccccggcggcgacttctgctccctggccaacgccaagtcgatcccgatcgccgaagccatccagcgccgcttcgacaatctcgactatctattcgacatcggcgacatcgacctgaacatctccggttgcatgaacgcctgcggccatcaccatgtcggccacatcggcatcctcggggtcgacaagaaaggcgcggagttctaccaggtctccctcggcggcagctcggcgcgcgacgccagcctcgggcagatcctcggcccgtccttcgcccaggagcagatggccgacgtgatcgacaagatcatccaggtctacgtggaacgccggaccgaggaagaacccttcatcgacaccttccgccgtatcggtatcgacccgttcaaggagcgcgtatatgcagcgaatcattaa

SEQ ID NO: 358683 - DNA, 228 bp, Pseudomonas aeruginosa; identical to SEQ ID NO: 318988

SEQ ID NO: 358684 - DNA, 1041 bp, Pseudomonas aeruginosa
atgcgtagccaagacctccaccagcgcctcgccgatctcggcgccaagcccctgcattgcgggaggatcgtccgcgcctggctgcagggccgcgccctcgatgcctgcaccgcccgccagcgggccgaggacttcctgccgctgggcgtacgccatggtctgccccaggtagcagcggaactggaaggcatcgcccgcctgcacagcgagcatccggcgagcgacggctcgtcgcgcctgctggtggaactggccgaccggcagatggtggaaagcgtgctgctgccgcgcggtgggctgtgcgtctcgacccaggtcggctgcgcggtcggctgcgtgttctgcatgaccggccgcagcggcctgctgcgccaggtcggcagcctggagatggtcgcccaggtggtcctggcgcgccgtcggcgagcggtgaagaaagtggtgttcatgggcatgggcgagccggcgcacaacctcgacaacgtcctcgaagccatcgacctgctcggcaccgatggcggcatcggccacaagaacctggtgttctccaccgtcggcgatccccgcgtgttcgagcgcctgccccggcaacgggtgaagcccgccctcgccctgtccctgcacagcacccgcgccgaactgcgccggcaactgttgcccaaggcgccgccgctgagcccggaagaactggtggaagccggcgaggcctacgcccgccgggtcgactatccgatccagtaccaatggaccctgctcgaagggatcaacgacagcctggaggaaatggacggcatcctgcgcctgctcaagggccgcttcgcggtgatgaacctgatcccctacaacagcatggacggcgacgcctaccggcgcccgagcggggagcggatcgtcgagctggcgcgctacctgcacagccgcggcgtgctgaccaaggtgcgcaactcggccggccaggacatcgacggcggctgcgggcaactgcgcgccagggccacgcagggcacggtggaacggcgcatccccgcccgccaggcctga

SEQ ID NO: 358685 - DNA, 303 bp, Pseudomonas aeruginosa; identical to SEQ ID NO: 318986

SEQ ID NO: 358686 - DNA, 486 bp, Pseudomonas aeruginosa
atggacgagcaggcgcttctggcgttgctccgcgagctggccatcgacagccagcgggtcgagcatcccgcgattgcctccatcgaggaatattacgcgcagggcatcgaattgcccgaccagggcatcaagaacctgttcctgcgcaaccgcaagggtactcgccactacctggtgctgctcgacgagcgcaaggaggccgacctgccgggcatcgccgaacagatcggcgaaagccgcctgtcgttcgcctcggtcgagcgcctgcgcgaatacctcggcgtcgaactgggctgcgtgacgcctttcgcgctggtcaacgatccgcagcacagggtcgaggtgttgctcgacgatgccatccgccaggaccagttgctcggtttccacccgttggtgaataccgccaccgagtgcatccgctacgcagacctgctggctttcctcgcccacacggggcatgaaccgcgcctgatccgggtgtag

SEQ ID NO: 358687 - DNA, 363 bp, Pseudomonas aeruginosa; identical to SEQ ID NO: 338552

SEQ ID NO: 358688 - DNA, 3705 bp, Pseudomonas aeruginosa
atgtccagcccgctcaccgatcgcagcgcccgcctgcaagccctccagcacgccctcagggaacgtatcctgatcctcgatggcggcatgggcaccatgatccagagctacaagctggaagaggccgactaccgcggcgagcgcttcgccgactggccgagcgacgtgaaaggcaacaacgacctcttgctgctgagccgcccggacgtgatccaggccatcgagaaggcctacctcgacgccggcgccgacatcctcgagaccaacaccttcaacgccacccaggtgtcccaggccgactacggcatgcagtcgctggcctacgaactcaacgtcgaaggggcgcgcctggcccgccaggtggcggacgcgaagaccgccgagaccccggacaagccgcgtttcgtcgccggcgtgctcggcccgaccagccgcacctgctcgatttccccggacgtgaacaaccccggctaccgcaacgtcaccttcgacgaactggtggagaactacgtcgaggcgacccgcggcctgatcgaaggcggcgccgacctgatcctgatcgagaccatcttcgacaccctcaacgccaaggcggcgatcttcgccgtccagggcgtgttcgaggaactcggcgtggagctgccgatcatgatctccggaaccatcaccgacgcctccggccgcaccctgtcgggccagaccaccgaggccttctggaactcggtgcggcatgcccggccgatctcggtaggcctgaactgcgccctcggcgccaaggaattgcggccgtacatcgaggaactgtcgaccaaggccgacactcatgtctcggcccaccccaacgccggcctgccgaacgccttcggcgaatacgacgaatcgccggcggaaatggccgtggtggtcgaggaattcgccgccgccggcttcctcaatatcgtcggcggctgctgcggcaccaccccggcgcacatcgaggcgatcgccaaggcagtggccaagtacccgccgcgggccatcccggagattccccgggcctgtcgcctgtccggcctggagccgttcaccatcgaccgcagctcgctgttcgtcaacgtcggcgagcgcaccaacatcaccggttcggccaagttcgcccggctgatccgcgaggaaaactacgcggaagctctcgaggtcgcccagcagcaggtggaagccggcgcccaggtgatcgacatcaacatggacgaaggcatgctggactcgaaggcggccatggtcaccttcctcaacctgatcgcctccgagcccgacatctcgcgcgtgccgatcatgatcgactcctccaagtgggaagtgatcgaggccggcctgaagtgcatccagggcaagggcatcgtcaactcgatctcgatgaaggaaggcgtcgaggccttcaagcaccatgcccgcctgtgcaagcgctacggcgccgcggtggtggtgatggccttcgacgaggacggccaggccgacacccaggcgcgcaaggaagaaatctgcaagcgctcctacgacatcctggtcgacgaagtcggcttcccaccggaagacatcatcttcgatgcgaacatcttcgccatcgccaccggcatcgaggaacacaacaactatgcggtcgatttcatcaacgcctgcgcctacatccgcgacaacctcccctacgccctgagctcgggcggggtgtccaacgtgtccttctcgttccgcggcaacaacccggtacgcgaggcgatccactcggtgttcctctactacgcgatccgcaacggcctgaccatgggcatcgtcaacgccggccagctggaaatctacgacgagattccgaaagcgctgcgcgaccgggtcgaggacgtggtgctcaaccgcacgcccgaggccaccgaggccctgctggcgatcgccgacgactacaagggcggcggcgcggtcaaggaggccgaggacgaggaatggcgcagctacagcgtcgagaagcgcctcgagcatgcgctggtcaagggcatcaccacctggatcgtcgaggacaccgaggaatgccgccagcagtgtgcgcgtcccatcgaggtcatcgaaggtccgctgatgtccgggatgaacgtggtcggcgacctgttcggcgccggcaagatgttcctcccgcaggtggtcaagtccgcgcgagtgatgaagcaggcggtggcccacctgattcccttcatcgaggcggagaaaggcgacaagccggaagccaagggcaagatcctgatggccacggtgaagggcgacgtgcacgacatcggcaagaacatcgtcggcgtggtgctcggctgcaacggctatgacgtggtcgacctcggcgtgatggtgccggcggagaagatcctgcagaccgccatcgccgagaaatgcgacatcatcggcctgtctggcctgatcacgccgtcgctggacgagatggtccacgtcgccaaggaaatgcagcggcagaatttccagttgccgctgatgatcggcggcgccactacctcgaaggcgcataccgcggtgaagatcgatccgcagtacagcaacgacgcggtggtctacgtcaccgacgcctcgcgcgcggtaggcgtggccaccagcctgctgtccaaggagctgaaggccgactacgtggcccgcacccgcgccgactacgcggtggtccgcgaacgcacggccaaccgcagcgcccgcaccgagcggctgagctacgaacaggcgatcgccaacaagccggcgttcgactgggccggctaccaggcgccgacgccttccttcaccggcgtcagggtgctcgacgagatcgacctcgcggtgctcgccgagtacatcgactggacgccgttcttcatttcctgggacctggccggcaagtacccgcgcatcctcaccgacgaggtggtcggcgaggccgccacctcgttgttcaacgacgcccaggcgatgctgaagaagctgatcgacgagaagctgatcaaggcccgcgcggtgttcggcttctggccggccaaccaggtcgagcacgacgacctggaggtctacggcgccgatggcgagaccctcgccaccctgcaccacctgcggcagcagacgatcaagccggacggcaagccgaacctgtcgctggccgatttcgtcgcgccgaaggaaagcggcgtgcgcgactacatcggcggcttcatcaccaccgccgggatcggcgccgaggaagtggccaaggcgtacgaagccaagggcgacgactacaacagcatcatggtcaaggcgctcgccgaccgcctcgccgaagcctgcgccgagtggctgcacgagcgggtgcgcaaggagtactggggctacgcccgcgacgaacacctcgacaacgaggccttgatcaaggagcaatacgtcggcatccgcccggcaccgggctacccggcctgccccgaccataccgagaaaggcactctgttcgaactgctcgatccgcagggcctgtccggcgtcagcctgaccgagcactacgcgatgttcccggccgcggcggtcagcggttggtatttcgcccacccgcaggcgcagtacttcgcggtcggcaagatcgacaaggaccaggtagaacgctacagccagcgcaagggccaggaagccagcgtcagcgagcgctggctggcgccgaaccttggctacgatgactga

SEQ ID NO: 358689 - DNA, 465 bp, Pseudomonas aeruginosa; identical to SEQ ID NO: 318982

SEQ ID NO: 358690 - DNA, 519 bp, Pseudomonas aeruginosa; identical to SEQ ID NO: 338555

SEQ ID NO: 358691 - DNA, 2289 bp, Pseudomonas aeruginosa
atgttgccaagaccgttggttgggttggccttcgttttgtcgtcttttatccagtctgtttccgctgctgaaatttcctatagccgtgacgtccagccgatctttaccgccaagtgcgtcgcctgccacgcctgctacgattcgccctgccagctcaacctgagcagcgccgagggcgcgcagcgcggcgccaaccaactgccggtctacgacggcactcggaccaaggcgcaggaaaccacccgcctgtacctcgatgcgcacggtgccgacgcctggcggcgcaaggacttctggtcggtgctcgaatcgcaggacggccaggccgcactgatggcgcggatgctcgagcttggccacagccagccgttgcagccgaatgcgaagatccccgaaggcctggacatttcgatcaaccgcgccaaccagtgcccgacgccggccagcatcgatgcgttcatccgcaagaacccaggttccggcatgcctttcgcggtggccgggctgagcgacgacgaatacgccaccttgcagaagtggctggccgcgggcgccccggtcgaccagcagccgttgcggccgaccgccgccgaggcgcgccaggtggccagctgggagcgtttcctcaaccagcctggggccaagcagagcctggtctcgcgctggctctacgagcacctgttcctggcgcacctgtatttcccggagcagggcgcgcccggccacttcttccagctggtgcgttcgcgcacgcccagcggccagccgatcgacccgatcccgacccggcgtcccaacgacgatccgggcaacagcttctattaccgcctctggccgatccagggcgtgatcgtacacaagacgcacatcacctatccgctgacggcgaagaagctggaacgcgtccaggagctgttcttcggcacccagtggaacaccgacaaggttcccggctacggcgtgcagagccgcgccaacccgttcgccacctttgccgcgatcccgccacgggcgcgctaccagttcatgctggacaacgccgaatacttcacccgtaccttcatccgcgggccggtgtgccgtggacagatcgctaccgacgtgatccgcgacaacttctgggtggtattccaggaccccgagcaggacctgttcgtcaccgacgccaacttccgcgcgcagagcgagccgctgctggccttgccggggcagatcgacgagctgaagaacctgctcggcctgtggagcgcctaccgggacaagcgcaacgagtacgaagacctgcgccaggacgtctacgccgacgcgccgccgccgacctggaacacgctctggcacggcaacgacaacgccctgctgagcatcttccgccagttcgacagcgcctcggtgcgcaagggcctgcttggcgaggtaccgcagaccctgtggctgatggactacccgctgttcgagcgaacctactacgggctggtggtgaacttcgatgtcttcggcaacgtctcgcaccaggcgcagacgcggctgtacttcgacctgatccgcaacggcgccgagcagaacttcctccgcttgatgccgatcgacgcgcgccagccgttgctcgacgactggtaccagaacagcggcaagctgaagatgtggatggactaccaggccttcgacgatgacacgccgagcgcgctgggattgccggagaagcagccgaagaaggccttcgccgaagaactgctgcgtcgctacggcgacctcaatgcgcgtcccgacccgatcaaccgctgcctggacggcaactgctatcgaccgggcatcgaccgcgaactgcaggacgccgagcaggccttcagtcgcctggtgagccggccggcggccggcctcaaggtcatcgagcgcttccccgaggcgaccatgctgcggatacgtacgtccagcggcaagcgcgaggtctataccgtgctgcgcaaccgcgcgcacagcaatgtcgccttcatgctcggcgagtcgctgcgctaccagccgggcctggacaccctgacgatctacccgggcgtgctgtccagctacccgaacttcatgttcgatctgccggcgacggatgccgagtccttcgtcggcgccctggaggcggcgaagagcggcgaggacttcgacaaggtggtcgaacgctggggcgtgcgccgcagcaatccgcagttctggagctacttccacgatctcgaggcgtacatccgcgaaaccgagccggtcgaggcgggcgcgctggacatgaaccgctacgagaacctctga

SEQ ID NO: 358692 - DNA, 585 bp, Pseudomonas aeruginosa
atgagcgccatcaccattaccgaagctgcccaagcgtatctggccgagttgctggagaagcagagcaccccgggtatcggcattcgtatcttcatcacccagccgggtacccagtacgcggaaacctgcatcgcctactgcaagccgggcgaggaaaaggtcgaggacaccgccatcgccctgaaggacttcactgcctggatcgatgcggtcagcgagcccttcctcgaagatgcggtggtggactacgccaccgaccgcatgggcggccagctgaccatcaaggcgccgaacgccaaggtgccgatggtcaacgaggacagcccgatcaccgaacgcatcaactactacctgcagaccgagatcaatcccgggctggccagccacggcggacaggtgagcctggtcgacgtggtcgaggacaacatcgccgtgttgcgtttcggcggcggttgccagggctgcgggatggtcgacatgaccctcaaggatggcgtcgagaagaccctgatcgagcgtattcccgaactgaagggcgtgcgcgacgtgaccgaccacagcaacaaggagaacgcctactactga

SEQ ID NO: 358693 - DNA, 1170 bp, Pseudomonas aeruginosa
atgctgctacgcaacccgaccctgctcctgctgttctgcggccaggccctgtactggtcctgctcgctgatcggcataaccctgaccgccctggtcggcgtccagctggcgccgttgaacagcctggctaccctgcccctggccctgctggtgctgggcaacctgctggcggtgcagccgttgtcgcacttcatgcagcgccacggccgacgtcccgggctgatgctcggcgccggcggcggcgtgctcggcggcctggtctgcgccgccggtgtctggactggcgatttcctctggttctgtctcggcgcgctgggcatcggggtctaccaggcctcggccatgtactaccggttcgccgcgctggaggcggtggatgccgggcggaaaggccgcgccagcgcctacgtgctcgccggcggagtactcgccgcgctgctggcgccgagcctggcgctgtggtcgcgcaacgcgctggcccaacccttcgtcggcgcctatctgctgatcgccgcgctggccctcgccggcctgctgctgatggctctgctccgcgaaggccaggcgccacgcccggcacgactcgcctggcgcgacataggcggcctgttgcggcggccggtggtccgcgcggccatcgcctgcaccgcggccggacacgggttgatgatcctgatcatgaacgccacgccgctggccatgagcttctgcggcctgccgctggaacagtcgagtcgggtcatccagtggcacgtgctgggaatgttccttccggcgttcttcgccggaccgctggtcgaccgcatcggcaaccgtcgcgtcgccctgctcggcgcgttcctgctcgccgcaagtgccggcatcgccctggacgggcagtcggtcacgcatttcctgctcagttcgctggccctgggcagcggctggaacctgatgctcatcgccggcaccaccctgctcggcgagggccacgccgaaagcgagcgcggcgccgcgcaaggattgatggagcaaggcaacagcctggtggcggcgctgatgtcgttcggctccggcgccctgatcaccagccttggctggaacgcggtgaacctgctggtctggccggcgctgctggtggcgctggcactgctctggccggtacggcgaacgcggacgctgtcgcgctga

SEQ ID NO: 358694 - DNA, 243 bp, Pseudomonas aeruginosa; identical to SEQ ID NO: 318977

SEQ ID NO: 358695 - DNA, 1005 bp, Pseudomonas aeruginosa
atgctcgaaccgcgcctgattgcctgcctgatctatcccgacgtgatgagcctggacgtgaccggaccgctgcaggtattcgcctcggccaacgtcgaacgccagcgccagggcctgccgcctttctaccggatacaggtgctcggcgagcgtagcgaagcggtgcccagttccgcgggcatccgcatctgcgccgacctcgcctggcgcgactgtccgccggaaagcctggacaccctgttggtgcccggcggcctcggtgtcgaggcgcagacccgcaacgccgacctgctcgcctggctgaaagccgccgaaccgtgcatacggcggctcggctcggtgtgttcgggagcgctgatcctggccgccgccggggttctcgacgggcgcccggcgaccacccactgggccgacgtggcgacgctgcgccaggggtttcccggcgtccatgtgcaaggcgaccgcctgcacacctacgacccgcggtgccgcgacggcgacgcccacatcttcacctcggccggcgtcacggcgggaatcgacctggccctggcgctggtcgaggccgacctcggccgcagcctggcgctcagcgtcgcgcgacgcctggtgatgttcctcaagcgtcctggcggccaggcccagttcagcgcctggctgaccccggaaccgagccgcaccccgcgcctggccgcgctgctggagtggattcccgccaacctcgccggcgacctgtccctggaagccctcgccgaccaggcctgcatgagcccgcgtacgctgtcccgggtatttctccaggaactgggcgtggcgcccggtcgctacgtcgagcgggttcgcctggaggccgcgcgcgccctgctgcaggacgcccaggcgtcgatcgccacggtgtcccggctgtgcggcttcggccatccggaaaacctccggcggacgttccacaagcatctttcggtcagcccccaggaatacgccgaacgcttcggcatgctggcctga

SEQ ID NO: 358696 - DNA, 1206 bp, Pseudomonas aeruginosa
atgcttgcacgcgacagcctggtacaggctggtctgccggataatccgtatgcgcgccagttgcgcaacggctttcgttggttgcggttcgaaaaggagctggaaaacgagtttcgcgagtttctcagctggaactcgctgatgcagcggcgcgctgccatcggggtggcgttcctgatctgggcgctgttcatcgtggccgactggatgatggtggacatccgcctgcaccccagcctgttcgagcaactgctgggcgtgcgcctgggaatgatcggcctgctgctggtggtctggccggcggccttcctgcccagcctgcgcaaggtcggcgatgccatcgcgccctactgcctgctgctgatcaacctggcggtgctggcctgcgacgtgctgttcgagtggcatggggtgccgcgcttcacccaactgggcgcgaccctgggtatcctcgcggtgttcttcccgctcggcctggcgttctgggcctgcgtgcgcctggcgttgctgtgcctggccctgaacctggcggtattcctgcttttcggcggcgaagagaacctgcgtaccaacctgctgaatacgctctacaacggcctggtggtgctgatctgttcgttcgccctgtacctgcaggactacgcccagcgcgagcagttcctcggccggcggctgctgggcatgatggccgaacaggacagcctcaccggcctggtcaaccgacgctactacgagctgctcgcccagcgggccctggagcagggcgcccgcgaagaaaagggagtggcgctgatcctggtggatgtcgacgacttcaaggcctacaacgaccactacgggcatccggccggcgatgccgccctgcgccagcttggcgtcgtgctccggcagggcgcgcggcggccgctggatatcgccgcgcgcctgggcggggaggagttcgccgtgttgctctacgacagcgaggagggcaacaccctggccatcgccgagcgcctgcggcaggcggtggaggcgctgggcatcgagcacctgggctccagcgccggcccctgcctgaccatcagcctgggggtggcctattcgacctccggcatgggcctggacgcgctctatcgcgaggccgaccgcgcgctctacgaggccaaggatgcagggcgcaacgcggtgcgcgtggcgttccggcagcacgaccgcctcgaatag

SEQ ID NO: 358697 - DNA, 276 bp, Pseudomonas aeruginosa
atgaacgctacgctccgtttcaacgaggctttgctgatcaccgggcgcgccttccagccataccagtgcgttgcctggtccgagctaggcagtgacggcggcctgagcctgtccgtagtcgatcgcactggcacccgcctgctgggccgtacacgcattccgagctccgcctactccgatccggagcagcttgccggcctgctgcaacaggcacgcgaagaactcagccacaacggctacaacctgcaggactggagtatgcccagccaaggctga

SEQ ID NO: 358698 - DNA, 864 bp, Pseudomonas aeruginosa
atggatatcgacctcgcccgtaccttcctggagatcgcccgcagcggtagcttcgtcgctgccgcggaacgcctgcacctgacccagaccgccgtcaccgcgcgcatccagaacctcgaagggcaactcggctgccggctgttcgtgcgcaaccgcgcgggcgcgcgcctgaccgccgacggcgagcacttcctcggctacgccagccaactggtgcagacctgggatgcggcgcgacgcgacctgccgctgccggacggcttccgcaacctgctcaacctcggtggcgaggtcagcctgtgcaatccgctgctgctgaactggatgcggcgcctgcgcgaggcgattcccggccacgccgtgcgggtcgagatcggccagggtgccgacctgctcaagcaactggagcagggcgcgctggacgccgcgctggtctaccagccggaatactggccggggctgcaggtcgagcagttgctggaggaaaagctggtgatggtgcgttccgtgctatccgcggagccttatctgtatgtcgactggggcccggatttccgcagccagcacgatgccgcgctgccggaccgggccaaggccgcgctggcctgcaacctcggtccgctggccctgcagtacatcatgcagaacggcggcagcggttatttccgtacccgggtggtgagcagctacctggatggcggcaccctgcaacgggtcgagcaggcgccggagttcgcctacccgacctacctggtgtactcccgcgagcgcctgtcgccgaccctgcgccatgcgttccagttgctgcgcgaagtggtccgcgaggacagcgactggtcgcagcgctgggactacgtgatctga

SEQ ID NO: 358699 - DNA, 1158 bp, Pseudomonas aeruginosa
atgaacgactcccccagcaccgccgtacgcacctggctgaaaggcttccgccccctgaccctgaacgcccgaccgcgcgactgcctgcgcgccggactcggcgcctgcatcggcgcgctcgccgcggtattcgcctgccaggcattgttcggcagcgaactggcgctgcgcctggcagcgccgctcggcgcatccgccgtactactgttcgccctcgcctccagccccctggcgcaaccctggtcgatgctcggcggcaacctggtcgccgccctggccggcggcctcagcgcctactggttcggacacgatctggccccggccctggtcggcatggccctcggcatgctgctgatgttcgccctgcgctgcctgcatccgccgagttgcgcgctggccctgagcgtggccctcaacccgtccctgagcgaactcggcatcgacgtggtctggccgatcctgctctccaccctggtgctgatcggctgcgcgctgctctacaacaacctgatgcgctctccctacccgcgcccctaccagccgccgcgggccaatatccatggcaccagcgacctggcgccgagcgcgcgtacggacttttccgcccgtgacctggaccaggcgctgcaggacttcggcgaatacgtcgacatcacccgcgacgacctcgagcgactgatccaccataccgagcgctacgccttgcgccggcgcatgggcgagctgaccgcggcacggatcatgtcccgcgacgtgcagaccgccagcaccgagaccttcatcgacgacgcctggaagcagttgcaggaacaccgtctgaaggccctgccggtgctcgacgagcatcggcggctggccggcatcgtcacccagagcgacctgctcaagcacttccgccccgacggcagcccgttcaagcgcctgcgcttcctgcgcgggaccaagctgaagacgatcatgaccaccccggtggtctgcgtacaggccgacacccacgccgtcgaactggtctcgctgctatccgacgaaggcctgcactgcctgccggtgctcaacgaggccggctacctggtcggcatcgtcagccagaccgacctgatcgccgcgctctaccgcaactggctgcagcacctgggccaggccgatcagatcacgtag

SEQ ID NO: 358700 - DNA, 222 bp, Pseudomonas aeruginosa; identical to SEQ ID NO: 318971

SEQ ID NO: 358701 - DNA, 1443 bp, Pseudomonas aeruginosa
atgaacgatacggatagcagaaaagatccggacggctacaactacgacgtcgtccgccagttcaccctgatgaccctggtctggggcatcctcggcatgggcctcggggtgttcatcgccgcccaactggtctggccggcgctcaacctcgacctgccctggaccagcttcggccgcatccgcccgatccacaccagcctggtgatcttcgccttcggcggcagcgcgttgttcgccacctccttctacgtggtgcagcgcaccagcggcgtgcggctgatctccgatgccctggcgcgcttcgtgttctggggctggcaggcggcgatcgtggggatgatcgtcagctacccgctgggctataccacctccaaggaatacgccgagatggaatggccgctggcgctgtggatggcgatcgtctgggtggtctatgcctacctgttcttcggcaccatcgcccgtcgcaaggtgaagcacatctacgtcggcaactggttctacggcgccttcatcatcgtcaccgcgatggtccatatggtgaaccacgcattgttgccggtgagcctgggcaagtcctactcggcctattccggcgccaccgacgcgatgatccagtggtggtacgggcacagcgtggtcggcttcatcctctcggtcggcttcctcggcatgatgtactacttcgtgcccaagcaggccgggcgaccgatctactcctatcgcctgtccatcgtgcatttctgggcgatcatctcgatctacatctgggccggcccgcaccacctgcactacaccgcgctaccggactgggcgcagtcgctcggcatggtgatgtcgctgatcctcctggcaccgagctggggcggcatgatcaacggcatgatgaccctctccggggcctggcataagctgcgcgacgacccgatcctgcgcttcctggtggtgtccctggcgttctacggcatgtccaccttcgaaggcccgatgatggcgatcaagacggtcaactcgctgtcccactacaccgactggaccatcggccatgtccacgccggcgccctcggctgggtggcgatgatctccatcggcacgctctaccacatgatcccgaaactctggggccgcgagcggatgcacagcgtcggcctgatcaacgcgcacttctggctggccaccatcggcaccgtgctgtacatcgcctcgatgtgggtcaacggcatcacccagggcctgatgtggcgggcggtcaacgaggacggcacgctcacctactcgttcgtcgaggcgctggtggccagccatccgggctacgtggtgcgcctgctcggcggcgccaccttcgccagcggcatgctgctgatggcctacaacacctggcggaccctgcgcagcgcgcaggaccagcggcagccggtcctggcggccggccagggggcctga

SEQ ID NO: 358702 - DNA, 924 bp, Pseudomonas aeruginosa
atggccggagccagcctcctcaccctcctcgacgatattgccgcggtgctcgacgacgtctcgctgatgaccaaggtcgccgcgaagaagaccgccggtgtcctcggcgacgacctggccctcaacgcccagcaggtcaccggggtcaacgccgaccgcgaactgccggtggtctgggcggtagccaagggctcgctgcggaacaaggcgatcctcgtccccgccgcgctgttgatcagcgccttcgcgccctgggcggtgatcccgctgctgatgctcggtggcgcctacctgtgcttcgaaggcttcgagaagatcgcccacaaatacctgccccatgacgacgagcacgccgacgaggcagcgctggcggccaatgtcgacgtggccgccctggaaaagcagaagatcggcggcgcgatccgtaccgacttcatcctctccgcggaaatcatcgccatcaccctgggtaccgtcgccgagtccagcttcaccacccaggtactggtgctggtcggcatcgcgctggtgatgaccatcggcgtctacggcctggtcgccggcatcgtcaagctggacgacgccggcctctacctgtccaggcgcgacagcggctttgcccaagggctcggcggcgccatcctgcgcaccgcgccatacctgatgaaaggcctgtcggtggtcggcatggcggcgatgttcatggtcggcggcggcatcctcacccacggtatcccggtggtccaccacgccatcgaacaggccgcgcagagcgtcgccggcatcgccacgctgggcccgctgctggcggcgatcaccccgaccctgctgaacttcctgttcggcatcgtcgccggcgcggtggtcctggcgggggtgctgctggtcaagcgcctgctgccgaagaagaaaaagactggctga

SEQ ID NO: 358703 - DNA, 828 bp, Pseudomonas aeruginosa
gtgagcgaatccctcgatttctcgccctacctcgagcgctgggcgttgcaacccgacggcgagcccttcgccacccacagcagccgcctgctgccggtgcgccatcgcggcgcagcggcgatgctgaagatatccagtgccgaagaagagcgtttcggccacgtactgctcaactggtgggacggccagggcgcggccagggtgctggcctacgaccaccaggcgctgctgatggagcgtgccaccggcgggcgctcgctgctggagatggtcaggcgcggcgacgacgacgaggctacgcgtatcctctgccaggccatcgaacgcatccatgccccgcgcccgggtccgttgccggagctgaccccgctggagcgctggttcgactcgctgtatgccgccgagcgccgctacggcgggctctacgtcgactgcgcgaatgccgcccgctacctgctggagaccgctcgcgaacagcgcccgctgcatggcgacatccaccacggcaatgtgctcgacttcggcgagcgcggctggcaagtcatcgaccccaagcggctctacggcgagcgcggctacgactacgccaacctgttcaccaatcccgacgcgaagaccgcccaggcgcccggccgtttcgagcgccagctggagatcgtaatcgccgccagcggcctgcagcgccgccgcctgctgcaatggatcctggcctggaccggactctcggcggcctggttcgacgaggacggcagccgcgaggagaccgaagccgagctggccatcgcccgcctggccctggcaaacctcgctcgaacgcctgcgcaatga

SEQ ID NO: 358704 - DNA, 888 bp, Pseudomonas aeruginosa
atgaaagccaactccgatgaactgcaaagcttcgtcagtgtagtcgacagcggttccatcagcgccgccgcggaacagatgggactgaccgcctcggccgtcagccggaccctctcgcgcctcgagcacaagctcggcaccaccctgctcaaccgcaccacccggcgcatggagctgaccgaggaaggccgctacttcctcgaccaggcacggcagatcctgcagcagatggaggcgctcgaggaacgcctggccctgcgccggcagagccccgccgggcgcctgcggatcaacgccgcctcgcccttcatgctgcacgcggtagtgccgcacatcggcgagttccgccggctgtacccggacatccagctcgaactcaacaccaacgacctgatcatcgacctgttggagcaacgcaccgacgtggcgatccgcatcggcgcgctcagcgactccaccctgcacgcgcggccgctgggcgccagccgcctgcacatcctcgccagcccggagtacctggcccgccacggcacgccggcgagcatcgaggggctgcgagggcacaccctgctcggcttcacccagcccgagcacctcaaccgctggccggtggtgcacgccgacggcgatcgcctggagatccagccggatatctctgcctccagcggcgagacgctccgccaactggccctgagccaccagggcatcgcctgcctggccagcttcatgaccgaccgcgatatccaggatgggcgcctggtgccgctgttcgccgaacagatgagcgaataccggcaaccgatccacgccgtctactatcgcaactcgcaactggcgctacgcatccagtgcttcctcgacttcatccagcagcgcctgggcgcctga

SEQ ID NO: 358705 - DNA, 828 bp, Pseudomonas aeruginosa
atgcccggccaccgcattaccctcaccggagaaaagcagacgctcctgatcaccctctacgccaaggcgctggatagccgcctggacgattccatcctccatgaccgtttcgccgaggcggcggtgcggcagatcgacttcgacttctccagggtcgccctcggcaagggcaacgaacgggccctggccatgcgctcgcattacttcgaccaggcctgccgcgagttcctcgaccaccatcccgaggggcaggtgctcaacctcggttgcggcctggacagccgtatctaccgggtcgacccgccggccgagctgccctggttcgacctcgactatccggaagtcatggacctgcgcgatcggctctacccgccgcgcgccggcgcctatcgggcgctgcgccactcggtggacgacgacggctggctgcaaggggtgccgcgcgagcggcccgccctggtcctggccgaggggctgatgccttacctgcgggagtcccaggtgcgacgcctggtggaacgcctggtcgaccacctgggtagcggcgagctgctgttcgacggctacggccgcctcggcatcatgctgctgcgcctgtatccgccgctgcgcgagaccggggcgcaggtgcattggagcatcgacgacccgcgcgaactcgagcggtggcatccggccctgcgtttcatcgaggaggtcaccgactatgacccgcaggacgtcgccaagctgccgcagtcgtcgcggctgatgctgccgatctacaacggcttcgccttcctgcggcggatgggccggctgatccgctaccgttggcccagggtctag

SEQ ID NO: 358706 - DNA, 1086 bp, Pseudomonas aeruginosa
atggacggcctgcgcctgcgcttccgccgcgcctaccccggcttcgaactggacatcgacctggctcttcccggtcgtggcgtgaccgctctgttcggccattcaggctccggcaagagcacttgcctgcgctgtatcgccggcctggaaaaggccgccgagggcgaggtgacgatcaacggcgagacctggcaggacagccgccgcaacctcttcgtcgcgccccaccggcgtgccctgggctacgtgttccaggatgccaacctgttccgccacctgacggtgcggcgcaacctggccttcggtctcaagcgcatcgccgccgccgaacgccgcgtcgagctggaacaggcctgcgccctgctgggcatcgagcacctgctggaacgcatgccggaacgcctctccggcggcgagcagcaacgcgtcggcatcgcccgggccctcctcaccagcccgcgcctgctgctgatggacgagcctctggcatccctcgacctgaagcgcaagggcgagatcctgccctatctcgagcgcctgcacgaggaactggacatcccggtgctctatgtcagccactcgccagacgaagtggcgcgcctggccgatcacctggtgctgctggagaacggcaaggtccgcgccagcgggccgatcggcgaaaccctggcgcgagtcgacctgccgctggcgctggacgacgacgccggggtggtgatcgagggcacggtcagcgaccacgacccggcctacggcctgctgaccctggtcctgcccggcagcgcgctgcaaatgcgcgtcgcccacgccccgctggcccccggcaagcgcctgcgcttcaaggtacaggcgcgcgacgtcagcctgaacctgcgcgacgacgcccagagcagcatcctcaaccgcctgccggtacgggtcctggaattggtcgataccgacaccgcggcccacgtcctggtgcgcctggatgccggcggcaatccgctgctggcgcggatcacccgttactcgcgggaccagttgcaactacgacccggccagctgttgtgggcgcagatcaagtcggtggcggtgctcgcctga

SEQ ID NO: 358707 - DNA, 687 bp, Pseudomonas aeruginosa
atggcgttgccactcgacagtacggacctggcggccatctggctgaccatcgagctggcttcgctcaccaccctcctcctgctgctgatcggcacgcccatcgcctggtggctggcgcgcacccgctcctggctgaaggggccgatcggcgcggtggtggccctgccgctggtgctgccgccgacggtgatcggcttctacctgctggtcagcatgggtcccaacggtttcatcggccagctcacccagagcctcggtctcggcaccctgcccttcaccttcgccggtctggtggtcggttcggtgttctactcgctgcccttcgtcgtgcaaccgttgcagaacgccttcgaggcgatcggcgagaaaccgctggaggctgccgcgaccctgcgcgcgagccccgtcgaccgtttcttcagcgtggtcctgccgctggcccggccgggtttcgtcaccgccgcgatcctcggcttcgcccataccgtcggcgagttcggcgtggtgctgatgatcggcggcaacatcccggagaaaacccgcgtggtctcggtgcagatattcgatcacgtcgaagccatggaatacgcccaggcccactggctggccggcggcatggtggcgttctccttcgtcgtcctcctcgccctctattcgggccggcgccgccggccgggctgggcctga

SEQ ID NO: 358708 - DNA, 756 bp, Pseudomonas aeruginosa
atgaccacccgcctgccccagctattgctcgccctcctcgccagcgccgtatccctggccgccagcgccgacgaggtgcaggtcgccgtcgcggccaacttcaccgcgccgatccaggccatcgccaaggaattcgagaaagacaccgggcacaggctggtcgccgcctacggcgccaccggccagttctatacgcagatcaagaacggcgcgccgttccaggttttcctctccgccgacgacagcactccggcgaaactggagcaggaaggcgagatcgtgcccggctcgcgcttcacctatgccatcggcaccctggcactctggtcgcccaaggccggctacgtcgacgccaagggtgaggtgctgaagagtggcagcttcaggcacctgtccatcgccaacccgaagaccgcgccctacggcctcgccgccacccaggcgatggacaagctcggcctcgccgccacgctcgggccgaagctggtggaaggccagaacatcagccaggcctaccagttcgtttccagcggcaacgccgaactgggcttcgtcgccctgtcgcagatctacaaggatggtaaagtcgcaaccggctcggcctggatcgttcccgccgagctgcacgacccgatccgccaggacgcggtcatcctcaacaagggcaaggacaacgccgccgccaaggccctggtcgactacctgaagggcgccaaggccgtcgcgctgatcaagtcctacggctacgaactctaa

SEQ ID NO: 358709 - DNA, 651 bp, Pseudomonas aeruginosa; identical to SEQ ID NO: 318962

SEQ ID NO: 358710 - DNA, 1650 bp, Pseudomonas aeruginosa
gtgaattccccagcgcttcccgaacccttctactacctgcacaacttccgcgcggtgctcgcctggatcggcgaacgctatgccgatctgctcgacgatcaggaacgtgccttcatcgccgcgttcgctgagctgcccgaggccagccaggccctgctggtgcgcatggtgatgcgcaagggcacgctgttccgcgaaggcaagctggcctatgccgagatcggcgacacgcgcgccgccgtgcaaccgctgttggcattgggctgggtggacgcgcagccgaccctggaactggcgcaactgttcggcttgctgaagaaggacgaattgtcgcagctgttcagggaccatctcgggcgcgcgaacctgcgcaaggatgcgctgctggaacggctccagccgttgttccccgaggcgcggcggctcgccgagtggcaggccgacttcgccgaaccggtctacgagttgcgctgcatggcgctctgcgaccgcttgcggttgatgtatttcggcaacctgtggcaggactggtcggagttcgtccttgccgacctgggtatctatcgttacgaaagcgtcgagttttccgccgactctcgcggctttcgcctgcgcgccgacgtcgacgcctatctccacctgttcgactgccgccagcgcttcgacctcggcgagccgctggaggaactgctcgccggcctgccgggcgaaccctacgccaatccctggctggaagggcggcgggtcaagctgctgttccagttcgcccagcactgcgaaaagcagcgggatttcgacctggcccagcggctctatcgccaatccagccaccccggcgcgcgcctgcgggcgattcgcagcctggaacgcggcgagcgcttcgccgaagcccatgcattggcgcgggaggccagctgtgcgccggaaagcgacgccgaacgccagggcctggcccgattgctgccgcgcctgcaaggcaagctcggcctgccgcgacaggcgcgggcggcggctccggaaatcgaccgcctggacctgtgcctggcgttcccgagcgaaccctgtagcgtcgagtgggcggtccgcgagcacctggaagagcccggttgcgcggtgcactacgtcgagaacggcctgatcaattcgctgttcgggctgctctgctgggaggcgatcttcgccgccattcccggggcgttcttccatcccttccacagcgcgccggcggacctgcacagcgccgacttccgccagcgccgcgccgccctgttcgaggcctgcctgggacggctggaggacggcagctaccgcgacgcgatccgctgtcgctaccgcgacaagttcggcctgcagtcgcccttcgtctactgggaactgcttggcgaggaactgctcgaacaggcgctcgattgcctgccggcggcccacctgcgcgcctggttcgaacgcctgctggaggatatcccgggcaaccgcgccggcctgccggacctgatccagttctggccggcgcagcggcgctaccggatggtcgaggtcaagggaccgggcgaccgcctgcaggacaaccagttgcgctggctgcaattctgccgcgagcgggagatgccggtggcggtctgctacgtgcgctggcatgtcgatgactga

SEQ ID NO: 358711 - DNA, 210 bp, Pseudomonas aeruginosa; identical to SEQ ID NO: 318959

SEQ ID NO: 358712 - DNA, 528 bp, Pseudomonas aeruginosa; identical to SEQ ID NO: 326670

SEQ ID NO: 358713 - DNA, 1257 bp, Pseudomonas aeruginosa
atgcagcacaaaagatcccgcgcgatggcgagttcgcgctcgccgttcctcttcgtcttgctggcgctcgccgtgggcggtacggccaatgcccatgacgatggcctgccggccttccgctattcggcggagttactcggccagttgcaactgcccagcgtggccctgccgctgaatgacgacctgttcctttacggtcgcgacgccgaggcgttcgacctcgaggcctacctggccttgaacgcgccggcgctgcgcgacaagagcgaatacttggagcactggagcggctactacagcatcaacccgaaagtgttgttgaccctgatggccatgcagtccgggccgttgggggcgccggacgagcgcgccttggcggcgccgctggggcggctgtcggcgaaacgcggcttcgatgcccaggtacgcgacgtgttgcagcagttgtcgcggcgctactacggtttcgaggaataccagttgcgccaggcggctgcgcgcaaggccgtcggcgaggacggcctgaacgcggcatcggccgcgctgctcggtctgttgcgagagggggcgaaggcctccgccgtgcaaggcggcaatccgctcggcgcctacgcgcagaccttccagcgcctgttcggcaccccggccgccgaactcctgcagccgcgcaaccgcgtggcccggcaactccaggcgaaggccgcgctggcgccgccatccaacctgatgcaattgccctggcgccagggctattcctggcagcccaacggagcgcattcgaacaccggctcgggctatccgtactcgtccttcgatgcgtcctacgactggccgcgctggggcagtgcgacctacagcgtggtcgccgcccacgccggtacggtacgggtgctgtcgcgctgccaggtacgggtgacccaccccagcggctgggcgaccaactactaccatatggaccagatccaggtgagcaacggccagcaggtcagcgccgacaccaagctcggcgtctatgccggcaacatcaacaccgcgctctgcgagggtggcagctccaccggaccgcacctgcatttctcgctgctctacaacggcgccttcgtttccctgcagggcgccagcttcggtccgtaccggatcaacgtcggcaccagcaactacgacaacgactgtcgccgctactatttctacaaccagagcgccggcaccacccattgcgctttccgtccgttgtacaaccccggcctggcgctctga

SEQ ID NO: 358714 - DNA, 1542 bp, Pseudomonas aeruginosa
gtgaccgacaccagcacatttgaagctgagggagttaccgaagatacgccgagcagtggcgcagctttcagcggtaactcagttgaaagtagccaagttactaaagttactacgctggtccccttgcccgtaataccggagatcaaccgaccatgcttccgctgctacgactatacgcaaaggagcggcaaacgttcgttccgggccggcgtctggtggcacacactttccgaacaaggcgcggaggttgatcggtttgtctgctctccgcttcgcgtcgaggcgatcaccagcgacggagactccgacttcggtcggcttttgcgattccgcaattcgcgcggacagtggcgcgaatgggcgatgccgatggcgatgcttcggggcagtggcgaggacatgcgcggcgagctgctccaccttggtgtggagatcgaccccgacgcataccggcagctgagccgctacatccaggaacaacgaccggagcgctacgtcactgccgcaacgcgcaccggctggcatggtccggagctattcgtcctcccgcgacagaacatcggccgaggagatgcaatctatcagagcgaggccaccggagctgatgacttccgtgccgggggcaccctggacggctggctcgacagtattgctcgattctcgccggggaacccgacgctactgctcagcctcgcggctgcattcgcaggtccgctgctctgccaactgcagcggaccggcggcggtctacactggttcggcgattccagcaccggaaagagcaccctgctagcagtggccgcaagcgtctggggccattcgttccagttcgttcgaagctggcgcgtcacgggcaacggcctggagggcctcgccgcgcagcgcaatgacaccctgctggcgctcgacgagatcgccgaggttgatccgcgtgaggtaggaagcattatttactgcctggccaatggcaccggcaagtcgcgcgcgagccgcactggggctgcacggcaggccaaacgctggcgcgtaattacgctgtcgagcggcgagcttaccagttccggacacatggccgaagggggacgccaagcccgcaccgggcaggagattcgcctgctcgacttgccgcttaagcgcactttcggcgcgtgggacgacctgcacggcatggcaggtggccgggaactatccgaccacctgcagcgcgcaacaagtgaacattacggccatgcggggccggagttcgtgcacaagctaatcgagagcggcgaagcatcaaacctgccggcgatgctcggcgagctgataccgcgcttcggcgagtctggcggacaagaaggacgtgccgccgagcggctggcgatctgtgcacttgccggcgagctagcgacgatcttcggactgatcccggcatcacaaggcgaaacagtggccgctgctgtccgaactgttccacatctggcgacaggctcgcgggcctgggcagtccgaagtacgaaaaattctcgacgccatcgacagcttcatctcccgccatggtga

SEQ ID NO: 358715 - DNA, 348 bp, Pseudomonas aeruginosa
atgagccttctcgaacagatgagccagatcggacgcggcggagtaactcctgtaactcggacatctccaactaagttaccgctagaagccccggaaatactggcggtaacttcggtaactcgcgaaaaaaccattctgaacccggagcgtctggaggttggcaatctcacctgccgcgaacaggactggcttgcctcgattgccggccatctcggatgcctgccgcagcacctgctcgacgcttgcttgattgaccgcgacgacctggatgagcaggccgacgccaatcctgttgccgtcgcccgactgatccgaactgatccgcgctggcaggaggtatcgccgtga

SEQ ID NO: 358716 - DNA, 1260 bp, Pseudomonas aeruginosa
atgttcgatcaatcgttctgcgaggcatcaatcattagggtgcttcgcaagagtgactttataaagtcaccagggcttcgcgatgaagacaccaaaaacagagctatagctgatgccatagctcgttcaagaggtggcttctcaggagtaacttttctagagcagtcaatgcttcgcgggaaagccgtatacagcataccagacttccctgacgaactagtcctaagaaaaataaataaaaatattcgaaagtgcataaggattagagagcctaacagagactcaataatctgcaaccttagaaatctgttatctgaaggcgtgacgtatcgcatctataggttagacataaggagcttttatgagtccttcactacgcaaaacgtaattcaagaaacatcaaaaattcccggactcagcccaaacacaaaaaaatttacttcagaaatactgactcactacagctcaaacggcggtttgggaatccccagaggattagctctaagcgcgaccctttccgaattaatgatgcgatcatttgatgatgaaataaaagcccatcccgaggtattcttttattcaagatatgttgacgacataataatattaaccagcaaaaacgagaacgagagcgacctcttaaaactcataaatagatcactacccagcggactcaccctaaacacccagaaaacgacttattgtgaaaccacaaacgttgttaaaccttacaaacccggtcaaccctcgacaaggatactaagcctagagtttctcggctataaattaatagtttcagaaccagaaaagactacagaaaaatcacaatttagagacgtacatttagatatcgcggatagcaaagtcaaaaagctaaagacgaaagcaacgagagctgtaataagttactgtaagaacagagactttgaactcctgctttgcagactaaagtttttggcctccaatttcagcgtacttgacgcagatcgcgagcgcaaacgcttagctggaatattctacaactaccatcgagttgacccatacaaatcagagtcccttagacacttagaccagtacataaaaagaatagcactttctgggcacggaaaagttttcgatgatttttactcaaagaccacagacgcccaacgaagacaaatattaagaataagcttctctcaaggttttctagaaaaaacattcctaaactactcccaccagaagctaaagcaagtccaagagtgctggtcatatgtctaa

SEQ ID NO: 358717 - DNA, 1962 bp, Pseudomonas aeruginosa
atgtctaacccaaacgcaaacaaaattaaaaagaacgatataaatagaatactggtcaccgagaccatcccctatgagaccccgctaatcttctccaatgatgggttctacaagatatgcaacctagacaaggccggtcacgaggtactcaatagagtatttcagactttggtagttggagatggtaggagcaaatacttcacaacgccttatcaatacaaaatcagaaaaaaccttctagagtatagaaagctttcagtaatacacccaatctcgcaatgggagatgaaagatttctaccaaaaaaatgagactcttatctgccactactgctccgaaagcaccttcacgatacgcgcccctcttaggactgccagcattttctattacaagaattcctgggaaaacgttggaaaatataagcgaggcggggttgaagaagaagacaatgaaatgcaaagcaagcatagctcttcattctacacatatagaggctatgatcgactttataaattcttcaactcaagtgagttcctatctctagagaaaaaatactcccaccttaggactctagatgtgtccaagtgctttgatagcatttatacacactctattgcctgggcaacaaaagaaaaacaatatgtaaaatcacgaattggaccagccacattcggagcagcatttgactctcttatgcagagagcaaactacaatgaaaccaacggaatattgattggaccagagataagtcgaatatttgcggaaataatattccaagacattgacaaaaaggtaaaagggcgactacagacttccccctataagcttgagcaagggaagcactacgacattaaaaggtatgtcgacgacgtctttattttcgctcttagtgagaaatacgcccgaaaaatccacgaaatatactctgaccacttgacgcaatataacctccacacaaactcatcaaaatctcaagagtatagccgaccattcttcactccaaaatccagagtaataagagaagtaaacacaaaggtcaatgaattctttgagaaattcttggaaagcaagagcgaaaactctgtcctaacaccattagaaatacaccgcacagacagaatggcgcatagctttattgactcaataaagtcaacatgctccagcaataatattgaatacgacgaagtatcctcatatctaatttctgcttttttcgaaagaacaaaaagacttataaatgttaacaaaatagaaaatcagatcgacctaaaaaactacaaagacacgtcaattctatttatcgatcttttatttttcttttactccgtagctccatccgtcagcgcctcgtacaagctatgcgcatcgatgattttgctatcaagattttcagagacacatctcgaaacgcatgagcacactataaaacatcgcatattccaacacaccctagaactcctagagagcgacttctccacgaacacagcagatgtcgacaacttcattttcctagaagctctaaatatagtcctagccgcaagcgagatgggcgacgaatacttacttccaccacatgtagtaagcaaagtattcgatcagaaaaattcctactacgacctgattgcatgccttttctatataaaagaccgagcggaatatcgggaaatccacgatagaaccgtagatgagatagaaaaaaagctttctgacctgacctcaatacaagtacacgccgaacttgcttgtttatttttagactctatatcctgcccctacattgatcgacgcaaaaaggaaaaatggatacttagagtatatagagtaacaagtactcctcgcccgtctcagcaagcgctcagagagttcattaacaattcctcaagccacttctggttcactaactggaacgaagtcgacctgctcaatgccctggagagaaaggagttgaggcacgtctactaa

SEQ ID NO: 358718 - DNA, 132 bp, Pseudomonas aeruginosa
atgccgcgccgccttttcatcggtctttttctactgccgctgccgcttttcgccacgccccccaaggacgaactggcctatgccgtaggcgcccgcctgggtacacgcctacagcgggaatgcccggtctag

SEQ ID NO: 358719 - DNA, 630 bp, Pseudomonas aeruginosa
atgggcgcagtcggcttcaacgccgtcctctggctctacagcaaaggcttcaagcacgacggcagcgaattcaatcgcctagacggcatgctccgcttcaagcgtcgcttccgccgcctgttcgtcgctcccttcgacgagttcgatccggtgctgcaattgctgcccagtggctacggtagccacgactacgctatctggctgcatcaccgctataccgacaacaaggtctgcctggccacccgtgtccactccctaggtctcgacaaggccaatgccctggccttttgggactgcctgcaacgctacatggacgtgacccagccgttgcccgacctgccggtcctggagccgagccgtcccttcgacccggtcaccgccgagcacgatcggcgtaccggacgcgatccccattactggcgcaagcgcacctaccagggctggcaagccaaggagcgcaaggaactcgaccggcgcctgcacgaatatccctggcaacagcagccctgcatcgtcagggcgcgtatcgatcccgagttgagcatcgaagcctattaccggcgccaggaagccaaaggcatcttcgccacgcccaaggctgatgatttcgataatgtgcatcggcattaa

SEQ ID NO: 358720 - DNA, 294 bp, Pseudomonas aeruginosa
atgagtgcagctgtacagatccttgaagaaaccggtagcgccctgcgcgttgccctgaccaaccacaactgggaggtcatcggcgaactggaccggcgctgtcgccaggcggtcgacgaggcgatgctggacgtccaggacgaagagatcttgcgggtccggatggaagaactgctggcgctgtaccgcgaattgatcgacgtatgccaggaggagcggcaacggctggggaatgatctggtccagctcaaccagtcgaaacagggtgccaaggtctaccagatgttcggctga

SEQ ID NO: 358721 - DNA, 351 bp, Pseudomonas aeruginosa
atgaccctgtcactcatcaccgagatggagcgcgagcagttgctggcgaacggacgcgcccgggcggtggaccaggccgtcgatccgctgccggtggtgcgcctgttcacgcccgacgcgcatgcgacctggcttctggcttcgctcgatccgtccgacgaggacacggcttatggcctgtgcgacgtggggatcggcatgcccgcgttgggcactgtgaaactctccgagctagcctccatcgtcgggccgctcaagcgtccggtcgtgcgcgacctgttcttccgggcgacacgcacactgtcggaatacacgcgactggcgcagctcaacggctcgatcatggactga

SEQ ID NO: 358722 - DNA, 798 bp, Pseudomonas aeruginosa
atggccgaccacgacgccgagcattggtatcccgccgctgcttatctctacgtcgtgcacctggatgacctcgccctggcctgggagtacctgcgacggaacccgaagtacctccgcgactggcaggatcaccagcgccggcccgaggcggcgcaacgttggggattgcgtctgctggaaaacccgcgcctggacgcgcgtgacgcgcatccggtctggtttcccgaccacccggaactgatccacctgtatcccgatatcgaccccatgcccgactctgtggcgttcgacttctggcgcctcccaggcagcaaaagtctggtccatgatggtcggcgcctactgttgacgacacgcttgccgggcggttgcctgcggctgaccatggcgcccggcctagagcagggcatggcctatgtccatgccgttcgggcctgcgccagaccctgcgcacactttcgcgccatcgcggccgagctggacaggctttccgtcaccgtcgatgccgcgccgctcgcggcggcccgctgccgacccagcccggctgcgctgctggagttgcataccctgcaagcactcgacgccaccctgtcgggggcatccttgcgcgaggtggccgcagggctgttcggcccgacagcggtggccgatggctggcacgccgatggcggtctgcgctcgaaggtgcgtcgccttgtgcggcgtggccggacgctgatgcacggaggctaccgccacctggcacagctcgacgggcgcggggagggccgttcgacgccgcctgtaaaacgaccctga

SEQ ID NO: 358723 - DNA, 588 bp, Pseudomonas aeruginosa
atgaccattgtttccacggcaggtctcgcgccgcgtcctcgctcgcctctgcgcgctcgcatcgtcttggccgtactgtccaccgtcggacttgccgcgctggcctgggtgtccttcgtacagccgctgccgcgtctgatctacaacccgtccgacagcattccggtcggctggtatcgcatcgaaccacttcagcaccgggtcagctcgctgccacgtccattctccgtgggcagcatcgtcctagttcgattgcctgccgacgctaccgcacttgctgcgcagcgtggttacctgccggcgcgcatcccgctactcaagcgcgtgggcgcggtcgcgctgcaacacgtctgtatcgtcgccggccaggtacgtatcgacggcgtgccggtggccaccgcgttgcctgccgatcacctgggccggccgctgccatcctggcggcattgccgagcgctgatcgagggcgaactgttcctgctgagcgtgactaacccggcgtcgttcgacagccgctacttcgggccgatcagcacgtccgccgtgatcggcgtcgcgcgcccgatctggtcggagacacatccatga

SEQ ID NO: 358724 - DNA, 330 bp, Pseudomonas aeruginosa
atgcgcagtcttctcgtgctctcggtcgtcttgttggcagcctgcgatcggccgtcctgcagggatctggccggaacgctggccacccatcccgcccggctcgcgactctgcgtgcggagtgtgcggctgactggcaggcggtgggcgatgggatctgcagggccgccgccgtggcgtaccagcgccgcttcttcgccggccactccggcccggacgagtatgtcgtccttgaggagttaccgccgattccaccgaccttcgatgagcctggcgacgaggtggccgaaagcgctgcgcggcgggttgtcgtcaaggaggacgcgccatga

SEQ ID NO: 358725 - DNA, 2187 bp, Pseudomonas aeruginosa
atgcgttgggctggccgtcggcccctcggtattggctgggccaggaacgcagcgccccgcatcagcgagtcaatgccgaagccctccatggctgcgttgagggcgggcacaaaaaaaccggcgcgagggccggcgttcgggaaaatctgcagcagctgctgctcggctatgggcatttctggtttctccagcaaaaaaggtatcatccgccgcctaagcgcggccctaggacgggaactattaacgatgcacggtacgaaactgatttaccggcctgacattgacgggctgcgggcggttgctgtaatcctcgttttgcttttccacttcgacctcggcgttccaggtggtttcgtcggtgttgatgtatttttcgtcatatccggatacctgattacagaggtaatcaaagttggttgttcatccgggaagttctcgtttgttgagttctacgctcgacgtctgattcggctgcatcccgcgctaataaccaccgtcgcgatatgcctgggcgctggctatcttctaatggaccccgcatcactctcttcactagcctcttctgcccagtacgcagtatttgcctcctctaacatattcttctggcttaattctggctattttgacgcttcagcccatacacagccgttactgcatacctggtctctggcagcagaatggcagttctactttgtgtggccgctggtcgtgtgggcatcgctcaaggtatccgagaaatttttggctttcgttcttgggctgacggcaatcgcatcacttgcagcctcacagtacatgttgaccgttgatgtcacagctgcatatttcctcatgccgttccgtgtcttcgaactcgctattggggcattgacgatctacgcagtcagggcaagagtgggcgccgcgttcgaatcggcgctattcgctgtcggcatggccctgatcgtggtatctgcgttcacgctcaatcccgagtcaacattccccggaatcgccgcgctatctccctgcattggtgcggctctctgtatttacgcagggcggtccgcactcggcggaatcttgcgcacagggcctatagtgcagataggactgatttcctattctctatacttggtccattggccagtcgcggtgttctataagtacttcgtcttccgagaagtagccgtgacggaaagcattgccttgtttatcgtctccatttttactggctgggccatgtacgcattggtggagaatcgattcatgccgggcagagtgaggaagaacgtagtccgttatgcaacatccatggcgatgactgctgctgtgttcgcagcatcctggctcgtcgtgaccagtggtggatacagccagcgcatcaacgcaacatatgcggcagcggtcagcaaccccgctgagttcagaacgaagaactatggtgggtatgggtttaaatcagatgggataatcggaaagaaggagggtcttgacgcatacctgctcggagacagcttctctctgcaatacgcatcaggacttaacaaagctctggctgtggacggaattgcgcttctgaccttgactagcaatggctgctttatttccagaatgtacaccagacttcaagacaaccagcctagaccagactgccttgaccgctacgcaagatccatccgtctgatggaggcagacagcaagcctctgatctttgctcttcactggaccggctatcgtgataagacttcaactgcatccggcgagcgtgtgaatctggatgatgacgtaaaatttgcaaaatttctggaagaaaacctagatgcgctccgcagagatataggaaaccgcccactgattatcgtaggtagccaaccattcctgtcagccaaaaaatcggtttctgagtgtctactgcgcccgaacttcatccaccagccatgcaatgggtcgatgcaatataaggtaagtcagtcagaggcattcaaaacaaacgaggcacttaagcgcgcggtatctaagatggaaaatacttactttttcgacccatctgtttcactatgcaaggatggactatgcggccctactctcggtggcgcgctaatctactcggacaacactcacctatcactggacggatcagcaatagccggtgaacaaatagccaagctgctcgaaacaatcataaggggtaaaagaagggcctga

SEQ ID NO: 358726 - DNA, 375 bp, Pseudomonas aeruginosa
atgattccctggcatatgaaggcttccgtacgttcgtcgcgccgccgcggtatcgcgccgctcgccggcctgctcgctctggccaccacgctggcattggcgcagaacggcggattccagtacaccggtagtgtcatcggcgacgaagtcatgtactcaatcggcggtggcaatgctgtgtcaatgagcggggcggcgggcatgtgctccatcggcgtcggggcaggatggaacagcaacctgatctgtggcgacatgagcctcagcacgaccatccagaaccaactcaatggcgttaccagcggcttccagaacatcatgtcatcggtgatacagagcgcgacggggccgtggcctcgttgccggcactgttga

SEQ ID NO: 358727 - DNA, 930 bp, Pseudomonas aeruginosa
atggcaaagcagctttcacctgccggagtcatggcgctcaaagaagcgctgtgttcggtctactggtataagtcagaacttcgtggctttctacagctttgtttatccaatccaggcattctcaacaacttcaactgggagaactacaagcgtcaaattgcctctgatgttgtcgattttctgtatgcgaatccagcatctcatcttggtgacttaacaaaggtctgctacgagctctgcaagataactgatttttcacatttgaagccccttgatgatggtccgcaaaaagtggagaaggcgaggaatgcagtcaatcagcttaaacaactagtggagcctcacaaagatatcaaaaaggagcaggatgaaataaagcgaaggcaggaactcgctgccaaaaagctgcgtgaaaacgcggctgtgcggcagaagctagaagccatcaaggctcgttatatggcattggtcagttctgacaacgcacaaagccgaggcttcgaacttgagcgcgtcatgtatgagttgttcgaactcttcgatctcgaccctaaggcttcattcaagaatcttggcgagcaaatcgatggagcgttctctctggacggaactgagtacctcttcgaggccaagtggcagaaagaacccgtcaataaagctgacctagcagtcttttccgacaaagtgaggaccaagctcgaaaatacactgggcatcttcctgtcgatcaatggtttttcgggagacggcgtttctgcgcaccaagcgggtggtgcctcaatattgctagtcgacggaggggatctaatggccgttctggaagagcgaatcgacttcgttagtttgcttcttagaaaaaagcggcatgcagcacaaacaggccaaatttatctgagctactaccaaatggtcgccgccggtgctggctag

SEQ ID NO: 358728 - DNA, 144 bp, Pseudomonas aeruginosa
atgaagaaaacgatgttggctgtgatgttgctctggagcttctccctggccgcccaggccgcgtgcccggtgatcggccccagcaaggatccatgcaagggcgcggtagtcggcccttccacctgcaagtgtccctggaaataa

SEQ ID NO: 358729 - DNA, 633 bp, Pseudomonas aeruginosa
atgcgagcagtagctcttaactacctgtccaccagtcccgggacagaccactacctgcgtcgggcgaagcttgtcgcccgacgggccgagatcgatgccgaaccaactaggcgtgagggtgaggcacctccggtaggcccggactcaactaccttgttcaagttcggtgagaccgtgaaagcagttctcaccgcctggcactttcccgatgcggagaaggtacagttcgacggtaaaactaacgacatcaccgtcgcgggcaagcgccgtgccgccaacggaaaaggcgttcgggcgattctgcatgccgcctttaatgtcgccgttttggtctattgcatcgagaacgggctgccacatccagggttccttgtgctcgacacgccgctgctcacttatcgcgagccgatgacatcaagacacggcgagctagctgcagacgaggcggtgctcaaggcgaccagcctcgctgaacacttctacaagcacctccacagcctgaagagcgatgtgcagtttatcgtaattgaaaactctgacccgccaacagctgtccgcggtatggccaagatcgagacgttcactggccttgaaggtaacgggcgctttggtttgttagctacaggctcataa

SEQ ID NO: 358730 - DNA, 849 bp, Pseudomonas aeruginosa
atgaacacgcttgaacaatggctgcgcaagcaaggcgagctggaacgatacctgtatctggtactggactccgatggccaactggacgagcgcgatgggttgctcgaagggcgtgagccccatcagtacggcaatctgtatagcggtacgcccgccagttcgctggcggcgataggcccatacctgttccggctcgatacgctggatcatccggtcgttcaggcgctgctcaagtcgcccgagcgtcattggggctggctggccagctgcgccagccgcgacctggaacctctgctccggcattggcgcgcgcgcctggtaacgggcgcgcgtccgaaccaggcgctctatcgttttcatgacagccgcgtgctgggccgtgccctggcacacctgcagccggagcagtggccggcgttcctggggccgatctccagcgtgtgctactggctggccgggcaatgggtcgatgccgacaaccccgccccaggcgagcatgccgtgccggacgaaccggcctggctcgttgtccccacggctgcggagacggcggcaggcattcagttcgacaacgcccgacgctacctgattgccgagtggacggagccgtttgcggaattggccggacagcgggatgccgacgcctggcttcgggcgcagttggagttggcccgcacctggggctggcggacgcctgaacaaatccgctttctactgcttcaacgcttgcgagcaacggatgacgccctgcccaggtcctggtcgcctctgcctgacgaaccccccacgacgcatttcgagcgtgtgtctcaggaggtgcggttctggcagggagacgctcccctatga

SEQ ID NO: 358731 - DNA, 906 bp, Pseudomonas aeruginosa
gtgtgccgccaggcgctccaccgtcgaccgctcgaacaggctggtcgcgtagatcagcgacgcgctcagcgcgtcaccgctttcataggtatccagggtcaggtcgaactgcgccgtcgcgctcgcccgctccagcgcctccactcgcagccccggcagctccagagccttgccctgacccgcgttctggtggttgtacatcacctggaacaatggactgtggctcaggctccgctgcggctgcaacgcctccaccagttgctcgaacggcaggtcctgatgggcctgcgcttccagtgcggtacgtttgacctgctgcaacaaggcgtcgaaacgagtctccaggtcgaagtcggccttcaacacctgggtattgacgaagaagccgatcagacgctcggtctctacccgggtgcggttggcgatcggtaccccaacgcggatttccggctgcccgctgtagcgatgcaacaaggtctggaaactggccagcaacagcatgaacagggtcacgccctgctgctgcgccagctgtttcagcgagcgacccaggtcttcgcccagctccacctgcaggctgtcgccggcaggactctgtacgctcggccgcggccggtcggtcggcagttccagcaccggctgctcgccgcccagctgctgccgccagtaggccagttggcgctcacgctcgccggcttccatccaactgcgctgccacagggcatagtcggcgtactggatcggcaacggctccagttccacggcgcagccttcacggtagccggcgtagaactgcataagctcttccaccatgatcggcgtcgaccaaccatcggagacgatgtggtgcagggtcaccaccagcacctgttcttcggcggacaggcgcagcaacaggacccgtag

SEQ ID NO: 358732 - DNA, 1044 bp, Pseudomonas aeruginosa
atgagccgctacaaccgcatcctctacatcatcgtcggaacgcatggccatcacgagtgggacgaatttgccacggcgatccagggaatggcgctgtcggacaaaggcagggcatatcccgtcgaccggagcaaccattcctcgctgccgcagatgctggagggctacaacaacccgaagtatccgaaagccatcgcactgctgaagctcgaaatcgaagaggtcatcggcggcgccgatttcgccttcgtctccgactacgtctgggccacgcacaattgcggaaatccgggaaaggtggtgctgctggggcatggttcgctgctggccgagatcggcgcctatgccgatctgcagaagacctcctacctgcaggtcgcccagaggaccttcatcgagaccgttttcccggactggccgccagcgcagccggccaacctgcccccgaaccccgacggcaaccgcctggggctgaagaccgtcgccttgaaacagtgctacgccgcgcgcaccctactggcctatgtcagcaaggacccgtccggcaactctcattcggcggccgccggctcggccgcggacatcaccgcgcagaccttgcgtgacaagggctggggaggcaccggcatgacgctgacggcctcgcccgaatacaacatcttcagccccgatagcgccgagatacggatgtccacgcagatgccgatcgtcgaaggcggcagctccggccagaccatcacgttccccggttcccacacggtgaccaccgactcgggagccgcccatgtgaagacccgcctgagggtcttcaccccggacggcacggcgacgaagaagaacggcgacgactactggaaggcggatgcggcctccagcgtgctctacccctcgcactggatcaggacgtacagcttcccttactggaggatctaccttcccgagtacgtcaccgcgaacccgtccgccaattcgatcacctgcgtcgcgccgggcaacgcgctacacctgaagaagaccgagctgaaggtacgtatcgttctctga

SEQ ID NO: 358733 - DNA, 1035 bp, Pseudomonas aeruginosa
atgtgccacatcatattgaccatcgccaatgcttatgacgaagaaacacaccagggcggaatcgcactttatttcaagcacatgtcaagaggcagagaggtcaggtggtatgacgcgcacatcgaaaaaacagacgaactgaactcaacgatctcttacaggttgatgtgcgcaacctccgatagtcctgtctccgacaacgtttccctctatgtcatctcccacagtgtcggcggaactttcgcaggctttcccgccgatctcctggtgcctctgctcaagggcttcttgaaatacacggtcaaacttccaaaagatctccccgtggaaaagctgagcctcatcggctgcggtacagcccgtggcgatggcggcgccacgtatatagcgaaggtcggaagttgctggaagagcggtcacccactgaaggtcgttgcatggcaggcctacgtcacgctgttcgacatacgcttcctgataaagctcctggaggacgatatccagcttcaccgggtagtagacgcctacatcgcggagtgcctgaagttccttgaaggcagcgtttccatacatgcgcggacattatccgaaaggctgtccagcgaactgagccagacccttgccctgcataagaacttcagagccttcaccaatattttcaacaatagtgccgcgtcccggctcgaggcactcagcgaccaagcgatcctggcgctcgtcggcaagaaagtcgtaaagcttcctacacctggaaattacttctccaaccctcccgagggctgggcaataaccaccagcctggaaacttccggagcacggggacagcgcacattcggagactccagggatgccctggacctgctcggccccttgaacgccagcaggcgtcacttcattcagatggccctgcgccgatatttcagcgcagcgctaacccgactggtcctgcagtacgtcgaggacttgttcgagtggcaatacttcccggcaaaagccaaggtctcgttgcttcgacattcggcctatgagcaatga

SEQ ID NO: 358734 - DNA, 411 bp, Pseudomonas aeruginosa
atgccttacgtatacctgagcgaagcagagataacccagatcaaccgttcggtcggcggtgtcaccacgattaatgcgggcggcttgaccgcagccgctcaggggccggccgcgggttttgccggtgtcgacctgcgtcccacgctggcggacaaggcggcgaccctcatcatcgagatatcccaaggccaccctttcaacgatgcgaataaaagaaccgctaccgaggccctggaccagttcattaaaaagaatcgcggaggccgcggcatcatcggtgggaaacacaaggccatctatgtcgtcaatcagtgcgccgaccagcatccggccctgacgataaacaatggaaagctcgtaccggcgttgaccaagctcattccggcagcccagcccggagagcccgcctga

SEQ ID NO: 358735 - DNA, 1788 bp, Pseudomonas aeruginosa
atgtctttcaatcactattaccagagcgaactcaccgcgctgcgccagctaggacgccgtttcgccgagcgtagcccggccctggccccgtttctcgggcaggtcggacgcgatccggatgtcgagcgcctgctcgagggctttgccttcctgaccgggcggttgcggcagaagctggacgacgagttgccggaactcagccactcgatgatgcacctgctgtggccgaactatatgcgcccgctgccggctttcagcattctccagttcgaccccctgacccgcccgggcggggcgctgcgcgtggagcgcgatacgccggtcgagagccggccggtgggcgaggtcgcctgtcgcttccgtacctgctacgccaccgaggtcctgccgctggtgctggaggcgctaaactattcggtgaccggcgagggtgcgctgctcggcctgcgcctggcgatgaactgcgacgggcatttcggcgagctgggcctgagtcggctgcgcctgcacctggccggcgagcgctacatcagccagatgctctacctgtgcctgctgcgcaacctggagagcatccaactgattccgctggacgcccatgggcggccgctggatggcgtggccggcaagccgatgtcgttccgcctgacgggcgagcgggtgcagcctgtggggttcgccgaagacgaggcgctgattccctatccgctgaatactttccgtggctatcgctacctgcaggagtacttcgcgttccaggacaagttcctgttcgtcgacgtggatggcctggacctgctcggcgcgctgcccgaggaaaccctcaagcaggtccgcggcctcgagttgcgcttcgatatccgcaagagcggcatccagcgcctgcacccgacgctggagaacgtcaagttgtactgtacgccggtggccaacctgttccgccacgatgcgctgccgatccgcctcgacggcaagcaggacgaatacctgctgatgccggccgaatacagcctggaggactgcggggtgttctcggtagaaggcgtcaccggctggcggccgggcgggctcggctaccaggcctacgtaccgttcgagtccttcgaacacgatcccagcttcgacgtcccggaagcacggccccactacagcgtccggcagcgtacctcgttgctgcacgatggcctggatacctacctgagcttcggcatccgccatcccgagcagatcgagacgctgtcggtggaactgacctgcaccaaccagaacctgccccaacggctgcgcctgggcgatatctgcgtcgtctgcgaaggcacgccggagttcctcggtttccgcaatatcaccccggcgacgccgagctacgcgccgccgctgaaccgcgatttcctctggaaactgatcagcaacatgtcgctcaactacctgtcgctggccaacgtcgacgcgctcaaggtgatcctcgaaacctacgacctgccgcgctactacgaccagcatgcggcgaaggtcagcaagcgcctgctgggcgggctcaaggcggtccgccacgagcatgtcgaccgcctgcatcggggcctgccgctgcgcggcttgcgtaccgagctgacgatcgatccggaaggctacatcggcgagggcgacctgttcgtgttcgcttcggttctgaacgaatttttcgcgctttacgccagcatcaattcctaccacgagttgcgggtgaggagcacacagggagacgtgtaccaatggaaaccgcgcatgggtttgcagcccctgctgtaa

SEQ ID NO: 358736 - DNA, 309 bp, Pseudomonas aeruginosa
atgcatgtcttcgcgaccctgtcggcccttgtcatgttgtggttgtccgtgacggacccgcgttcggcctggatcatccaggccccattcagcggctggagtttcgacctgcactatgtgctcttcgtcttctgcctggccacgttcattccgctcctgctcatcgttgccctcagcctgctccaggccacgcggctgatggtcggcggaaaaagccgcagtgtcggcctggggtcgctggggttggcctgcttctacggtctggcgctgtaccgtttcaatggctggttcgtccatgaggtcttctga

SEQ ID NO: 358737 - DNA, 3456 bp, Pseudomonas aeruginosa
atgaatagaagctacgccctggtctggaaccaggccacaggatgctggaatgtcgccagcgaaggcacccgccgccgcggcaagagcggccgcggcacgctgctggcaatcgccggcgcatcgttgctgaaccttctcggcctgcccgaagccttcgccctgccctccgacggcaagatcgtcaatggccaaggcagcatcaataccagcgtcgacggcaagcacatgaccatcgaccagcagagccagaagctgatcgcccactggaacggcttcgacatcgccgccgacgagcgcgtcagcttccagcaacagaacagcaatgccatcgccctcaaccgggtactcggcaacgacggcagcaagatcctgggcaagctcgacgccaacggcaaggtgttcctgatcaaccccaacggggtgatgttcggcaagaccgcccaggtcaacgtcgggggcctggtggccagcaccctggacatttccgacaaggacttcctcgacggcaattaccgcttcagcggcaagtccggcgccagcgtgagcaacgccggaacccttagtgccagcgaaggcggcagcatcgccctgctcggcgcgcgggtcgacaacagcggcgtggtccaggcccgcctgggcagcgtcgccctcggcgccggccaggatgtcagcctgaacttcgacggcgacgggctgctcaacctgcaggtcaacgccggcgcggtcgacgccctggcgcacaatggcggcctgctcaaggccgacggcggccaggtgctgatgactgcccgcagcgccgacagcctgctcaagaccgtggtcagcaaccagggcgtgatcgaggccaagaccctgcaaaacaaatccggccgcatcgtcctcgatgccggcgatggcggcgccgtcctggtggctggccgacaggacgccagcgccctgggcggccagggcgatggcggcgtagtggagaaccgcggcggcaaggtcgaggtgcaactggcggcccaggtggacacccaggccgaccagggtcggaccggcacctggaagatccgctcgaatgaagtggatgtcgcccagaccgctacgcgcaagaccccgaccctgctggccgataccctgtcgcgcaacctgggcagcacccatatcgaactcaccagcaagcgcggcaacctgaaggtcgacgcgccggtttcctggaacagcgccaacaagctgagcctgagcgccgagcagggcgacgtcgagctgaacggaaccatcaaagccaccggcaacggcgcgggcctggccttgaacgcccgtaacgagattcgccagaaggccgatatcacactctccggacagaacacggcactgagcctgaactacggcaagcgccacagccttcaggacgacgcgcgagtgaccctgtccggcaaaggcgcctccttccgcgccaacgaccaggactacaaggtcgtccagagcctccagcaactgcgagagatcgaccggaatctcggcgaacgttacgtactgggcaacgccatcgacggcggcaacaccagcttcctgtccctgggcaatggcagggccttcaccggcatcttcgacggcctgggcaacgagatcagcaacctggcggtctatggcaccagcgcgttcatcggcctgttcagtaacaaccacggcacgctgcgcaacctgtacctcgaccgggtcgaggtcagcggatcccgctccaccggctacaacaaccatgtcggtacgctcgccggcgccaacatcggcaccatccataacgtcaaggtcagcaacgcccgcgtcaccggctccgcacagaacaacgcactgggtgggctggtcggcctgaacctcggccgcatcgatcaggcctccgccagcggccaactgatcggcaatgggcgcacctacgccatcggcggcctggtgggcgagaacatttcgaccgccaacggtatcgccagcatcgacaacagccaggcggacgtgatcatctccgggcagatgtcgagcgactcgaccgcctatggcgcgggcggcctggtaggcaacaaccgggaggcacggatttccaacagccgcgcatcaggcagcctgaacctggccggtaacaacctgaacctgggtgggctggtagggcgcaactacctgggcgaactgaccaacgcaagctcctcggcctcggtttccggctctggccgtggtggctaccgtggcggtctggtcggtctgaacgaggatggaacgctgaacaacgtcgcggcccacggcaaggtcagcggcaacggcacgggagcgattggcggcctggtcggcaggaaccttcgcggcaccctccgcaacggctctgcaagcggaaacgtcgaggacacggggagtctctacgtgggtggcctgatcggccacaaccagcagggcaagatgaacaaccttctcgccagcggtaacgtcctcggcggcaggaacgcctatgtcggcggactgatcggtttcaacgagggtggctcgctgttcaacgcttcggcccagggcgccgtccacgccaacggagcactggcgctcggaggcttgatcggcaagaacgacaagggctccatcgacaatggctcggccagcggcgatgtcagcgatgccgccgcccgctacctcggcggattgatcggccacaacatcggcggcgcccatcgcaacctttcggccagcggcaacgttttcggcggaaccaacctgcatgtcggcggcctgatcggactcaacgaaaacggctccctgctcaatgcctccgcgaaaggaaacgtcggcgccaacggcgcagagtctctcggcggcctgatcggcaaaaacctcaaaggctccctgaccaatgtcagcgccagcggcgacgtgatcgacaggaacggtcgcaatctgggcggattgatcggcgcaagcgaacagggctccatcaccaatgcccgggcctatggcaaagtcagcagcatggccaacgcatcccggctcggcgggctgatcggctacagcagcgatagtctcatcacgaataccagtgcttctggcaaggtcagcggaggccttggcgcctatgccggcgggctcataggcatgctggaaagctcgggtagagtgatcaactcctcggccagtggtgaggtggaaggaggcgcatcgagcaacgtaggcggcctggtcggcatcaactatggcagcatcgacaacgcttcggcttccggcaaggtcaccagcaaccagggcctggccctgggcggtctggtcggcatgaatctagggtcggtcagtaactcctcggccagtggccaggtggttgctcaagaccgcgcgtatgtccatggtggcctgatcggtctgaaccttggaggcaagcagtccctgaactctgtaagtggtgaagcgacactggttcccatgatcggacgtgacttcagcttctga

SEQ ID NO: 358738 - DNA, 324 bp, Pseudomonas aeruginosa
atggaggagcggcggcgctcccagggatgcaccgccggcgatagagagggaggtcagcgcgacgcctgcccttccggagcccacggcaccttcttcgtcgatatccggcgaaaacccgttgaaaacgccgccttccccggcatagccaggcctgctcggcatgctttcccggagactcgcggcgtcttttcgccgaccgataccggccagcgccaagaagaggcacagcctttgctctggagcctcgacgaagagatccaggccgcagtgcgcaccccgccgtccaccggacggatgcccgacgacaagcacgacgcctcctga

SEQ ID NO: 358739 - DNA, 471 bp, Pseudomonas aeruginosa
atggcccgcattatcgccaaggaagggccagacttgccgccgctgatgccagacctgcggcacacgcccgccgatgccatccacaatctcttcggcgcggtcttcatgcaggcgctacaagaacaggatcgggaatgggtagagtcgcccgactacctgctgattgccgactttgcagggatcgacctggacctagcggagcgggtgcgccgcatgtttcttgccgggcagatcaggcccggagccttcgcgggccttgctcccgccatgccacccgaccgcatccgttctgccgcgcagccatcgaccactatccgccccgtcgagatggtccgggccatcgccgcgaccatgcccgatgccaagcccagcgaggtcatccgcgcctgcattgccgctggagtcaatccggcgacggcagcaacccaagtccgcaagtatcgaaaggcgcttgctgagtcgaacaattga

SEQ ID NO: 358740 - DNA, 1197 bp, Pseudomonas aeruginosa
atggggagcatcaaacttaccgcgacggctatcgagaagatgccgacgccagcaacacgcaaagacgtttatgacggcgaggtgccggggctggtcctccggctgctgccatccggcaccaagtcatggagcttcacttaccgggtcaagggtatgcctcgccgcctgtcgctgggcgtttatccgggcgtgacattgaagctggcgagggagcgcgcccgggaagcccgcgccgctgtccagcgaggcgaagaccccgtagaagacaagaaggccgaggaacgggaacggctgtatagcggcttcgaggcttgcgccaaggatttcgtcaagaagtactgcaagccgaagctgaagtcatgggagcaaatcgagagcgcctttgtccggctggctatccccgagttcaaggatcgtccggtcaaggacattcgccgccgcgacattgttgatctactggagaaggtagccgccaagacgccgggccagtccaaccatctgcgggcgtacctctccaagatgttcaactggctgctggagcgggagatagtcgaggtcaatccggtcgtcgggattgcgcagcggtacaagccacaagcccggacccgcatcctgaccgacgacgaggttaaggcgctctggaaggcaaccgggcgcatcggcggggccttcggcgactgcacccgtctcctgctgctgtccggtatgcgccgcgacgaggcggggctgttgcgctgggatgaggtgaacggggaatgggccagcctcccggcctcacgcatgaaggcaggccgcgactaccgcgccccgctgtcgaagaaggcgcaagccatcatcgagggccgtccgcgcttcgacaagtgcgcctttgtcttcacgaccaacggcaaggtagccatcaacggctggggcaaggccaagcagacgctggaccagtacatgagcgaggaactaggggagccggtcgccgactggcggctgcatgacttgcgccgcacctgcgcttccggtctggcgaagctgggcgttcgggccgaggtcatcaagcgcatcttggcgcataccccgccagccgctgacgtgacggcatcggtctataaccagcacatgtatgacgccgaggcgcggcaggccatcgaggcatgggccgagcatgtggccagcctgaccgaccttgcgggccagtctcaaggctaa

SEQ ID NO: 358741 - DNA, 195 bp, Pseudomonas aeruginosa
atgaaacgatcaaagagtgttcgggcagaaaatgaatctgtcccctttttctcttttgacttcctgtacggcgacagcacagggcttccggagagtgattacagcgtggatgacattaaggcactcactgaaaatatcttccgccacgtgtaccgggcttacccgaccgtgccgtcgccgatatacgggcactga

SEQ ID NO: 358742 - DNA, 1212 bp, Pseudomonas aeruginosa
atgcttatgacaagcaaagcaaatgaattcgatgcaacagcgtcaatgcttggttacctgtaccaggcccggtacgccttgttcttaagtcttcagaaaatccgggaggtccaggacccggatgaatgtttcgtttctatcgaaaagctggacgatattgcttttgagacaggtggaaaccccgccgacattcttcagaccaaataccatggtactgaaggaaacctgaccgacagaagcgccgacctgtggaaaaccatcagggtttgggcagaaggcataacaaagggcagccttgaccccgccacgacgaacttcacccttatcacgacccagagcgcgcctgacaccgggctggtggctgctttgcagcctgcttccttccgtgacatcaagacggcacgggattttctcgatgggattgccgccgagacttccaacgcgacaaacctaccggcctatgcggcatacaacgccttgctggactggcaaaaggaccagcttatcggctccatcaacatcctgtgccgctccgcgagcattctggatgtagcggaactgataaaaaaagaactcaggaccactgccgagaaaagacatatcgatgctttcagcacacgcctggagggtgagtggtttaagcgctttatcagcgccatgtcgtcgtcagatgaaaaggaagtctgcctcggtgaggtcgtcgccatcatcgacgatctgcgctcccagttttccttgaccaatctgacagcagattatgccgacgcggagccagaagatattgatgtcgatgacgacgatagaaattttgtagagcagttgcgtctggtagggataccaaaccaggcgatccgctttgcgataatcaattattaccgtgcttgcgaacagcgttcacgctggtcaagagatgggctcgtcaaacccggcgaactcaaatcatatttgaaaagactggaagaggaatggttaaaccattcgtctctcattcttccagatgttgacactagcaatgtcgagcaatgtagaaaatctgggcgagatgtctacggcaagtgccagaacgaaggcgcattggccattcggcgagactttaaccatccttacgtcgccagaggaagttatcatactctagctgatgagctgaaaataggctggcacccaaattacaaatcccttcttttaaaggaagataagaagggagcggcctga

SEQ ID NO: 358743 - DNA, 498 bp, Pseudomonas aeruginosa
atgtcgttgagagaaattctgacgcaggaagagatcaatctatacaacccggcctataccggctttcttttcctctcatcattgcgtgcctattgcgaagtcaatgagcaggggatgcactgcgcattgccctatatagtggtcccgatggcgctatcgccgcgtatcgcggccagtctgccgacgacctacaggactcccatcgcttcatgggttgctgagcaaggaggagagttatctgatttttcggcgatggcgtcagcctgtattcctgttgtcaacgctgccacgctctttttgctggataggaaagtcatccagctgacagaagaggcgtactaccttattgccagtaatgaattagccaaagcgcccagcctcttcaataagagcgagagcatgaagcaagctcttcatgcagccaactttataggaaaatggtttgcccattcctcgaccgttgaaaccatttacgcacagctagggatcaggccatga

SEQ ID NO: 358744 - DNA, 1953 bp, Pseudomonas aeruginosa
atgaccatgcagattctacaaatatccgtctacggcaaaaacggagagcgccgagatgtgaaatttaatccctcccgcgtcaacatcattacgggagcatccaagaagggaaagtcatcccttctggatattgtagagtactgcttgggttccagtgaatgtggagttgcagagggcttcatcaggaaaaccgtcgattggtacgccatccttcttcaattccgtgatacgcaggtgttcattgcccgcgctgcgccactgcaggggcaaaactccagcagcacatcgcatatgattgtggaggcggacataaaggttccggacaggtcggagctcaagtcatccacgagcattgacagcgttgttaatttcctgacggagaagcttggtgtcccggagcaggaaacagaagttcctgaaggtcagacacgcacttccatctccatcaatttcaaacactcaaggtattatctctttcagagccaggatgagattgccgctaaaaagatcctgtttcaccgacaatcagaaccgcacattccccaggcgatcaaagacaccattccatatttcctgggggctgctgaagatgaccgcctgaaggacctctcctccttgcggggcctgaagcaggaaaagacacgtctcaccaagaagctgtatgaacttgaatccctgaaaggggatgggcttcagaaaggttatgtcttgctggcagaagccgcagaagccggtctttatacgggtgaaaatctcatccccaacgagaaagacctgcttgctagcctctcccgcatcagcaactgggcgccgccgctcgttcctgttgaagacaataccgacgatccgttgcccgcactggagcgcgaatatcagcgcttccagcagcaaaagcgtgaggtgcggttcaagctcaatgccgccaacgagttcgcaaggtcggaaaccggctttgaaaaagaagccgaagaacagagtttcaggctgcaatccattggcctcttcaagaaggcagcggcagccgaacatatctgccccatatgcgactctcagcataaagccgctgatagtgccgagggcatcattcagcaagcccttgcagaccttgcgcacaagctcgatggcgtcgagcgaaaccgcccacggattacgggttacattcagggcctgatcaaggagcaaaatgatctggcagataagatcaagaagactcgtgacagcatgaatcagatcaggtcgaaggacgctacttcggaaggtttgcaggacaggaatctgctgaaatccagagtcgctggtcgggtatcgctctatctggacggcatcaactgggcagacgataccgggccgatcaagagacaaattgctgcgcttgagccgcagatcgaagagctcgaagaaaggctaaatcctgatgctctcaaagagaggctggacgcccagatcagcatcatcagcgaggatatgacgcggtgggcaagggaacttggactggaacactcggaacatcctatccgtcttgatatacctaagcttactgtcgtggccgagacgccccacggcaggacgccgctctatcgcatgggcagcggtgaaaactgggttggttatcacctcgtggcttatctggcattagccaaatggttcatcaaagaaaatcgtcccgtcggcaggttcatcttctttgatcagcccactcaggtgtacttcccgtctgacaaggccgtgaccggaaacattgacgaaattgagaacgacgaggaccgcaaagcggtcaagaaaatgttcgaatggctcttcaaggtggtcgaagaggagctggggcctgaccttcaggtgatcgtcaccgaccatgccgatattgaggaggactggtatcagtccgctatcgccgatgaaaaatggcgtggagatgttgcgcttattccaaagcattggtacgcggaagagtaa

SEQ ID NO: 358745 - DNA, 1044 bp, Pseudomonas aeruginosa
ttggacgcaccgcttcgcatcgccctcatcggcgccggcaacatgggccgccagcattaccatcgcttgcagcgaatcgccggtgcgcgcctgtgtgcggtggccgatccccagggccaggcgttcgccgcggacgccggcgtgccctggttcggcgatcatcggaggttgctggaaaaagcccggccgcaagcggcgatcgtcgccaatccgaacaacctgcatgtcgccaccgccctcgactgcctcgccgccggggtgccgctgctgctggaaaaaccggtcggcgtgcagctcgacgaagtgagcgagctggtggccgccgcccggcgatctggcgttccgctgctggtcggtcaccatcgtcggcacaatccgctggtcgtgcgggcgcgccaattgatcgccgagggcgcgctcggtcggttgctgtcggtcaccgcgctctggcagttgaagaagcccgacagttatttcgaggtggcctggcgtcgcgagcccggcgcgggaatgttgctgaccaacctgatccatgacctcgacctgctccgccacctgtgcggggaagtgcgggaggtgcaggcgctggccggcaacgctatccgtggcctgcccaacgaagacaatgtcgcagtgctcctgcgcttcgccaatggcgcgctgggcagcctgaccgcttgcgacgctgcggcggcgccctggagctgggagctggcagccggggagaacccggtctatccgcgccaggccgagcaaccctgctacctgctggccggcaccgaaggtgccctgagccttccccagctccgccgctggcgctacgccgaggctcggcagggctggcacgacccgctggcggccagcgtggaggccgtggcgacaggcgaccccctgcaacgccagctagagcacttcgtccgggtcgcgcggggcgaggaagcgccattgatggatgccaccgacgccgctcgcaccctggcgctggtcgaggcggttcgcgaggccgcgcgcagtggccgggcctgcgcgccggccagtttctga

SEQ ID NO: 358746 - DNA, 942 bp, Pseudomonas aeruginosa
atgaacgcgattcactttcccgggctggccggagagattgcccagcacctcaacgaacaggcccctgtcgccactccccggatggcaatgggcggggccattgccctgctgggggccatcgtcggcgctggctgggagttgccgcatatcggcctttacccagaatcagccgtgcgccgcgtcctgccgcaccttgagccggaggacttcccgacgacccagcccatcgggcaaagcgtcatgctggtagccgacccggcgcacggcaagggcggaatcatcgaaggggttgagcaactgctgggcgggctgctacggcaacgcccggacacctcggccattgcccagcggctgctgaccatccagcacttcaaccatctggcgctcgccgggatggagtcggaacccgagaatgtggatagggtgcgcggcatcgtcaagcctgcgaccttcgaccggctgctagacggctccctgttcctgctggccgaatcgacgccggatgactttgattacctgctgccgcattggtacgagggcagcccgttctacggccagtgcctgatgatccggcaccatgggccgaagggcgagaagaaccgacaaccacatgggcagccgtccgccttgctgctgggccgtctggccgagctggcggacctagcccaagcggggcgaagggttctagtcgaagtcactgaggacgccgccgcttggtatcgcctgttcctgcgcttggacatggacacctacagcgagcatgggccggtcgggctggagggcgaatgggcgcggcagtcgttgcaagtggcggccatcgtcgcggtagggctggacccgctacgcccggtcatcaccgccgagttgttccggcttgccagcgaccttgcaagcgaaggcgtccggctggcccgcgctgggctgagggtggctggggtgtaa

SEQ ID NO: 358747 - DNA, 2232 bp, Pseudomonas aeruginosa
atgagaaacaacattccgctggagctgcaacagcttccgcaatgggtagtcgcggccgccgataagaagccgctagacccgaagaccgggggcgcagcctctgtcactgattcgaccacatgggcggccttcgatgtcgcctgcgcctatgccgaccagtacggcttgcgcgtcggcttcgtgctggctgaatccgacccttacaccatcatcgacctggacgacaaacccgagcgcccggcgaccgacgagcagaaggcccgcttcgccaagatcatcgagaagttcgacagctacaccgagcgatcgcaatccgggcgcggcgttcatatcgtcgtgcgcggcaagatgcctgctggcgtccatcgggatggcgtcgaggtctattccagctcccgctacatgatctgcaccggcgatgtaatgcgcccgctggagattgcagcccggcaagacctgctggacgtgctgtatggcgagatgaagcccgctccgcaagttgatctggaggagcgcgaggaactgcaagacgacgccggccttgtggaaatggcgatgcgcgccatcaacggggacaagttcaacctgctatgtgctggagaatgggcggcgctgggctacgagagccaaagcgaggccgacttcgccctgctgtccatcttcgcctactactcgcccagcaatgagcaggtaaagcgcctgttccgaatgtccgccctcggcaagcgcgacaagcaccggggcaccgattaccggattgatctggcgcttcgaaagatcagggcgaatgggtcgatgccggtcgatctggaggcaatggaggaactagccgcccaagtggcaaccgcgccacaagcccccatcccggccccctcccatagcctcgcccctcggctggaaggccccgttaccggcgagttactgccccctccgggcttggtcggcgagctggcccagtacatctacagttcggctatccgcccagtgccggaggtcgctcttgctgctgcgctggggctagttgctggggtcgctggtcgcacctactacaccagcggcctgcctactggcttgaacctctacttgatcctgctggcgaagaccggcatcgggaaggaagggggcaagcaaggcatcaatcgcctgctgtcagagatcagccccagcattccgaccgtcagccgcttcatcggtccgacctcgtttgcctccgggcaagccttggtgaagcacttcgaggaacggccttgcttctactcggtgctggacgagttcggccatacgctcaagcgcatcacgacgcccaaggcatccggtgcagaacaagccctgcacagtgaactgctggcgctgtattcgcgcagcgggccggatggcttcgttggggtgcaggcatacagcgacaaggaaaagaacaccgccgtagttcgtgcccccagcctgaccatcatcggtgaatctaccccggaggtcttcttcggttgcctcgacagcgccttggtccaagatggcttggtgcctcgcctgctggtgatcgaatacaccggggggcgcccgccgcgcaatcgctacgcaggtggcaagccggacgcgacgctggttaggcggtttgctgatctggttacggtcgccgtccatggcgagcagaacggcagctttgcaaaggtccatctcgccgctgacgcggaagccctgctggatgccttcgacagggaatgcgatgaccacatcaatggcgggaacgctgccgaggtccagctatggaaccgggcgcacctcaacgccctgaaggtcgcctctgtcatcggtgtgggctgcaacccctaccagccgctggtcaccgttgaacatgcccgctgggcggtcgagtttgtccggcgcagcgttcatgccgtccagtcccgcttcgataaaggcgaggtcggcggcggcgatggtgccaaggccgaagcagcaattcgtacagcggtagctgacttcctcgccatgcctcccgagaagcgcgagacctacaagacgcccaaggcattccaaacgggcagcgtcatcccgcattcgtacctgtacgcgaaattgaagcgggtgcagccgttcaaggatgagcgccgccttctggatgaaaccttgaaggcgttgctcgaagccggggcgctgcaacagctaccgccgcagcaagtgcgggagaaattcaaactagataccaaggcctattgcgtcggccatagctggtaa

SEQ ID NO: 358748 - DNA, 198 bp, Pseudomonas aeruginosa
atgaccgagagcgcgatcctccgctacctcgaagtagctaccctgctcaacatttcccaagagtcgctttaccgctggcagcggacgggcatctttccgaagcctatcaagtacggtcctcgttgcgtcggctggcctcgtgaggtcgtcgaacaatggctggcggataaacgcgcagcccgctccgcacaacagtaa

SEQ ID NO: 358749 - DNA, 1431 bp, Pseudomonas aeruginosa
atgagcaataacaacgaggcgtcacgcccgaagatcgaggtgcgttcgatcgattacgttccccgccacgagcgtcacggcaaggtctggcaccaggcgccgttctggttcaccggcaatttcgtactcaccaccatggtcaccggcttcaccgggccggccctcggcctgggggcgctgtactcgatcctggcgatcgtcctcggcgtctgcttcggcaccttcttcatggccttccatgccaaccagggcccgcgcatgggcttgccgcagatgatccagtcgcgtgcccagttcggcctgcgcggggccatcgtgccgttcgccgcggtggtcttcgtctatatcggcttcaacgtgttcaacgtgatcctcgccaccgacgcgatcaacaccgtgctgccgggacaccgcgcaccctggtacgtcctgctgatcggcgtggcggtgttgctcgccatcgtcggccacgacctgctgcataccgtgcagcgctggctgacctacgtgatgatcgcggtgttcggcgtcctcaccgtcagcgcgttgcgcagcctcgaagcggacgcggcgctgggcggtacgccggcgttctcctggagcgcgttcctggtccaactgtcggccgccgccggctaccagatcagctatgcggtctacgtctccgactactcccgctacctgccgcacgaaacgcccacccgcaaggtgatcttctggacctacctgggcgccgccggttcggcgctctggctgatgtcgctgggcgcattcctcgcctcggcattgccggcgccggatgccatcggcagcgtgcgcgaggtgggcaaccggctgtatcccggcttcggcaccttcaccgtgctgatcgccgtcccggccctggtggggatcatggcggtcaactgctatggcgccatgctcaccagcctcagcgccatcgatgccttccgcaaggtcaccccgaccctcaacctgcgcgtcaccgggatcggcgtgatcgccctggtggtattcggcgtggccctgtcgatcccggaaagctacctgggcagcttcaacaccttcgtcctgctgatgctgtacttcctggtgccctggaccgcggtcaacctggtggacttctatttcgtgcgcaacggtcactacgccatcagcgaaatcttcaatcccgaaggcatctacggtcactggggccgaccggggttgaccgcctacctggccgggttgctggcgatggtcccgttcatgtccctgagcttctacagcggtcccttcgccgtggcgcttggcggcgccgacgtcgccttcgtggtcggcctgctggtggccggcgcggtctatgccttcatgtgccgggccctggacctggaggcggaacgacggctcgccaccctcggcgagcgcctgctggaagaggggggcgcctga

SEQ ID NO: 358750 - DNA, 294 bp, Pseudomonas aeruginosa; identical to SEQ ID NO: 326684

SEQ ID NO: 358751 - DNA, 288 bp, Pseudomonas aeruginosa
atgatcaccctgatccaatctgttgaaggccaagaagtctatgctggggagctgccggctccgtttgtactcagaatggatcaaaacggcgtacgtgaattgttgggcaagcccttggagtccaaggggcccgtcaaactaccgggaggtctcggcatgcgcggcggttgggatgcctacctccttcaagaaaagacgcaccccagcgcccgagtaggtttcagctataccgccgacatgaaggtcaaaacactagcattcgcactgcttaatccaggccacgactga

SEQ ID NO: 358752 - DNA, 1488 bp, Pseudomonas aeruginosa
atggctgatttggccaaggttggcgaccctgttacctgcccgcgatgcgggcccaaccacatcgtcagcggatcacccgataccctggtggacgatcaacccgctgcgctggtgggcgtcagcaagaccgcttgcggcgccactatcatctccggactgtcctggttcttcatcgataactgccacgccgctgtgcacggcagcatgcactcgcatggtggggtcgtgttgtcgtcctcgacggtgaagacgggagcacccagctccgtcgccgggcgttacgcgaccgcctcgcccgtcgatttcaaccatgtcagttatgcggacgagcgctatgagtatggcgccgatccgaaccagccgcatttgaagggcgggctggtatttatcggcgagcctgagcaggcttgcgtatttgccaagacatgctctgtacctccagagtcaaccgaggccggcacggggatcgaacccgtggccaacttcggccaggccatggtgatgggttcgacggcgatcgtcagcacggaaggcggcgcaacccttggccgggtagccgggcaagctgcccttgaaacgctcggtacttggagtctacgaggtgctgccgccgcagcgggtacagcggccagtacgctgttgttggccctgtggcctaccagcatgggtgacgccaccctgaccgaggaacagttgcgcgggatgatggtggcccccaccagggtgcgctttcagttccgcagggatgccgaaggcatcatgcgggtgtatggcattcacaccagcgcggcctcgggcatggacagtgtgccggtggtcagccaatggcgtcagattggcagcgccatggaggcacagctcaacggtgtcaccatcatctggacgccgaatgaaggccctgtggtgcaggcgccgaccacctatccgggtgtgaccgacgcgctggaaaatatcctggtgcatcctgtcgcagagggcaccgatagccagctcgaaatttatcctacctcggacgatatgacctggcaggactgcattctggttctgccgattgagtcgggcgtgccgccgctgtacgtggtgtttgccaaaccggcagtcaatccgctggaaacggggctatacggaagcttctctgggcgaccacgcaatggtcttcatctggatcacatgccttcgcaaggtgctatcaggcgtcaccttgaaggaatcgctcccgatcttgaagtcgaagaaattgagcaactgctgaagagcgtcgcaagcattgctgttcctgcccgagttcaccagaaatacagtgagacctacggctggcgaaatacaaaggtcagacaagctatcgactctgacgatctccgtgccgcggttgacagcaatttcaacacgatcaagccctatttgctggaagaggggtactccgagggtgatattgaggtcgcccgagagcaaatgcaccagatcaatgaagaacaagggtggtactaa

SEQ ID NO: 358753 - DNA, 396 bp, Pseudomonas aeruginosa
atgcatcgcttccgctgctgcgtcgggtatgaatggcagcgtcgcagccgcgacgccttggtcaacctgctctgtccacgctgtatgtcgcatgcgctggcgctgaaacgcatggacagcctgcgccgcctgtacgaagcggtggccgggtggggcgggctcctgctgctggagaacgtgtatttcggcttggtctggcactaccgcttcgtttgccggcagggccatgaatggagaacgaatgcgcgcaacgtgctgaacggcagttggtgtccacaatgcgcccgtttgcgaaggggacgcctgatgcgttcgaacggcctcgatgatcttgcagcacgttcaagctccccagccctggatgcagtgcacagggcgctacccgccgaaacgtag

SEQ ID NO: 358754 - DNA, 309 bp, Pseudomonas aeruginosa
atggccgtgtctaggcaggatgccagccggcatccgctgcccgaaccgctccagcgcacgctcgaacgcctgggcttcgtgtgcgaggacgaggtctggaacggctggcaaagaccgcatgccttccgctgttcggcgggacatgccctggcgttagcgccagcgaggctgtcgaacctgctcggctgccgcgcttgccatggccggaggacactctggcagtgcctgcggctcgcagcggagcggctggggggacgcctggcggggcaggagcgcaatgcatcgcttccgctgctgcgtcgggtatga

SEQ ID NO: 358755 - DNA, 2580 bp, Pseudomonas aeruginosa
atgtccctctcgctgaatagtccggcgccccaatccatcgacaaaccaccgcatatgctcgagggtgggcttctgccgcggactcctgcacagatagctggcaatcggcgggtacaggacgagcgctatttccaggcccacatacgcgctcaggcggccgcccggaaggctggcgactccccgccgatgttgccctgcgccaagacgctgcatgtcagcctgttcttcgatggcaccaataacaacgaacctgcggacaagctggccacgccgccgagcaccaccaatgtggcgcggttgtatcacgcgactctcgggccgggaaacggggtgacggatgagcaggctggcgagcaggggctctatcgctactacatggccggggtcggcactgtcttcgaagagatcggcgaatttgaaccatcgaatgcgggcttgaaattcgccacgggcggtgagaaccggatcaactgggcgctgacccgcctgctcgatgtcctgcgttgggaactgtccggctcgcgcctgtcggccaaggatgcccggagcatgatcgagagcatggccgccagcggttggctggagacagccagcctgggccaggccagcgatggccaggggaaacgcgcggcggtgctgctgccgcacatgcaggcgttggagaaacagatcgccgcccgccccaaacccgaactgctcggcatgcagctgtatgtctacgggttctcccgtggcgccgccgaggcgcggaccttcgtcaactggctggccgagctgacccgccaggaggacggcggctaccgcttcgccggcatcgagctgagcgtggagttcctcggcctgttcgataccgtggcctcggtggggatcgccgacctggcgccgttcgccgatggccatatgggctgggccaacgacagccagcgcctgcccgacgacgaaggcttcctgcgccgctgcgtgcacctggtggcggcccatgagcagcgcgcctgcttcccgctggactcgatccggcgcaaggcgcggccggacgacccggactgcccctccggctaccgggccggcagccaggagttcatctatcccggcgtccactcggacgtcggcggcggctacccgcccggcgagcagggcaaggccctggccgggggcgctttcgtcctctcgcaggtggcgctgcaccatatgtacgacgcggcctatcgggcgggggcgccgttgcaggctccgccactggcgttgaatgctcagcaggcgaagtcttggccatggttggcaatggacgacggaacgtataaggagttcgacattgccagcgacctgatctcccgcttcaacacctgggtcgaccaattgagcagcggttccctcgaagacgtgatgatcgaggaactcaagctgatcaccggctggcgggtcgagcgctatgcccatggcagccaggcgcgccagccgtacttccagagccgccaggggcgggatgtcacgcccagggagcggcaggcgttcgagaccctgcaccagtaccagttggccgaggacgccgcggcccgccgtggcgaccccgcgccggtgccgacggagcggcaggcgcgcgagcgtgaggaggcgcaggcggtgcgccgcgcctacgaggcgcgtactggcggcgacccggaggcaccgctgaacacccgcaaggcctacgatccaccgctggagcagcggcagttgcagaatgccgcccgggacttccgccgcgactacatccccgaatggacgttcggcggtgatggcggctggagcctggggagcatggcgaacgtgctgttcggcgggctggtgtacatgaccaacgaggtggacgaggccgaggagtacgccaagctccgcgatggcggcgaaaaggcctgccgacgtctgttcagccgcggcggcgcgccgctggacgacaaggccgcgcggctggtggcgctgttcgacgagcaggtccacgactcgcgggcctggttcatgaacgcggaactcaacgcgcgggaaatctggagcgactatttccgctaccgctgcatcttcttcgacagccagagcaaccgctcgctgaagctgctggccaggggcatgcaggtgatcggggtgggcatcgccctgggcagcattggcctgagcatcaagcggcgcaatccgaagtacctggtcggtctggtcctgccgtcgctgggcaccccggtgctgcgcggcaagctcggcctgccgcagatcgccgcgttcgatccgctcaccgggctggctttgccgatgctggaggttaccgagcaactggcggctttcagccgcgacagcgggccggcccagcgcctggcggcagccctgccgccgccgctgccgctcagcgtagccagcgcgacgacgccggagctgcgggcgattcttgccgcgcagcagcgcgtggccatggcgagcgccgctgccggcggggcgaagggcggttggctggagcaggccgccgcgctgttcgaggtcggcgagccatcctcgatggggcggccaacgctgctggagcgggtgagggaggaaacccgggatggccgtgtctag

SEQ ID NO: 358756 - DNA, 123 bp, Pseudomonas aeruginosa
atgaccataaccaaagagcgcgaccacgactttcacctgatcgcagggaaggaaatgcacatcgatggcaccgatatcgtcatatggaggaatatccactactgcacggtggcgagtatttag

SEQ ID NO: 358757 - DNA, 123 bp, Pseudomonas aeruginosa
atgaccataaccaaagagtgcgaccacgactttcacctgatcgcagggaaggaaatgcacatcgatggcaccgatatcgtcatatggaggaatatccactactgcacggtggcgagtatttag

SEQ ID NO: 358758 - DNA, 204 bp, Pseudomonas aeruginosa
atggagaaacatgagtcctattacacccgccaccgtgcagtagtggaagtccctccgtatgacgatattggcgccatcgatgtgcatttccttccctgcgatcaggtgaaagtcgtggccgcgctctttggttatggtcatccgcaataccccttcaacgagccgctgaagatgaaggagccgaagacatgtccggcacgctga

SEQ ID NO: 358759 - DNA, 807 bp, Pseudomonas aeruginosa
atgaacagcctgccggaaatttccacctcgcgttccgctgccgtgctctggctcgaaggcctggcgcggcaggccgccgctaaccgcctggcgcatttcgacctgctgctggacgccaccggcctgcccacgccgttgccgcccgcgaccgcggaacagccgagcgcccgtctgttcgatggcaccccggaacagaccctggccgagcaggggccgcacctgcgccgcttccgcctggacgatccacggcaactcgacgcggcccgcaacctggccgcaagcctcgattgcgcgcgcctgctggccctgctcagcccctggcgcttcgacgccctggccgcacatctgcgccactgctcgcaagcgcactggggccgcgcagggcacggcgggctgctgcgctactacgatccgcgcctgttccaactgtgcagcgacatgctgctgccggcgcaggccgaatggttccacgcgccagccatcgcctggcactggcgtgacggcgcgggccagtcccgcgaactggctggccgcccatgccggcaggaggaactggcgacgccgctgccggcgttgcaactgaacgacggacagttgttcgaactgctggcctggagcgaagccgtatggttctgcgagcgccaggcgttggcttctgcctcgctgggtttcgccagcgagacggcattgcaccggcatatcgtccatggcttggccgcggcccggcgggagcggatagacgaggccggccgcgaagacttcctgctcggctggctcgaacggcagaagagcggaacatcggtatga

SEQ ID NO: 358760 - DNA, 1152 bp, Pseudomonas aeruginosa
atgagcagcatggactttttgggcaagctgctcgatggggtgacagtggagtggaaacctctgggggaagttagctcgatcaaaacgggccagtcagtaaacaagcaaatgatttcggccaaccctggcgaatatcccgttattaacagtggacgcgagccgcttgggtttatcgatgagtggaacactgataacgacccaattgggataacgtcacgcggcgcaggtgtcggttcggtgacatggcagccgggcaaatattttcgaggcaatctgaactattccgtcactatcaagaacggtgagttagttagcacaagatacctttatcacttgctgcttgaaatgcaaccagaaattcagtctctctgcacgtatgacggaatccccgctttgaacgcaggcaacttgaaagagttgccagtccccatcccctgccccgacaaccccaaaaaatcgcttgaaatccaggcagaaatcgttcgcatactggacagcttcaccgagctgaccgccgagctgaccgccgagctgaccgcacgcaaaaaacaatacaaccactatcgcgatcagttgttgagttttgatggtgtggatgtcgaatggagcacgttgggtgctctagttgacgtaaataccgggtcaaagccacctgagattattgaaagtgcgacaagctttgattacatcaatgctggaacgtcccggtcgggatacagcgcagcaagcaattgtgcgggcgatgtcgtcacaactccgtcgcgaggtcagggcggaattggctacgtggggtaccaaagcaagccattctggttggggcctttgtgttacaggctgcaatcaaaagataatggtgccctgatcaacaagtaccttttctactttcttcaatcacgaagcgaactgctgttgggcttgaaaaaagaaggtggggtacccgccgtcaataagtctgacatcgttcaattggaaattcccgttccttcgctcgaagagcagaaaaggattgttaccatcctcgacaaattcgacgccttgaccaactccatcacagaaggcttgccgcgcgaaatcgagctgcgccagcagcaatacgagtattaccgtgatctgttgctgagcttcccaaggccggaatcagtggaggcatag
